United States Patent Application Publication US 2026/0097106 A1 - sequence listing, part 6

SEQ ID NO: 14 - DNA, 5186416 bp, Escherichia coli (residues 3,457,613-5,186,416 of 5,186,416)
  source 1..5186416: mol_type = genomic DNA
ggcgattgctaccgcaattcacgatgcatgcggcatctggttacgcgaatggcatttcacaccggagaaaatactcactgcgctggaaaaaatataaataataaatggccgcttcggcggcctgtttctctgtttgaacgatgactaaatagtgactgcgaaaatgagataagccgttctcaaggcgtcctgcgccccaaattcgtgggaatttattttactaattcagatgatcaaatttactttaaaaggagtgaagggatgtctgatataaaccatgcaggttctgaccttatatttgaactggaggatcgccctccctttcatcaggctctcgttggtgccattacccatctgttggcaattttcgttccgatggtaacccccgcgttaatcgtgggtgcggccttacagctttccgctgaaacaactgcctatcttgtttctatggcgatgctcgcctctggtattggtacctggttacaagtaaaccgctacggcatcgtcggttctggcctactctcaattcagtcagtcaatttttcatttgttacggtcatgattgcgctgggcagcagcatgaaaagcgacggttttcacgaagagttaatcatgtcgtcgcttctcggcgtctccttcgttggcgcatttctggttgtcggatcttcatttatcttgccctatttacgtcgggttattacgcctaccgtcagcggtattgtggtactgatgatcggcttaagcctgattaaagtcggcattatcgattttggtggaggatttgcagccaaaagcagcggtacgttcggcaattacgaacatctcggcgttggtttattggttttaattgtggtgatcggctttaactgctgtcgcagtccgttgctacgcatgggagggatcgccattgggctatgtgtcggctatatcgcatcgttatgcctgggcatggtggatttcagcagtatgcgcaatttgccgttaatcaccatcccgcatccgttcaaatacggctttagttttagcttccatcagttcctggtggttggcacgatttatctgcttagcgtgctggaagcagtcggcgatatcaccgccacggcaatggtttcccgccgccccattcagggggaagagtatcagtcccgactgaaaggcggcgtgctggcagatggtctggtttctgttatcgcctccgctgtcggttcattaccattaaccacgtttgcgcaaaataatggggttattcagatgactggcgtcgcttcacgttatgtcgggcgaaccatcgcggtaatgctggttatcctcggcttatttccgatgattggcggcttcttcacgaccattccctcggcagttctgggaggcgcaatgacgttgatgttttccatgattgccatcgctgggattcgcatcatcatcaccaacggattaaagcggcgtgaaacacttattgtcgccacttctttaggtttagggcttggcgtctcctacgatcccgaaatttttaaaatattgccagcctctatttatgtattagttgaaaaccctatttgtgctggcgggttaactgcgattttattaaatattatcctccctggtggctaccgacaggaaaacgttctgcctggtattacctcagcggaagagatggattaacagtaaaggagtcaatgatgtcaggagaacacacgttaaaagcggtacgaggcagttttattgatgtcacccgtacggtcgataacccggaagagattgcctctgcgctgcggtttattgaggatggtttattactcattaaacagggaaaagtggaatggtttggcgaatgggaaaacggaaagcatcaaattcctgacaccattcgcgtgcgcgactatcgcggcaaactgatagtaccgggctttgtcgatacacatatccattatccgcaaagtgaaatggtgggggcctatggtgagcaattgctggagtggttgaataaacacaccttccctactgaacggcgttatgaggatttagagtacgcccgcgaaatgtcggcgttcttcatcaagcagcttttacgtaacggaaccaccacggcgctggtgtttggcactgttcatccgcaatccgttgatgcgctgtttgaagccgccagtcatatcaatatgcgtatgattgccggtaaggtgatgatggaccgtaacgcaccggattatctgctcgacactgccgaaagcagctatcaccaaagcaaagaactgattgaacgctggcacaaaaatggtcgtctgctatatgcgattacgccacgcttcgccccgacctcatctcctgaacagatggcgatggcgcaacgcctgaaagaagaatatccggatacgtgggtacatacccatctctgtgaaaacaaagatgaaattgcctgggtgaaatcgctttatcctgaccatgatggttatctggatgtttaccatcagtacggcctgaccggtaaaaactgtgtctttgctcactgcgtccatctcgaagaaaaagagtgggatcgtctcagcgaaaccaaatccagcattgctttctgtccgacctccaacctttacctcggcagcggcttattcaacttgaaaaaagcatggcagaagaaagttaaagtgggcatgggaacggatatcggtgccggaaccactttcaacatgctgcaaacgctgaacgaagcctacaaagtattgcaattacaaggctatcgcctctcggcatatgaagcgttttacctggccacgctcggcggagcgaaatctctgggccttgacgatttgattggcaactttttacctggcaaagaggctgatttcgtggtgatggaacccaccgccactccgctacagcagctgcgctatgacaactctgtttctttagtcgacaaattgttcgtgatgatgacgttgggcgatgaccgttcgatctaccgcacctacgttgatggtcgtctggtgtacgaacgcaactaataataaaactttaacatcctcgtgaggacatcattatgtctggagacatcctacaaacaccggacgcaccaaagccacagggcgcgctggataattattttaaaattaccgctcgtggcagtaccgttcgtcaggaaatactggctggcttaacgacctttctggccatggtttattccgttatcgtcgttccgggaatgctgggcaaagcaggttttcctcccgcagctgtgtttgttgccacctgtctggtcgcgggcttcggctcgttgctgatgggattatgggctaatttgccaatggcgattggttgcgcgatttccttgacggcgtttaccgcattcagtctggtactcgggcaacaaattagcgttcctgtcgcactgggcgcggtatttctgatgggcgtcatcttcaccgccatttccgtaaccggtgtgcgtacctggatcttacgtaatttgccgatgggtatcgctcacggtacaggtatcggtatcgggctgtttctgctgctgattgctgctaacggtgtgggtatggttatcaaaaacccgattgaaggcttgccagttgcgctcggtgcgtttacctccttcccggtgatgatgagcttgctggggctggcggtcatcttcggcctggagaagtgtcgcgtacccggcgggatcttgttggtgattattgcaatttcgatcatcggcttaatctttgacccagcggtgaaataccacggtctggtggcgatgccaagcctgactggcgaagatggtaagtctctgattttcagcctcgatattatgggtgcactccagccaactgtacttccgagtgtactggcattggtgatgaccgcagtgttcgacgctactggcaccatccgtgccgtcgccggtcaggcgaatttgttggataaagacaaccagatcatcaacggcggcaaagccctgaccagtgactcagtaagttcaatattctccggcctggtgggcgcagcgcccgcagcggtttatatcgaatcagcggcaggaaccgccgccgggggtaaaacaggtttaaccgcaaccgtagtgggggcgttattcctgctgattctgttcttatcaccgctgtcatttttgatccctggttacgccactgcacccgctctgatgtacgtaggtttgctgatgttaagtaacgtctcgaagctggatttcaatgattttattgacgctatggctggcctggtgtgtgccgtgttcatcgttctgacttgtaatatcgttaccggtattatgctgggctttgtgacactggtcgtaggccgcgtctttgcacgcgaatggcaaaagctgaatattggtacggtgatcattactgccgcactggtcgcattttacgcgggtggttgggcaatctaatagattctccgcgcctttcagcgcggagatttctttcagagaggattctcaccgctggcaacaatacgctgctggcggactcgcctgagttctctttcagtaagcaactgcagcgcctgtgttgggcaagattcaacgcaggctggcccctcttcccgctgttcacagagatcgcatttcacgatttgttgccgggtatcccccggcaatgactgaatggtgatcatcccaaacgggcacgcactgacgcagctctgacagccaatacaacgggcagaattggcctgcaccacctgctcgcccatcgtcagcgcccccacggggcaagcgccaacacaaggggcgttttcacactgatggcacatcaccggcgcactgatgctgtccagtcgctgtaccttcagccggggtaaaaagacatcggcattcaactcctgttctgaagggtgagcgaccacacaggccacttcacaagtacggcagccaatacagtcagccggattaacgataattaacgatttcatcacgatgccttcgtatcaaacagagttaacatatcgcgcgccgcctgccttcctgcggccatggcagtgacaaccagatccgcgccatgaactgcatccccaccagcaaagacttttttcagatgcgtctgggtaggtaaatacccaacgtcgccggtttgaatcaggccccatttatcgagtttaattccgctgccctgcaaccacggcatggcatgcgcctggaaaccaaaggccataatgagaacatctgcgggcaattcaaactctgaacccgcaaccggacgaggacgacggcgaccatccggccccggctcacccatggcggtacgaatcaggcccaccgcagttaaacgcccatcttcgtcacaagcgatatattgcggctgaacattgaattgaaactcgacaccttcctcgcgcgcattgaccacctctttgcgcgagcccggcatactgacttcatcacgacgatacgcgcaggtcacgctggcggcattgaggcggatggaagtccgcaaacaatccattgtcgtatcgccaccgcccaataccacgactcgcttaccttccacgtccgtcagcggatactcttcagactccggcaaccccatgagctggcgggtatgggcagtcaagaacggtagagcctgaatgacaccgggcgcatcttcatgcggcagatcagctcgcatcatcccgtaagtccccacgccgatgaaaactgcatcatattcagaagttaaatcgctaaaggtaatatcgcggccaatttcacagttaagatgaaagtcgattcccattgcggtgaatatctctcgccgctggcttaataccgttttatcgagtttgaaaggaggtatgccaaaagtcagcataccgccaatttctggatggcgatcaaagacatcaacctgaactcctgcgcgcgccagaatatcagcacaccctaaccctgctggcccagcgccaatcaccgccactttttcgctacggggaacaactttgctgacatcgggacaccagcccatcgccagcgcggtatcggtgatgtagcgttccagattaccgatagtgactgcgccagagtgatctttcaaagtacatgcgccttcacaaagacggtcctgtggacataccctgccgcagatttctggtaaggaactggtctggtggcaaagttctgccgcttcaataatctttccttcctgtaccagacggatgtaatccggaatagcgttatgcagcgggcaatgccagttgcagttagctttttcggcacaataaacacagcggtcactctcataagtcgcttgttgtggatccagcccgcaatatatttcgccaaagtgggttttccgttcactcgctgaaattttatctgcgcctttacgcgagttaacggggagcaacgctgcactgcgagatggctgagcgtctgatgacgcttttcctgctgccgttttgcgctggcgggccacctttatctgctgtaaccctttatcgtccatcagtcgtaacgcctgtgttgggcagacttcaatacaggcttgcgtgccggaactgcgctggttacaaaggtcgcatttctgcgcaatcgtatcgaccatctcaacgacgccaaaggggcaagcgattgcgcatcttttacaaccaatacatttttgctcgtccagttgtacgctatcggactggaaagtcagagcattaaccggacaagccgtaacgcaaggggcattgttgcagtgatggcaggccaccggattcgcagcctggcctttccctacaacgtggatacgcggtctaaagtcactgtgactcagcggccagttttcttgattgtgtgccaccgcacaggcaatttcacaagcatgacagcctatacattccgcagcttcagcagcgataaacttattcatttgcatccctttcatttaatgagttatgtcttctcaaatttcgcgatgcaataaacgggcatatattaggtagcatgaccgttttaattataattttgcgactgagttcaaattattgcccctcaatctatgccgctttcattatttcaacattgccgatcaaaagagtgctatccagataaaaacgattaaatgcgagagtacgacatgccagaatgattaatgaaatatcaatatgagaaaattacagataattccattgtcaggttctcttctcattttcgtggtttaaccacgattatgtgattgcctccgcaattcctgtctctaactccccttcctcgcaaaaactggcactccacgagcatgtgtttagacagtttcattaacgtaaacggttgctttttactctggcgggcgaaaggagaaacactgatgagcgccatagattcccaacttccctcatcttctgggcaagaccgcccaactgatgaggttgaccgcatattatcaccaggaaagctgatcatactcggtctgcaacacgtccttgtcatgtacgcaggtgcagtcgctgttcctcttatgattggtgaccgactgggcctctcaaaagaagctattgcgatgctcattagctcggatctcttttgctgcgggatcgtcacattattgcaatgtatcggtatcggccgctttatggggatccgcctgccggtgattatgtcggtgacctttgctgctgtaacaccaatgatagccattgggatgaacccggatatcggcctgctggggatctttggtgccactatcgccgcgggttttatcaccacattattagcgccacttatcggtcgcttgatgcctttattcccgccactggttaccggtgtggttattacttctattgggcttagcatcattcaggtgggtattgactgggccgccggaggtaaagggaatccgcaatatggtaatcccgtttatttaggtatctcctttgccgtcttaatttttatcttgctcattactcgctatgcgaaaggatttatgtccaacgtcgccgtattactggggattgtatttggctttttactttcgtggatgatgaatgaagtcaacttatccgggctacatgatgcctcgtggtttgcgattgtcaccccgatgtcgtttggtatgccgattttcgatcccgtttccattctgaccatgactgccgtgttaatcatcgtgtttatcgagtcgatggggatgttcctggcactgggtgaaatagtcggtcgtaaactctcttcacacgatattattcgcgggctgcgtgtcgatggcgtagggacaatgataggcggaacgtttaacagcttcccccacacgtcattttcacaaaacgttggcctggttagcgtgacgcgtgttcatagccgctgggtgtgtatttcttcgggaattatattaatcctgtttggcatggtgccaaaaatggcggtgctggtcgcctccattccgcaatttgtgctgggcggcgctgggctggtgatgttcggcatggtactggcgacagggattcgaattctgtcgcgctgtaactacaccaccaaccgttacaacctctatattgtggcgatcagtctcggcgttggcatgactccgacgctctctcacgatttcttttctaagttaccggccgtactgcaaccgctgctacatagcggcattatgctcgcaacccttagcgccgttgtgctgaacgtcttctttaatggctatcagcatcatgctgacctggtgaaggaatccgtctctgataaagatttaaaagtcaggacagtacgtatgtggcttctgatgcgcaagctgaagaaaaatgagcatggagaataatatgaatcttttaatgcgcgctatattcagtctgctgttgctttttactctctctattcctgtcatttctgactgtgttgcaatggccattgaaagtcgcttcaaatatatgatgctacttttttaaatggtttttacctgtcggcatccgctcaaaacgggcggttgtcgataaacgctcacttggttaatcatttcactcttcaattatctataatgatgagtgatcagaattacatgtgagaaattatgcaaacggaacacgtcattttattgaatgcacagggagttcccacgggtacgctggaaaagtatgccgcacacacggcagacaccctcttacatctcgcgttctccagttggctgtttaatgccaaggggcaattattagttacccgccgcgcactgagcaaaaaagcatggcctggcgtgtggactaactcggtttgtgggcacccacaactgggagaaagcaacgaagacgcagtgatccgccgttgccgttatgagcttggcgtggaaattacgcctcctgaatctatctatcctgactttcgctatcgcgccaccgatccgaatggcattgtggaaaatgaagtgtgtccggtatttgccgcacgcaccaacagtgcgttacagatcaacgatgatgaagtgatggattatcaatggtgtgatttagcagatgtattacacggtattgatgccacgccgtgggcgttcagtccgtggatggtaatgcaggcagccaatagtgaagcaagaaaattgttgtctgctttcgcgcagcacaattaaaaaaccccgacatttgccggggttatgagcataacgtaatgcttattttactggacgcatcgccgggaacagaataacgtcgcggatggtatggctgttggtgaacagcattaccatacggtcgataccaattcccagacctgctgtcggcggtaagccgtgttccagtgcggtgacgtaatcttcgtcgtagaacatcgcttcgtcgtcacctgcgtctttcgcggcaacctgatccaggaagcgctgcgcctgatcttccgcgtcattcagctcgctaaagccgttaccgatttcacgaccaccaatgaagaactcaaagcggtctgtgatttccgggttaacgtcgttacgacgcgccagcggagaaacttctgccggatattcagtaatgaaggtcggctgaatcagatgtgcttctgccacttcttcgaagatctcggtaacgatacggcccagaccccagctcttctcaacgtggatgccgatagattcagcaatcgcttttgcagagtcgaagttgtccagatccgccatgtcggtttccgggcgatatttcttgatcgcttcacgcatggtcagtttttcgaacggtttaccgaagtccagcgtcacgtcgccgtaggtcacttccgtcttaccgagaatatcctgtgccagagtacggaacagcgattcggtcagctcgatcagatctttgtaatctgcgtaagccatatagagttccatcatggtgaactctgggttatgacgtacggaaataccttcgttacggaagttacggttgatttcgaatacacgctcgaagccaccgaccaccagacgcttgaggtacagttccggcgcgatacgcaggtacatgtcaagatccagcgcgttatgatgggtgataaacggacgcgcagccgcaccgcctgggatcacctgcatcatcggcgtttcaacttccataaagccgcgatttaccatgaactggcgaatgccagagaggatctgcgaacgcactttaaaggtgttgcgggattcatcgttagagatgagatccagataacgctgacgatagcgcgcttcctgatcctgcaagccgtggaatttgtccggcagcggacgcagtgctttggtcagcagacgcagctcggtgcagtggatagacagttcgcctgttttggttttgaacagtttacctttcgcgccgaggatgtcgccgagatcccattttttgaactgctcgttgtaaacgccttccggaagatcgtcacgggcaacgtacagctgaatacgaccgccaacgtcctgcagggtaacaaaagaggctttacccataatacggcgggtcatcatgcggccagcaacggcgacttcgatgttcagcgcttccagttcttcgttctctttaccgtcgaattctgcgtgcaattggtcagaggtatgatcgcgacggaaatcgttcgggaaggcaattccctgctcacgcaggttcgccagcttctcacgacgcgttttcagttcattgttaagatcgactaccgcgtcagcgccctgtgcgtgttgttcagacatgttggttcctcataaccctgctttcaaacttgcttcgataaattgatccaggctgccgtccagcacggcctgcgtgttgcgggtttctaccccggtgcgcagatctttaatgcgggagtcatcaaggacataagaacgaatctggctgccccagccgatgtcggatttgttatcttccatcgcctgtttctcggcatttttcttctgcatctccagttcataaagcttcgctttcatctgcttcatggcctggtctttgttcttgtgctgggaacggtcgttctggcactgggtcacgatcccggtcgggatgtgggtaatacgcaccgcagattcggtacggttaacgtgctgaccgcccgcgccggacgcgcgataaacgtcaatgcgcagatccgccgggttgatttcgatatcaatatcatcatcaacttccggataaacaaacgcggagctgaacgacgtgtggcgacgaccgccggagtcaaacgggctcttacgcaccaggcggtgaacgccagtttctgtacgcagccagccgtaagcgtaatcgccggagattttgatcgtcacggatttaatacccgccacttcaccttccgactcttcgatgatttcagttttgaaaccacgcgattctgcccagcgcagatacatacgctcaagcatgctcgcccagtcctgtgcttccgtaccgccagaccccgcctgaatatcgaggtagcagtcggcgctgtcatattcgccagagaacatacggcggaactcaagctgcgccagtttttcttccagggcgtcgagttcagcaacggcttcgttaaaggtttcttcgtcgtcagcttctacagccagttccagcagaccagaaacatcttccagcccctgtttcatttggtcgagggtgtcgacaacggcttcgagggaggaacgctctttacccagcgcctgtgcgcgttcgggttcgttccagacatccggctgttccagctcggcgtttacttcttccagacgctctttcttggcgtcgtagtcaaagataccccctaagaacgtcggagcgttccgtgaggtcctgaatgcgattatttaccggattaatttcaaacatggtctgatttcttttattgagctagtcaaaatgcggtgataagagcgggattgtacccaatccacgctcttttttatagagaagatgacgctaaattggccagatattgtcgatgataatttgcaggctgcggttgccgcgaaactcgttgatatcgagcttgtaagccagttgcacttcgcgcacgccgttatccggccagagggcggtatcgacattaaaagcaataccatccagcagcggaccgccgccgaccggttcgaccatgactttcaaatgacgttcgcccaccagccgctgttgcagcagacggaaatgaccatcaaacagcggctccgggaacatctgcccccacgggccagcatcgcgcagcagctgcgccacttccatggtcatttcggccgggcttaacgggccgtctgacaccacttcgccttgcaatagcgaagggtccagccactcggtaaccagctcgccaaaccgttgttgaaagagttcgaatttatcctcttccagcgacaaacccgccgccatcgcatgaccgccaaacttcagtatcatgccagggtagagtgtgtctaatcgctccagtgcatcacgcatatgcagcccctgaatggagcgacctgaacctttcagcgtaccatcacctgctggcgcaaaggcgataaccggacggtgaaaacgctctttgatgcgcgaagccagaataccgacaacgccctgatgccattcggggtgatacattgccagcccgccgggtagcgtgtcacggctgcgctccagtttctcgcacagggtcagggcttcaatttgcattccttgttcgatctcttttcgcgtctggtttagcgcatcgagttcatttgccagcacgcgcgcttcgccgatgttgtcgcacagcaagagcgccacaccgacggacatatcgtccagtcgtccggcagcattgagacgtggccccagcgcaaaacctaaatcgctggcggcgagtttttgtgcatcacggtttgccacttccagcagcgctttaatccctggacggcactttccggcacggatgcgactcatcccctgccaggtcagaatgcgattattagcgtccagcggcacgacgtccgccactgttcccagcgcgaccagatccagcagttctgccaggttaggaattgcgatgccacgctcatcaaaccagccctgatcgcgcaaaaaggtgcgcagcgccagcatcagataaaacgccacacccacgcctgccagtgatttcgacgggaaattacagtcgcgcaagttagggttaatgatcgcttccgctgcgggtaatgtttcgcccggcaaatggtgatcggtaacaataaccggaatgcccaacgagcgagcgtgttcaacgcccgcatgggaggaaataccgttatccaccgtgacaattaactgcgcgccacgggcatgggcctgatcgaccacttccgggcttaagccgtaaccgtcttcgaaacggtttggtaccaggtagtcgatattgctgcaaccaagcgagcgcatcgccagcacgcttagagccgtgctggtggcaccgtcggcgtcgaaatcaccgaccacaataatccgcgttccttcgcgaaaagcgttgtaaaggatctcaacggccttttcgacgccgctcagttgctgccagggcagcatacctttaacactgcgttccagttcttgcgcactgcgtactccccggctggcgtataaacggcgcagcaagggaggcaattccgcgggcaagtctgccgtttcatcgacttcacggcgacgaagttgtatctgttgtttcacgcgaattatttaccgctggtcattttttggtgttcgtcgaggaattctttcatctctttcggcggctggtaacccggaacaagtgtgccattgctcagcacaactgccggagtaccgctaacgccaagctggacgccaagtgcgtaatggtcggcaatatccacgtcgcagctggctggtgcgacgcttttacctgccatcacatcatcaaacgctttgtttttatctttcgcacaccagatagctttcatttctttctctgcatcgctgtccagcccctggcgcgggaaagcaagataacgcacggtgatccccagtgcgttgtagtctgccatttgctcatgcagtttgtggcagtaaccacaggtaatatcagtaaacacggtgatgacgtgtttttcctgcggcgctttataaacgatcatctctttttcaagcgcattcaactgctttagcaacatcttattggtgacattgaccggagccgtgccgctaacgtcatacattggcccctgaatgatatgtttaccatcatcggtgatgtacaacacaccgctgttagtcagaactgtcttcatgccagctacgggcgcgggctgaatatcgctgcttttgatgcccattttggctaacgtttgttgaattgccgcgtcatcagcctgagcaaagcctgaaaacgccgctaacaaagtaaacaacataaaacctttcttcataaatcttcccgttcttttcagacatcacgcccgcgggtgatgctgttgatgaagttgccgcagacgctcggtagcgacatgcgtataaatttgcgtggtggagagatcgctgtggcccagtagcatctgcaccacgcgtaaatccgcaccatgatttaataagtgagtggcaaaagcgtgacgcaacacatgcggtgacagcttttcgctgtcgatacccgccagcacggcataatgtttaatgcggtgccagaaggtctgtcgcgtcatctgctgcgcacgctggctgggaaacaacacgtcaattgacacaccattcagtagccacggacgcccatgctccagataggtttccagccagtaaaccgcctcttcacctaacggcaccaggcgctctttgttgcctttaccaatgacccgcactacgccctgacgcaggctgatatcactcattgtcagcccgaccagttcagagacacgcagcccggtagcatacaacacttcaagcatggctttatcgcgtagctccagtggctgatcaattaatggtgcctgtaataaacgttcaacctgcgcttcgcttaaatcttttggcaaacgctggggcaatttcggtgaagcgagatgcgcactgggatcgtcttcacgaaacttttcgcgataaagatactggaacaatcggcgcactgcactcagcaaacgcgctgagctggtggctttatacccgccctccagccgttctgccagtaatgcctgcaaatcgtcactttgcgccgtcgccagcgtcaacccgcggtgatgcaaccactccaccatcattgacagatcgcgacggtaagcgttcaacgtattttcagccagatttttttccagccacagagcatcaagaaactgctcgatgcgtgccagatcctgtttcacttgcgccccttatggtcactcatttgatccattatgccttattgtgccgtgactaaagcgattctgatacactagctgcaaaagccacagcagaatcgagaagcttacgttatgaatatgggtcttttttacggttccagcacctgttacaccgaaatggcggcagaaaaaatccgcgatattatcggcccagaactggtgaccttacataacctcaaggacgactccccgaaattaatggagcagtacgatgtgctcattctgggtatcccgacctgggattttggtgaaatccaggaagactgggaagccgtctgggatcagctcgacgacctgaaccttgaaggtaaaattgttgcgctgtatgggcttggcgatcaactgggatacggcgagtggttcctcgatgcgctcggtatgctgcatgacaaactctcgaccaaaggcgtaaagttcgtcggctactggccaacggaaggatatgaatttaccagcccgaaaccggtgattgctgacgggcaactgttcgtgggtctggcgctggatgaaactaaccagtatgaccttagcgacgagcgtattcagagctggtgcgagcaaatcctcaacgaaatggcagagcattacgcctgatctcactgacggcttagcgcatatgctttgccgtcatctttatctttgcgtctcttgttgcaacaaaatccgccgtaaatcccgccattcagcttcgtccatgctgtcggctgccagccataaatgttgccgtttaccgccatcagaacgtaaacgcagcatcatgccgctcttaatcatccacggtgctttgacgatgctccactcctgcccttgccaacgcaaacgcccgtccatcaacaagcgaatttccccctggcgagcattaatacgccgctggctgcgaacgcaatcaaacaccaccagcgaaagtaacaccatccataacggggtgtaactgagtggccagggcatgagtaaaataacagcggcaaccagcccatgaatcagcaaggaaagccactgtgcgcgccaggagacgcgcaaatcagattgccacaggaccacgttcccggttccgtgtctggatgagtcggaccatcatttccagttctgcatcggccggtttaccgtgattcatcagccagttaaacaggtccggatcgtcacattccagcagacgaataaagatgcgtttttcgtcatcgcttaagctgtcgtactcatgttcgaaaaacggcatgattgaaatatcgagttcgcgcataccacggcggcatgcccaatgaatgcgggctttgttgttaatgtccatcttcttcctgtctcacgaaaatccagtacccggctattgtaacgtgtttttcgccttcttttacgggaatatcagtaaacaccatcgcgatcgcgaaattaattcacaacaattcaatggcttcatttttttggaagtcgcctcgcagaaggcacagatcgcgtagtgaaagcacttgcattgcctcatagctcttttaccattagtcattaatacgccgttaagcaactcaggactctattatggcttttacaccttttcctccccgtcagcctacggcttctgcccgtttaccgctgacgctgatgacgcttgatgactgggcgcttgccaccattactggcgcggacagcgaaaaatatatgcagggtcaggtgacagcagatgtcagccagatggcagaagatcagcacctgctcgccgcccattgcgacgccaaaggtaaaatgtggagcaatttacgtctgttccgcgacggcgatggctttgcatggattgaacggcgcagcgtgcgtgaaccgcagctgactgaactgaaaaaatatgcggtattctctaaagtgaccatcgcgccagacgacgagcgtgtgctgcttggtgttgccggttttcaggcgcgcgccgcgctggcaaatctctttagcgaactgccttcgaaagaaaaacaggtagtcaaagaaggcgcgaccactttgctatggtttgaacacccggcagaacgtttcctgatcgtaaccgatgaagctactgctaatatgctgaccgataaactgcgcggtgaagcggaactgaacaatagccaacagtggctggcattaaacattgaagcgggtttcccggtgattgatgccgccaacagcgggcagtttatcccacaggcgaccaatctccaggcgctgggcggtatcagctttaagaaaggctgttataccggacaagagatggtggcgcgagcaaaattccgtggtgccaataaacgtgcgctctggttgctggcaggtagcgccagccgactgccggaagctggtgaagacttagagctgaaaatgggcgagaactggcgtcgtaccggtacggtgctggctgcggtaaaactggaagatggtcaggtcgtggtacaggtcgtcatgaataacgatatggaaccggatagcatcttccgcgtacgcgacgatgcgaatacattgcatatcgagccgctgccgtattcgctcgaagagtaaatctctttatcgcatcaggcatttatcgcctgatgcgacgctggcgcgtcttatcatgtctgggatttgatgcctttatcacaacagggacgaggcccgtagatcggataaggcgttcacgccgaatccggcagttgtgctccgatgcctgatgcgacgctggcgcgtcttatcaggcctacaaaggcatacccattacgcctgcccaatatacaaatagatcgccagaaagtggcacacactaccgccgagcacgaagccgtgccagatggcatggttgtatggaatgcgtttgcagacgtagaaaatcaccccgagcgaataaaccacgccgcctaccgccagtaaggtaacgctgcccgccgcgagcttaactgccatttcataaattaccaccagcgacagccagcccatcgccagataggtcaccagagataaaattttgaatcggtgcgcgatggtcagtttaaacagaatacccagcaatgccaggctccagataacaatcatcaacccgcgcgctaacggagaatccagccccaccagcaaaaacggcgtgtaggttccggcaatcaacaggtaaatagcgcaatggtcaaatttcttcagccacatttttgcccgttgatgaggaatggcgtgatagagcgtcgaagcgaggaacagcaggatcatactgccgccatagaggctgtaactggttatcgctgtggcgctggcattgagatccaccgcctgaaccagtagcaacaccagcccaacgataccaaacaccaacccaatgccgtgactgacgctgttggcaatttcctctgccagcgaatatccctgcttaatgaggggcttctgaaccataacttactccggagaaacgtacacgcacatgtatacctctccagcgtaactgagaatagttccagtgaacacctgttagctaaaataaattctgatttgagactaatctcctaaaaatcatgaaattaaatgcgaaatttcaactaacaggcgtgagttcaatttaaagacatttaaattcaatcacataaaactgtgtctgaccgggatagatgtcggcaatgacctttatcagttcagtcagggtcatattttcctgctctgcatgtttttccgtcagcgtatccagcgttacggttgaggttgcggtgacttcaatcgtgcaaaaataaccgtcatcttcaaaacgcccgacacgaagcacatcacccgttttgaagtgcgattcagactcgtcgcggatggtgatggttttacgcccagccagaatgtcatcctggaaacgttgaaaaaaagtgatgtcgtttggctgcatggtactatttcctgtaagaattgactcatctggagcctatgatagtgaaaaaactcaccttaccgaaagatttcttatggggcggcgcagttgccgctcatcaggtcgaaggcggctggaacaaaggcggcaaagggccgagcatttgtgacgttctgaccggtggcgcacacggcgtgccgcgcgaaatcaccaaagaagtcttgccaggcaaatactatccaaaccatgaagccgttgatttttatggtcactacaaggaagacatcaagctatttgccgaaatgggcttcaaatgttttcggacttccatcgcctggacgcgtatttttccaaaaggtgatgaagctcagccaaacgaagaagggctgaagttctacgatgatatgttcgatgaactgctgaaatacaacatcgaaccggtgataaccctctcccactttgaaatgccgctgcatctggtgcagcaatacggtagctggaccaaccgtaaagtcgttgatttctttgtccgtttcgcggaagtggtattcgaacgctacaagcataaagtcaaatactggatgaccttcaacgaaataaacaaccagcgtaactggcgtgcgccgctgtttggttactgctgctccggcgtggtgtataccgagcatgacaacccggaagagacgatgtaccaggtgctgcatcaccagtttgtcgccagcgccctggcagtgaaagccgcgcgtcgcattaacccggagatgaaagtcggctgtatgctggcgatggtgccgctctatccttactcctgtaacccggacgatgtgatgttcgctcaggagtcgatgcgcgaacgctacgtctttaccgatgtgcagctacgcggctattacccgtcctatgtgttgaacgagtgggagcgtcgcggatttaacatcaaaatggaagatggcgatctggatgtactgcgtgaaggcacctgcgattatcttggtttcagctattacatgaccaacgcagtgaaggccgaaggcggcaccggcgatgcgatctctggttttgaaggcagcgtaccgaacccgtatgttaaagcgtctgactggggctggcagattgatccagtaggtctgcgctatgccctttgcgaactgtatgagcgttatcagaggccgctgtttattgtcgaaaacggttttggcgcttacgacaaagtggaagaagatggcagcatcaacgacgactaccgcattgactacctgcgcgcccatattgaagagatgaaaaaagcagtgacttacgatggtgtggatctgatgggctacacaccgtggggctgcatcgactgcgtgtcattcactaccgggcagtacagcaaacgctacggctttatctatgtgaataaacatgacgacggtactggcgatatgtcgcgttcacgtaagaagagctttaactggtacaaagaggtgattgccagcaacggcgagaagctttaagtcgatgaagtaccggatgcaatacttgttgcatccggtcagacaacttccctgttttatttcccgcccgccaaatcgataaaacttcccgtgacgtaagaggctttatcacttagtagccagacaatggcctgcgcgacctcttctgcctgtccaccacgctgcatggggatgttcgacttaacgcgatcgacgcgtccaggctcgccgccgctggcgtgcatttcggtataaataacccctggccgcacgcagttaacgcggatcccctgcgcggcgacttccagcgatagtccggtggttaacgtatcaatcgcccctttcgatgccgcgtaatcaacatattcccctggcgaacccaaccgtgaggccaccgaagagacattgacgatagcgccgccactgccaccatttttaagcgccatgcgttttaccgcctcgcggcagcagagaaaatatcccgtcacgttggtggaaagtactcggttgattcgctctgcggtaaggttttcaacggtgcactgggtaaacaagatcccggcgttattgaccagcgctgctagcggttcatcgtgctgatcgattgctgtaaacattgcgatgacctgattttcgtcgctgatatccgcctggagcacgaatgccttgccaccggcttgcgtgattaagttcaccacttcctgcgccgcatggaggttttgttgataattaaccgccaccgtatactcttctttcgccaacagtaatgcagttgcccgcccgatgccgcgactgccaccggtcacaagtgctatagccatttgtttttccgagaaaaattaattcgttgacgtatctttgagattgctaacaaactggctcaatcttcaatgttggcacgcttttcccctcgccctttcagggagagggccggggtgagggtaaatattcgcgccagtgccggcctgttcccctcaccctaaccctctccccaaaggggtgaggggactgtctgagcgcttttgtactttgtcatctgactaaaaaggcgccgaagcgcctttagaagatagtcgaatcagtgaattactggtattcgctaatcggtacgcaggagcagaacaggttacggtcaccgtaaacatcatccagacgtttcaccgtcggccagtatttgtctgccacacctgccgggaatactgcaacttcacggctgtacggatgcgcccactcggcgaccagttcgttctgaatgtgcggcgcgttcaccagcgggttatcttccagcggccagacaccggctttaacctggtcgatttctgcgcggatagccagcatcgcgtcgataaagcgatccagttccactttgctttcagattcagtcggttcaaccatcagcgtacccgccaccgggaacgacatcgttggcgcgtggaaaccgtagtcgatcaggcgcttggcaatatccagctcgctgatgccggtttcttctttcagcgggcgaatatcgagaatacattcgtgcgccacgcgaccgtcgcgaccggtatacagcaccgggaaggcatcctgcaggcggctggcaatatagttggcgttgaggattgccacctggcttgcttttttcagcccttctgcgcccatcatgcggatgtacatccagctgattggcaggatagaggcgctaccgaacggtgccgcagaaactgcgccctgacgggttaacatgccttcgatttgcaccacgctatgacccggtacaaacggtgccagatgcgctttcacaccgatcggtcccatacccggaccaccaccgccgtgcggaatgcagaaagttttatgcaggttgaggtgcgaaacgtccgcgccaataaagcccggcgaggtgatgccaacctgggcgttcatgttcgcgccatcaaggtaaacctgaccgccgaactgatgcacgacttcacacacttcacggatcgtttcttcatacacgccgtgggtagaaggataagtcaccatgatacaggagaggttatcgcccgcctgttccgctttcgcgcgcagatcagtcagatcgatgttgccgtttttatcacacgccacaaccaccacctgcattcctgccatatgtgcagaagcggggttagttccgtgcgcagaagccgggatcaggcagatatcgcgatgcccttcattgcggctttcatgataatgacgaatcgccagcaggcccgcgtattcgccctgtgcgccggagttcggctgcatacaaacggcgtcgtaaccggtcagtttcaccagccagtcagccagctgcgcaatcatctgctgataaccttcagcctgctccggcgggcagaacgggtgcagttcggcaaattccggccaggtgattgggatcatctcggcggcggcgttcagtttcatggtgcaggaacccagcgggatcatcgcctgattcagcgccagatctttacgctccagcgagtgcatatagcgcatcatttcggtttcgctgtggtagcgattaaacaccggatgggtgaggatttcgtcgtcgcgcagcatcgcaggctggatagagcggctgtcgtgagccacgtctttgtccagcgtgtcgatgtccaggccgtggttatcgcccagcagcacgttgaaaagctgcattacgttttcacgcgtggttgtttcatcaagggtgatcccaaccgcgttcagaatatcgctacgcaggttgatttcagccgcttcggcacgcgtcagtacgcccgctttgtcggccacttccacacacaaggtgtcgaaatagtgcgcatggcgcagtttcagacctttttgttgcaggcccgccgccaggatatcggtcagacggtgaatgcggttagcgatacgtttcaggccaaccgggccgtgataaacggcatacaggctggcgatgtttgccagcagtacctgggaagtacaaatgttggagttcgctttctcacggcggatatgttgctcgcgagtctgcatcgccatgcgcagcgcggtattgccagctgcatctttcgatacaccgataatacggcccggcattgagcgtttgtattcatctttcgccgcaaagaatgccgcgtgtgggccaccgtagcccatcggcacgccgaagcgttgcgccgaaccaaaaacaatatccgcgccctgtttacccggcgcagttaacagcaccagcgccataatatcggcggcaacgctgaccacaattttgcgtgatttcagttcgctaataagcgcagtgtagtcgtgaatttcaccggtagtgcctacctgctgtaacagcacgccgaagacgtcctgatggtcgagcactttttgcgcgtcatcgacaatcacttcaaaaccaaaggtttcggcacgagtacggaccacatccagcgtttgcggatgcacatcggaagccacgaagaagcggttggcatttttcagtttgctgacgcgtttcgccatcgccattgcttcggcggcagcggtggcctcgtccagaagagaagcagaggccatatccagtccagtcaaatccagcgttacctgctggaagttgagcagtgcttcaaggcggccctgggagacttcaggttgatacggagtgtacgcggtataccagcccggattttccagcatgttacgcaggataaccggcggtagctgcacggcggtgtaacccatgccgatgtaagacgtgaagcgtttattgcgactggcaatagccttgagttctgccagtgcggcgtattcggtcgccggtgcgccaacctgcggtggtgtcgcaagttgaatatctttcggcacaatctggccggtcagcgcgtttaacgattgtgcaccaacggcattcagcatttcttgctgttgcgcggcgtccggtccgatatggcgttcaataaaagcgccgctgttttcaagctggcttaacgtctgtgtcatgagcgatggttcctgaaacgtgcagtgaattgtgaacctctctccttacgaagagagtgagggtgaggcataaattttcctcaccctgatcctctcccgcagaagaggaataaagccgttactcgtcttctaacaatgcttcgtatgcggtcgcatccagcagtgattccagttcgctttcatcgctggctttgattttaaagatccagccgcctgcatacggttcgctgttcaccagttccggggaatcgctcagtgcgtcgtttaccgccacgatttcaccgcttactggcgcataaatgtctgacgccgcttttaccgattcggcaaccgcgcagtcatcgcccgcgctaaccgttgcgcccacttccggcaggtcaacaaacaccatatcgcctaacagctcctgagcatgttcggtaataccaacggtgtaagtgccgtcggcttctttacgcagccattcgtgttctttgctgtatttcagttctgctggtacgttgctcatcaatcaatctccaaaaaagtaaatcacgcgacggctttgccgttacgcacaaaaacaggttttgtcactttaaccggcatttcacggttgcgaatttgcacaatcgccgtttcgccaataccttccggcacgcgcgccagcgcaatgctgtaacccagcgtcggggagaaagtaccgctggtgataatgccttcatgctggttgccctgcgcatcggtaaagcgtaccggcagttcattacgcagcacgcctttttcggtcatcaccagaccaaccagtttttctgtaccatgctcacgctgcacttccagggcttcacgaccgataaagtcacgatctgccggttcccaggcgatggtccagcccatgttggcggctaaaggagagatggtttcgtccatctcctgaccataaagattcatgcccgcttccagacgcagcgtgtcacgcgcgcccaagccacatggcttaacacccgcttccaccagcgcacgccagaaatcggccgctttttcattgggcagcgcaatttcatagcccgcttcaccggtataaccagtggtggcaataaacagatcgcccgcctgcacgccaaagaacggtttcatcccttccaccgcctgacgctgggcgtcattaaacagtgtggcagcttttgcctgggcattcggcccttgcacggcaatcatggaaaggtcatcacgaacggtaatttcgatgccgaaaggttcagcgtgttgggtaatccaggagaggtctttttcgcgggtggcggagttaacaacgaggcggaagaaatcttcagtaaagtagtagacgatgaggtcatctatcacaccgccagaggcattcaacatccccgagtaaagggctttgccgcttttggtgagcttcgccacatcgttcgccagcagataacgcagaaactcccgggtgcggctgccgcgaagatcgacgatggtcatatgtgacacatcaaacattccggcatcggtacgtaccgcatgatgttcgtcgatttgcgaaccgtaatgcagcggcatcatccagccgtggaaatccaccatgcgagcgccgcaaagcgtgtgttgttcgtacaaaggagtctgttgtgccatcttgtcctcattgaataagcggggctgacaactttttcatggtgaaattatcaccacgaaacccagcatcggagccactcccggtccccaacgcaatcgttctcttttgcctgaacttaccaccgaaacagactgttaaccataaggtaaaattgatcatcacattagcttatggttaaaaaatgcaaaaatcgcgacagaataaaaaaccaaaaaatacaccagtttctatacaaagatgatgtgatgagaaagtcaatttgaataagacaatattaagagctaaaaaaatgtcaaaaaacactaaatcaaaaaataatggcattagaaaatataatgcgaaaacggaggtgaaattagtttatttcaaatgaggaaaatctcccggcgaaaaaaccgggagatgaaagtgtgatgggtatcaaataaacaacagaggagaaatttttaacgcagccattcaggcaaatcgtttaatcccattgcctggcggataagttgcggcttaacgccaggaagcgtgtcggccagtttcaaaccaatatcacgcagcagttttttcgccggattggtaccggaaaacagatcgcggaatccctgcataccagccagcatcaacgccgcactgtgcttgcggctacgctcatagcgacgcagataaatgtactgcccgatgtctttcccctgacgatgcaaccgtttcagttcggcaatcagctctgcagcatccataaagccgagatttaccccctgccccgccagcgggtgaatggtatgtgcggcgtcgcccaccagcgccagacggtgcgaggcaaactggcgcgcataacgccccgtcagtgggaacacctgacgcgcgctctcaaccttgcataagcccaggcgattatcaaaagcgatatttaacgcgcgattaaattcgtcttcacttgcctgctgcatccgctgcgcttcctctggcgacagtgaccagacaatcgagcaaagatgcggatcgctaagcggtaaaaaggccagaatgccttcgccatggaaaacctgccgcgccaccgcatcatgcggttcttccgtgcgaatggtcgctaccagcgcgtgatgctgataatcccagaaagtcagcggaatatcggctttgttgcgcaaccaggaattagcgccgtccgcgccaatcaccagacgcgccgttaacatgctgccatctttcagcgtcaggaaggtttcattttctccccaggcgacctgctgtaattctgcgggggctaacagagtgatatctgacgactgatgcgctttgttccacagcgcgtagtgaatcactgaattttcaacgatatgcccaagatggctatagcccatgctttgatcgtcaaacgaaatgtgaccaaagctgtctttgtcccacacttccataccgtgataacagctggccctacgagagagaatgtcctgccagacgccaagacgggtgagtaatttttcgctggcggcattgatagccgaaacgcgcagttgtggtggtgcattcgccgccagaggttcctgtacgcgctgctccagtacggcaacgcgtaagccgctcccctgtaagccacaggcaaccgccagccccaccatgccgccgccaacaatggctacatcaacactttgcattgtttattccttaaaaccgccttcaacgcgccacccaaccgagggtgcgctgcgccagcacatcgcgtgccggggtgaataattccatcgtcatcagcccgatgttgcgcccgacaaccagcggtgcccaacggttggcaaaaagatgtacaaggctgtccgtgacgccaatggttgcttcgcgatcgctctgtcgacgctgctgataacggcacaatacgccgtaatcccccatgtcttctccgcgctcctgcgcctgagtcagggtttccgcaagactcatcacatctcgcataccgaggttaaacccttgcccggcaatcgggtgcagagtttgcgccgcattgcccaccagcacggtacgatgggtaatagatctggcggcgtgggttaacgccagcggataagcactgcgtttaccagcgtgggtaattttcccaagtcgccagccaaaggccgactggagttcacggcaaaacttctcgtcactccacgacaacacctcttcgcgccgttccagtggatgacaccagaccagcgaacagcgtccgtcagacatcggcaacatcgccagcgggccatgttgcgtaaagcgttcaaaagcgcgcccttcatgcgcaacggaagtagcaacgttggcaatcacggccagttgttcgtaaggctcctgctgccagtcaacgccgcacgcggtggctaacgctgaatgggtgccatcagctgctaccagcacgcggcccgtcagcgtctcgccactctccagcgtcacttcaacgtgactctgagtacgggcaacgttagccacgcgatcagggcaatgcagcgttacgccaggtgctttacgcagcaatgcaaacagccgttgcccgacattgtgcaattcgacaacctgtcccagcgccgccagttggtaatcttctgcggcgagggtgacaaatccagcgtgaccacgatcgctgacatgcacggtggtgatggcagttgcgcaatccgccagagattgccagacgccgatgcgcgccagttgctgacaggtacccgccgccagcgctatcgctcgtccatcaaagcccggatgagcatgtgactctggcgcagtcgcttcaatcaaatgtaccggcagcgccccgtgacttaaccgggaaatagccagcgccagcgtcgcgcccgccatgccgccaccgacgatgattacgctcattgctttctcgcagcaaccatcaacgcttcgatttcttccggctttttcaccacgctggcggtgaggttttcgttaccggtttcggtaatcacaatgtcgtcttcaatacgaatgccgataccgcgatattgttctggcacttctgcatccggcgcaatatacagccctggctctacggtcagtaccatgcccggttccagaatgcgcgagcgatcctgaccataaacacccacgtcatggacatccagtcctaaccagtggctaaggccatgcataaagaaaggacgatgggcgttctgagcgatcagttcatcaacatcacctttcaggatgccgagttttaccaggccgctaaccatgatgcgcaccacttcaccagtgacttccagaatggaagttcccggacgatacaggcgcaggctggtttcgagagactccagcacaatgtcgtagatttcacgctgggcctgggtgaatttgccgttgaccgggaaggtgcgggtaatatcgccagcgtaacctttgtattcacaacccgcgtcaatcaacaccaggtcgccgtcgcgcatttcacactcgttttcggtgtagtgcagaatgcagccgttttcaccgctgccgacaatggtgttataggaaggatagcgcgcgccgtggcggttaaattcgtggtgaatttcgccttccaggtggtactcgaacattcccggacggcatttttccatcgcccgggtatgcgccagggcggtgatttcacccgcgcggcgaagtacggcaatctcttccggcgatttgaacaggcgcatttcatgaacaatgggacgccagtcgatcatcgttgccggcgcggtgagattttgccgcgaacctttacgcagtttctcaagcgcgctgttcacgatttcatcagcatatgcatattcgccctgggcgtggtaaaccacatccagaccattaagtagttgataaagttgctgattaatttcgctgaatgccagtgcgcggtcaacgcccagtttctctggcgcggcatcctgacctaaacgacggccaaaccagatctccgccgtcaggtcgcgaacgcggttaaacaaaacgctgtggttatgagtgtcatcgcttttaatcagcaccagcaccgcttccggttcgttaaagccggtgaagtaccagaagtcactgttctgacgataggggtattcgctgtcggcgctacgtgttacttctggtgcagcaaaaatcagcgcggcgctgccgggttgcatttgctccaccagggcctgacggcgacgctgaaactcttgccgggatatatcactcataacactctccttacgttttttgtttttagtgtagagtcggtttttgtacttctggcgcggtcggttgcagatgagtaaaggtgtcgtggcataacagcgcggcaacacgaacgtattcgatgatctcttcaagcgacatttcaagctcttcctgatcttcgtcttcgtcgtaacccagttgcgcaatgttacgcagatcgtcgatagcttcaccggtttcgccggtcactttatccagcttcggttgcgtaacgccaagaccaagcaggaagtgattgacccaacctgccaatgcatcagcccgatcgaaaacgctgacatcatcgccatcaggcagataaagctgaaaaaggaagccgtcatcctgcagggcatcgctggtggcagagtgcattttacgcagtgcctgtgccagctcatgaccgaaagccatgccttcgttcgtcaggtcgtgaagtagcggtagccatgagctgtcatcgttaccgccacatatcatcccgctgattaaaccatgcatctcagctggggtcagacccgtcccttgttggttcagatactggttcatttcgttgtaaccaggcatttcgttctgtatagacataagcattcgtcgtcaaagggaggaatattcatgatatgctaccactttgggccctggtggaccagaaaagggcttgtctcttctcatcagggtagctatagtgtcgccccttcgcagaccatgggtctaaagacgaaggcagcgcagtcaatcagcaggaaggtggcatgtctgcacaacccgtcgatatccaaatttttggccgttcactgcgtgtgaactgcccgcctgaccaaagggatgcgttgaatcaggcagcggacgatctgaaccaacggttgcaagatctgaaagaacgcactagagtcacaaatactgaacagttggtcttcattgccgcattgaatatcagctatgagttagcgcaagaaaaagcaaagactcgtgactacgcggcaagtatggaacagcgtattcggatgctgcagcagaccatagaacaagcgttacttgaacaaggtcgcatcaccgaaaaaactaaccaaaactttgaatgacacttttcggtttactgtggtagagtaaccgtgaagacaaaatttctctgagatgttcgcaagcgggccagtcccctgagccgatatttcataccacaagaatgtggcgctccgcggttggtgagcatgctcggtccgtccgagaagccttaaaactgcgacgacacattcaccttgaaccaagggttcaagggttacagcctgcggcggcatctcggagattcccttcttatctggcaccagccatgacgcaactaccagaactcccactgacattatcccgacaagaaatccgcaaaatgattcggcaacgtcgtcgtgcgttaacgccggaacaacagcaggaaatgggtcaacaagccgctacccggatgatgacttatcccccggtggtgatggcacatacggtcgctgtattcctctcttttgatggcgaactcgacacccagccactcatagaacaactctggcgcgccggtaagcgcgtatatcttccagttttgcatccctttagtgccggtaatttgctgttcctgaattaccatccgcaaagcgaactggtgatgaacaggttgaagatccatgagccaaaattggatgtgcgtgacgtgctacccctttcccgattagacgtgctgatcacaccgctggtcgcctttgatgagtacggtcagcgcctgggaatgggcggtggtttttatgatcggaccttacaaaactggcagcactataaaacgcaaccggtgggttatgcgcatgattgtcagttggtggaaaaactccccgttgaagagtgggatatccctcttcctgcggtggttacaccgtcgaaagtctgggagtggtaagggcgatacacccgcatcgccctgattgacatcgttgattctttgacctaatttagtgagtaagggtaagggaggattgctcctcccctgagactgactgttaataagcgctgaaacttatgagtaacagtacaatcagtatgatgacaagtcgcatcataacccttctccttcaagccctcgcttcggtgagggctttaccgttacagccccatgctgccctgccatcgtaaatccccattaaataaacacaacgcattgatctgactttgatttattttctggagcagactcgcaaagtagaatgcgcaacgcggcaacggtgtggagaagggataaaaaaacgggcaagtcagtgacctgcccgttgattttcagagaaggggaattagtacagcagacgggcgcgaatggtacccggaatagctttcattgcctgcagcgctttttcggcaacgtcttcgtcggcttcaatatcaataaccacataacccatctgggcggaagtttgcagatattgcgcggcgatgttgacgccctgctcggcgaagattttgttcagcgcagttagcacgcccggacggttttcgtggatgtgcatcagacgacgcccaccgtgcagtggcagcgagacttccgggaagttcaccgcagagagcgttgagccattgtcagaatacttgatcaatttacccgcaacttccaggccgatattctcctgcgcttcctgagtcgaaccgccaatgtgtggcgtcagaaggacgttgtcgaattcacacagcggagaggtaaatggatcgctattggtcgccggttccgtcgggaatacgtcgattgccgcccccgccagatgtttgctcgccagcgcatcacacagcgccggaatatccaccacagtaccgcgcgaagcattaatcagcagcgagccgggcttcattagtgaaatttctttcgcgcccatcatatttttggtggacggattctctggtacatgcagactcaccacatcgctcatattcagcaggtcagaaagatgctgtacctgagtggcgttgcccagcggcagtttattttcaatatcataaaagtaaacatacattcccagcgattcagccagaatgcccaattgcgtaccaatatgaccgtagccgatgatacccagctttttgccgcgcgcttcaaaagaacccgccgccagtttgttccacacgccacggtgcgctttagcattggcttccggcacgccgcgcaatagcagcagcagttcgccaatcaccagctccgcaacagagcgcgtatttgagaacggtgcgttaaataccgggatcccgcgctttgccgccgcatccagatcaacctggtttgttccgatacagaaacagccaatagcgaccagtttttctgcggcgttgatcacgtcttcagtcagatgggtacgggatcgcaggccgatgaagtgggcatcgcggatggattcttttaattgttcatcatccagcgcgcctttgtgaaattcgatgttggtgtaaccagctgcacgaaggctttccagcgccttttggtgcacgccttctaccagcagaaacttaatcttgtctttctccagcgatacctttgccatttacccaatcctgtcttttgaaatgttgtgtgcggatttgcgtccgcctttcaacatatcaaaaaataatattgcggcaatatgaacgtttgcgtcgcgatgttgaggaaatatcacgcaaaggtaattcttggatgaatatgctggtttagaagatttatttagagcaatcgacaatagccaggtaaaaacgtgacacatgtcaccaaatttaatgaagagaatttttttaacgggggaggttcccccgtcagatcatttcacaatggttttgacaccgtcaggtgtgccaatcagcgcaacgtccgcgccacggttagcaaacaagccaacagtcaccacgccaggaatcgcatttatggcgttttccatcgctatcgggtcaaggatttccatgccgtggacgtcgaggatcacgttgccattatcggtcaccacgccctgacggtattccggacgaccgcccagtttcaccagctggcgcgccactgcactacgtgccatcgggataacttctactggcagcgggaatttacccagaatatcaacctgcttggaagcgtctgcaatacagataaatttttctgcaaccgaagcaatgattttttcacgggtcagcgccgcgccgccgcctttgatcatttgcatgtggccgttgatttcatctgcgccatcaacgtagatgccaaggctgtcgacttcgttgagatcaaaaacgtgaatgccgaggcttttcagtttttcagtggaagcatctgaactggaaacggccccttcaatctggcctttcattgtaccgagcgcgtcaataaagtgtgcggcggtggaacctgtacctacaccaacaatggtgccgggctgaacatactgaagtgccgcccatcctactgcttttttcaattcatcctgcgtcatgatcgtttcgcctgtggtatgaaatttcacacgcattatatacaaaaaaagcgattcagaccccgttggcaagccgcgtggttaactcatccataaaatatcgcgcaatggcaggcatcccctttcgccccgcaaataaggcatgcaacaatctgggtatgccgctccacggagcaaacaggcgcaccagttcaccgttcacaagcccctgtttacaggcaaattgaggcaataacgccacgccattcaacacaaccagggcgcgaactcgctgagcgaaatgcattagcgcaaatccctgatcttttaagctgcgcgtttaaccacgaatacaaatgttacccgccgacggcttcggtatatgcaacctgacacaaaattgtgtcatagtgcaggaaaaagcatttaccaggagcagacaacagcaatgaaacgcccggactacagaacattacaggcactggatgcggtgatacgtgaacgaggatttgagcgcgcggcacaaaagctgtgcattacacaatcagccgtctcacagcgcattaagcaactggaaaatatgttcgggcagccgctgttggtgcgtaccgtaccgccgcgcccgacggaacaagggcaaaaactgctggcactgctgcgccaggtggagttgctggaagaagagtggctgggcgatgaacaaaccggttcgactccgctgctgctttcactggcggtcaacgccgacagtctggcgacgtggttgcttcctgcactggctcctgtgttggctgattcgcctatccgcctcaacttgcaggtagaagatgaaacccgcactcaggaacgtctgcgccgcggcgaagtggtcggcgcggtgagtattcaacatcaggcgctgccgagttgtcttgtcaatagacttggtgcgctcgactatctgttcgtcagctcaaaaccctttgccgaaaaatatttccctaacggcgtaacgcgttcggcattactgaaagcgccagtggtcgcgtttgaccatcttgacgatatgcaccaggcctttttgcagcaaaacttcgatctgcctccaggcagcgtgccctgccatatcgttaattcttcagaagcgttcgtacaacttgctcgccagggcaccacctgctgtatgatcccgcacctgcaaatcgagaaagagctggccagcggtgaactgattgacttaacgcctgggctatttcaacgacggatgctctactggcaccgctttgctcctgaaagccgcatgatgcgtaaagtcactgatgcgttactcgattatggtcacaaagtccttcgtcaggattaatccatcaaataatgcctgatagcacatatcaggcgttgtcctcacttctttttgtattccttgaatcacatcacaaaatagacaaatctcaggcggcaaaaaacgacgtctgaatgcattttttttgctggcgacaaacccacgtaaaaagctcaccgtaggcgcaaataccctcattttgattgcgttttacggagcaaataatgtctaacgtgcaggagtggcaacagcttgccaacaaggaattgagccgtcgggagaaaactgtcgactcgctggttcatcaaaccgcggaagggatcgccatcaagccgctgtataccgaagccgatctcgataatctggaggtgacaggtacccttcctggtttgccgccctacgttcgtggcccgcgtgccactatgtataccgcccaaccgtggaccatccgtcagtatgctggtttttcaacagcaaaagagtccaacgctttttatcgccgtaacctggccgccgggcaaaaaggtctttccgttgcgtttgaccttgccacccaccgtggctacgactccgataacccgcgcgtggcgggcgacgtcggcaaagcgggcgtcgctatcgacaccgtggaagatatgaaagtcctgttcgaccagatcccgctggataaaatgtcggtttcgatgaccatgaatggcgcagtgctaccagtactggcgttttatatcgtcgccgcagaagagcaaggtgttacacctgataaactgaccggcaccattcaaaacgatattctcaaagagtacctctgccgcaacacctatatttacccaccaaaaccgtcaatgcgcattatcgccgacatcatcgcctggtgttccggcaacatgccgcgatttaataccatcagtatcagcggttaccacatgggtgaagcgggtgccaactgcgtgcagcaggtagcatttacgctcgctgatgggattgagtacatcaaagcagcaatctctgccggactgaaaattgatgacttcgctcctcgcctgtcgttcttcttcggcatcggcatggatctgtttatgaacgtcgccatgttgcgtgcggcacgttatttatggagcgaagcggtcagtggatttggcgcacaggacccgaaatcactggcgctgcgtacccactgccagacctcaggctggagcctgactgaacaggatccgtataacaacgttatccgcaccaccattgaagcgctggctgcgacgctgggcggtactcagtcactgcataccaacgcctttgacgaagcgcttggtttgcctaccgatttctcagcacgcattgcccgcaacacccagatcatcatccaggaagaatcagaactctgccgcaccgtcgatccactggccggatcctattacattgagtcgctgaccgatcaaatcgtcaaacaagccagagctattatccaacagatcgacgaagccggtggcatggcgaaagcgatcgaagcaggtctgccaaaacgaatgatcgaagaggcctcagcgcgcgaacagtcgctgatcgaccagggcaagcgtgtcatcgttggtgtcaacaagtacaaactggatcacgaagacgaaaccgatgtacttgagatcgacaacgtgatggtgcgtaacgagcaaattgcttcgctggaacgcattcgcgccacccgtgatgatgccgccgtaaccgccgcgttgaacgccctgactcacgccgcacagcataacgaaaacctgctggctgccgctgttaatgccgctcgcgttcgcgccaccctgggtgaaatttccgatgcgctggaagtcgctttcgaccgttatctggtgccaagccagtgtgttaccggcgtgattgcgcaaagctatcatcagtctgagaaatcggcctccgagttcgatgccattgttgcgcaaacggagcagttccttgccgacaatggtcgtcgcccgcgcattctgatcgctaagatgggccaggatggacacgatcgcggcgcgaaagtgatcgccagcgcctattccgatctcggtttcgacgtagatttaagcccgatgttctctacacctgaagagatcgcccgcctggccgtagaaaacgacgtttacgtagtgggcgcatcctcactggctgccggtcataaaacgctgatcccggaactggtcgaagcgctgaaaaaatggggacgcgaagatatctgcgtggtcgcgggtggcgtcattccgccgcaggattacgccttcctgcaagagcgcggcgtggcggcgatttatggtccaggtacacctatgctcgacagtgtgcgcgacgtactgaatctgataagccagcatcatgattaatgaagccacgctggcagaaagtattcgccgcttacgtcagggtgagcgtgccacactcgcccaggccatgacgctggtggaaagccgtcacccgcgtcatcaggcactaagtacgcagctgcttgatgccattatgccgtactgcggtaacaccctgcgactgggcgttaccggcacccccggcgcggggaaaagtacctttcttgaggcctttggcatgttgttgattcgagagggattaaaggtcgcggttattgcggtcgatcccagcagcccggtcactggcggtagcattctcggggataaaacccgcatgaatgacctggcgcgtgccgaagcggcgtttattcgcccggtaccatcctccggtcatctgggcggtgccagtcagcgagcgcgggaattaatgctgttatgcgaagcagcgggttatgacgtagtgattgtcgaaacggttggcgtcgggcagtcggaaacagaagtcgcccgcatggtggactgttttatctcgttgcaaattgccggtggcggcgatgatctgcagggcattaaaaaagggctgatggaagtggctgatctgatcgttatcaacaaagacgatggcgataaccataccaatgtcgccattgcccggcatatgtacgagagtgccctgcatattctgcgacgtaaatacgacgaatggcagccacgggttctgacttgtagcgcactggaaaaacgtggaatcgatgagatctggcacgccatcatcgacttcaaaaccgcgctaactgccagtggtcgtttacaacaagtgcggcaacaacaatcggtggaatggctgcgtaagcagaccgaagaagaagtactgaatcacctgttcgcgaatgaagatttcgatcgctattaccgccagacgcttttagcggtcaaaaacaatacgctctcaccgcgcaccggcctgcggcagctcagtgaatttatccagacgcaatattttgattaaaggaatttttatgtcttatcagtatgttaacgttgtcactatcaacaaagtggcggtcattgagtttaactatggccgaaaacttaatgccttaagtaaagtctttattgatgatcttatgcaggcgttaagcgatctcaaccggccggaaattcgctgtatcattttgcgcgcaccgagtggatccaaagtcttctccgcaggtcacgatattcacgaactgccgtctggcggtcgcgatccgctctcctatgatgatccattgcgtcaaatcacccgcatgatccaaaaattcccgaaaccgatcatttcgatggtggaaggtagtgtttggggtggcgcatttgaaatgatcatgagttccgatctgatcatcgccgccagtacctcaaccttctcaatgacgcctgtaaacctcggcgtcccgtataacctggtcggcattcacaacctgacccgcgacgcgggcttccacattgtcaaagagctgatttttaccgcttcgccaatcaccgcccagcgcgcgctggctgtcggcatcctcaaccatgttgtggaagtggaagaactggaagatttcaccttacaaatggcgcaccacatctctgagaaagcgccgttagccattgccgttatcaaagaagagctgcgtgtactgggcgaagcacacaccatgaactccgatgaatttgaacgtattcaggggatgcgccgcgcggtgtatgacagcgaagattaccaggaagggatgaacgctttcctcgaaaaacgtaaacctaatttcgttggtcattaatccctgcgaacgaaggagtaaaaatggaaactcagtggacaaggatgaccgccaatgaagcggcagaaattatccagcataacgacatggtggcatttagcggctttaccccggcgggttcgccgaaagccctacccaccgcgattgcccgcagagctaacgaacagcatgaggccaaaaagccgtatcaaattcgccttctgacgggtgcgtcaatcagcgccgccgctgacgatgtactttctgacgccgatgctgtttcctggcgtgcgccatatcaaacatcgtccggtttacgtaaaaagatcaatcagggcgcggtgagtttcgttgacctgcatttgagcgaagtggcgcaaatggtcaattacggtttcttcggcgacattgatgttgccgtcattgaagcatcggcactggcaccggatggtcgagtctggttaaccagcgggatcggtaatgcgccgacctggctgctgcgggcgaagaaagtgatcattgaactcaatcactatcacgatccgcgcgttgcagaactggcggatattgtgattcctggcgcgccaccgcggcgcaatagcgtgtcgatcttccatgcaatggatcgcgtcggtacccgctatgtgcaaatcgatccgaaaaagattgtcgccgtcgtggaaaccaacttgcccgacgccggtaatatgctggataagcaaaatcccatgtgccagcagattgccgataacgtggtcacgttcttattgcaggaaatggcgcatgggcgtattccgccggaatttctgccgctgcaaagtggcgtgggcaatatcaataatgcggtgatggcgcgtctgggggaaaacccggtaattcctccgtttatgatgtattcggaagtgctacaggaatcggtggtgcatttactggaaaccggcaaaatcagcggggccagcgcctccagcctgacaatctcggccgattccctgcgcaagatttacgacaatatggattactttgccagccgcattgtgttgcgtccgcaggagatttccaataacccggaaatcatccgtcgtctgggcgtcatcgctctgaacgtcggcctggagtttgatatttacgggcatgccaactcaacacacgtagccggggtcgatctgatgaacggcatcggcggcagcggtgattttgaacgcaacgcgtatctgtcgatctttatggccccgtcgattgctaaagaaggcaagatctcaaccgtcgtgccaatgtgcagccatgttgatcacagcgaacacagcgtcaaagtgatcatcaccgaacaagggatcgccgatctgcgcggtctttccccgcttcaacgcgcccgcactatcattgataattgtgcacatcctatgtatcgggattatctgcatcgctatctggaaaatgcgcctggcggacatattcaccacgatcttagccacgtcttcgacttacaccgtaatttaattgcaaccggctcgatgctgggttaatgactcgtcccgtcacgatcttcagcaatatgctgaagcatcgtggcggtataacgatgatttctgattgaataaagatattcctgcatatacatcggcctgtgcggtgcatcaaaatatttcagcgttgccggattcaccagtcgccaggcaaaatgcgggatcaccgtcagaaaatgtccgcgctccacggcgctgattttggccataaaactgtagggacgataaataatggttggattgatcccacaaggtcgcatattcgcatcaatcattgcttcgaagttggcccggttctgaaagcgcatttgtagccagggcagctcctgaagcagctcttgctcttgtcgctcttcataacggcgagaaacgagaaagcctaatcgcagcggtggtagttcactgatagtcaggttttccagttcctgaactcgtgcagatacatgctgtggggagataataaaatctaactggcggtcaaaaagattatcgataacgccattttcgctgaactcaactggctgggcggtcacgccttcatacttatctccgagactaatcaactgatcgaaaataattgtcggataagtattatctatgccaatcacaatttctcgtgaacgacgccctgagttatggatttcattatcaatcgcagaaagccgttgataaaccgggaacagtttttgatacagttcctgtccggctttattgaggctgatattattatctttgcgggtaaatagcgtatagccaatttgttcttccagcgcggcaatgcttttaccaaatggcgaagccgtcatatggattttttctgccgcccgggcaatattattggtttgcgctaataaaatgaaattgcgcatctttttcgaaataaaaatgtccatccccctcccccgcatccttgtccgcttaaccgtttcagtcagcctatccttgatgaaaccgcgagcaaagataggtgattacgtcatggttttacagaaaattacagaaaaaggaggcaatatcgggtaaaggcattagcccgacgaatacgtcgggctacaaatattattgtgctgcaggtgttttagcgggttgttgatccacaggttctaactggaagaccacatcgacctgatcatcaaactgaatagcggcctgctcgtaagtttcctgggcggacaccggcgcggcatcggctttcatcatccgcaccattgggctgggctgatagttggaaacatggtagcgcacgctatataccggccccagtttacgatgaaagccgttcgccagttcctgcgcctgatgaatcgcgttatcaatcgctgccttacgcgctttgtctttataggcatccggctgcgccacgcccagcgacacagaacgaatttcgttaagacccgccttcagcgcgccatccagcaaggaattcagtttgtctaactgacggagcgtgacttccaccgttctcacagcgcggtagcctttaaggatacttttaccatcctgataatcataatctggctgggtgcgtaagttcgctgagctgatatcttttttcgcgatctgattgagttcaaggaaggaaatgtattgtgcgacgcgctcatctgcctgtttcttggcagtagcggcatccttcgcggccacgttaacttcaatcgcaagagtggcaatgtctggcaccgcatccacgcttgccgtaccggaggtgacaatatgcggtccatccggcaattcgttagcctgcgctgccatcccgctaatacccattaatgccgccagggcgataactttgaacttcacgttagtctctccgtgttaattgacttgcccaaaattcaggacctctggaggcaagcttagcgcctctgttttatttttccatcagatagcgcctaactgaacaaggcttgtgcatgagcaataccgtctctcgccagctgcaaggcaataaaccacataacacatcccacaaccagattgataatgcgctgtgcttttgccgtgcgcagacgcggtgccagccaggctgcgagaagagccagaccaaagaaccacaggaaagaggcgctaattgtcccgagtgcaaaccagcgttttggttccacatcaagttgcccgccaaggctgcccagtacaacaaaagtatccaggtaaacatgcggattcagccaggtcactgccaacatggtggcgataattttccatctgccttgcttcatgacttcggcgctggctaactcaatattactgctcattgctgttttaaaagcgccaaaaccataccacagcaagaaggctacgccgccccaggtgaccagcgccagcaaccacggcgactgcatcaataacgcgctgccaccaaaaatcccggcgcaaatcaggaccaaatcgctgatagcacaaagtaaggcaatcataatgtggtactgacgacgtatgccctgattcatcacaaaagcattttgtggaccgagcggtaggatcatagccgccccaagtgcaagaccttgaaagtaataagaaaacacgttggatattccgaattaagtatctgatgcagagactatatcgcgggattgttattagcggaaattgataatattaattggcaatcagaaaaactaataagagagaggccagagagtattatctggcctcagcgttgattacgcagctttgtcttctttcacccgcttaaagttcacatccatttgcgggtacgggaagctgataccggcggcatcaaattcacgtttaatacgctccagcacatcccagtacacgttttgcagatcgccgctgttgctccagacgcggaccacgaaattaatcgacgatgcaccaagttcgttcaggcgcacagtcatttcgcgatctttcaaaatgcgatcttcagactggataatattggtcaggatctgcttaacctgatcgatatcggaatcatacgccacgccaataataaattcgttacggcgaactggctcgcgggagaagttaataatatttccggcaataattttaccgttcggaataacgataattttaccgtctgcagtacgcatggtggtggagaaaatctgcacactcagcacagtaccggctacgccgcccaggtcaacatattctccggcacggaacgggcggaacatgacaagtaacacgccagcggccaggttagacagtgacccctgcaaagccagaccaacagctaagcctgcggcaccgagtacagcaatgactgacgcggtttgtacacccacgcgtcccagtgcagcgattagcgtaaaggcgataataccgtaacggactaatgcagaaagaaaatcagcaacagtggcatcgattttacgggagatcatcaggcgattcaccgcgttggaaatcatccgcgcgataatcaaaccaacgatgatgatcgcgagtgccgccacgatgtttactgcataacttagcagcagcgcctggttagctaccagccagcttcccgcgccgtttatgctatcgacaacattcaaatcttccattcaatattccttttcaactgactcaaaatggagaaatacactccgccgccttatgacgggcagtctgacaagggtaaacaataaagcataattttgccaaatagatcacagatttctcatctgaatcaccttgcttttggcgaaaaaatccccgcagagcggggctcagacagatatcaatgtgcgctttgtcatgccggatgcggcgtgaacgccttatccggcctacaaaaacctgcaaattcaatatattgcaggatacgtgtaggcctgataagcgtagcgcatcaggcaattttgcttttggcgaaaaaaagacccgcagagcgggccttgagataagcagaaaggaatatcttacagaacgtcgatcgcgttcagttcctggaatgctttctccagacgagcgatcatcgaagtctgaccggcacgcagccatacgcgcggatcgtagtatttcttgttcggctgatcttcgcctttcgggttacccagctgaccctgcagataagcttcgttcgctttgtagtagttcagaacgccttcccaggttgcccattgggtatcggtatcgatgttcatttttactacgccgtagcttacggagtctttgatttcctgagcagtagaaccggaaccaccgtggaatacgaagttcaggctgttgtgcggcaggttgtgtttcttggaaacatattcctgagaatcacgtaggatggtcggagtcagaaccacgttacccggcttgtaaacaccgtgtacgttaccgaaggacgctgcgatggtgaaacgcgggctgattttgctcagttcggtgtatgcgtaatcaacgtcttccggctgggtgtacagtgcagaagcgtccatgtggctgttgtccacgccgtcttcttcaccaccggtgcaacccagttcgatttccagagtcatgccgattttggacatgcgctccaggtatttagagcagatttcgatgttctcttgcagagattcttcagacaggtcgatcatgtgggaagagaacagcggcttaccggtagctgcgaagtgtttttcacccgcgtccaacagaccgtcgatccacggcagcagtttcttcgcgcagtggtcagtgtgcaggataaccggaacaccataatgttcagccatctggtgaacgtgatgcgcaccagagatcgcgcccaggatagcagcaccctgcggaacgtcagatttcacgcctttaccagcgataaaggaagcaccaccgttggagaactgaacgataaccggcgctttaactttagcagcggtttccagtacggcgttgatggagtcagtaccgacgcagtttactgctggcagtgcgaagttgttttcttttgctacctggaaaactttctgtacgtcatcaccagtgattacgccaggttttacgaaatcaaaaatcttagacatgtctcttgtcctgtatcgtcgggccttatactcgtcatacttcaagttgcatgtgctgcgtctgcgttcgctcaccccagtcacttacttatgtaagctcctggggattcactctcttgtcgccttcctgcaactcgaattatttagagtatgaaaaattgcgtgctctaaaagcgcgctgaaacaagggcaggtttccctgccctgtgattttttacttcttagcgcgctcttcgagcatcgctactgcaggcagtactttaccttccacgaattcgaggaatgcgccgccgccagtggagatgtaggagattttgtcagcaatgccgaacaggtcgattgctgccagagtgtcgccgccgccagcgatggagaacgcttcgctgtctgcgatagcgttagccacgatttcagtacctttgcggaagttcgggaattcgaacacgccaaccggaccgttccacagaatggttttcgcattcttcaggatttcagccagttcctgagcggaagcatcaccgatatccaggatctgctcgtcagctttcacatcgttaacagatttcagggtagccggtgcagtttcagagaactcggttgctacgcgaacatcagacggaaccgggatgttgcaggtggtcagcagacgtttagcttcgtcaaccaggtcagcttcgtacagggatttacccacatcgtggccttgtgccgcgataaaggtgttagcgataccaccaccaacaatcagctggtcagcgattttagacagggagtccagaacggtcagtttggtagatactttagaaccaccaacgatagccaccatcgggcgagcaggttctttcagtgctttacccagcgcgtccagttcagctgccagcagcgggcctgcgcacgcaacgtcagcgaatttaccgataccgtgagtagaagcctgcgcgcggtgagcagtaccgaatgcgtccattacgaacacgtcacacagtgcagcgtattttttggacagggtttcgtcgtctttcttctcgcctttgttgaagcgaacgttttccagaacaaccagttcaccttcagcaacgtcaacgccgtcgaggtaatctttaaccagacgaaccgggttagacagtttgtctttcaggtagttaacaaccggcagcagagagaattcttcgttgtactcgccttcggtaggacgacccaggtgggaagttaccatcacttttgcgccttgtttcagggccagttcgatggtcggcagagaagcacggatacgcgcgtcgctggttactttcccgtcttttactggtacgttcagatccgcacggataaatacacgtttcccagcaagatccagatcggtcatcttaattacagacatggtgaatcctctcgttgattctaaaagttttgcagacgctgcttgcgtcttacctgaaagcaacagtagccatagctaacgtcgtgtcgagcattcggttagcaaagccccattcgttatcgcaccagaccaacgttttgatcaggtgtgcgccactgacccgggtttgggtgccatcgacaatggcactgtgcggatcgtggttaaaatctacagagaccaacggcaattccgtatagtcaactataccatgaaatgcaccttgtgctgctttttgcagcaacaggttgacttcattggcttttacaggtttcttcaccgtcacgcttaaatcgattgccgtcacatttatggttggcacacgtaccgcaatcgcttcaaagcgatcgttaaattgcggaaaaaatcgtgtgataccggcggccagtttagtatcgaccggaatgatcgactggctggctgcccgggtgcgacgcaggtcaggatggtatgcatcaataacctgttgatcgtgcatggcggagtgaattgtggtcacagtgccggactcaataccgtacgcatcatctaacaatttgatgacgggaattatgcaattcgtggtacaggaagcgttagaaacgatgcggtgttccgcacgaagttgatcctgattgacgccgtaaacaacggtcgcgtcgagatcgttactgccaggatgtgaaaagagcacttttttggccccggcggcaatatgcgcttcgccatgctcgcgggagccatatacgccggtgcagtcgaggactacatcaacgccaagttcacgccaggggagcgattgcagtgaacgttcatgcaatacgcggatggcgtcatcaccaacaaaaagttgatcgcgttcctgtcgtacttcccatgcaaaacggccatggctggtgtcatatttcaacaaatgcgccatgcccgcagcatccgccagttcgttgattgccaccacggtaatttccgcccggcgtccggattcatacaaagcacgaaccacattacgcccgatgcgaccgaagccatttatcgctacgcgtacggtcatagatctcctgcaaggttttccctgagcaaatttgccagacagagtaatccagcaaatcgtccggggaaaccttacctgtcgcaaactgcgactgattggttaattgtcgaacatttaatcgactgaaacgcttcagctaggataagcgaaacgtggaataaaaggaatgtttgtccagccgaagaagacatttatctgactcacatcacacttttatccccttttgtgggaagctttattccaggctggcgtaataataaccctacaataactggaataaattgtcagcttgtgaagtgataccggccttcttcagtcatctctactatcagattggcctgacggctattcatcagcacacgctcgacattggggccatcggtgcgggcataaaatgcttcggctacttgccgcgttaatcctcccgcaattttacgactaatcaagcgctcccgcagaatttgagcaggtgcatgaataaaaatagaaaaatcgcagaaagatgccaactccagccacttttcatcatccagtaacaaccagtttccttcgacgatgacgagtggtgcggtaacgtgcaacgcatcttcaacaggatcatgcttttgtcgatcgtactgcggccacgtacaatccccttccacgacctggcgcagattttccgtcagtttcgcaacgtcaaatgtctctggtgcgcctttgaaggggcgcaattgatgcgcatccagccagctattgtaatggtgaaaaccatccatcgggagcgtctgaatagcgggcagttccgggtcttgttgcgcgagatattcccagaaggtggttagggttgatttacccgtccccggcggagcgcaaagaaaaaccaccgtacgccgctgcggatttaccgtctgtaaggccgccaacatgtgcagcaacggtttatgtacattttcaatctcttcgttctggtactgtgcctgtatcttcagcccattcaccgttaattcaattttcacggcgttaattcctttaaggtggtcgttactgccagcgtcagcgccgttttgaccattccgctaaaacgcgcctctgaccagacggcgaaatcggcgaacttcatcgctttcaacgcgtcatagagcgtcgcattgcaggttatgctattgacgttgctgataaaatcccaggtcatgtcatcggcaaatccgagcgtttcatcctgttcgttcaggtaatgccagaactgggaaaaatgcgtgatatcggcgtacaaccatttatccattttccccaacgcataaatcaaacgcagtgcaacatcaatatcgtcaagcgggccgctttgggcgagtaacggcttcactgcatattccacgatctcttcatcgttatcgacaaacagcgacggcagaaactggcgtatcccctggagcaaaatggtatgcgcagttttcataaatgaaaataaattgtcctgtgcatccagttgctcaagcacatcatcttctgtcagcgtcgccattggtcttccgatagatcaccatcaatgcagggagtctattatattacacgtttggtccgcgccgccgatcagtaatgtctgcgtccgcaccccattcgccgtctgttggataccgttcaccagctcaccgcccgtcacgcccgtagcgctaaagaggatatcgttccccctcaccagttcatcgagcgagtacacacggttaacgtcaacgcccattgccttgcaacgcttgcgctcctgctctgcaatctgccgattttccgtgtaatcccctttagcctgacaaaagtcaatcagctcggcctgcatatccccgcctaatgctttaacggcacaggcagaaatcacgccttctggcgcaccgccgatggtgtacatcacatcgtaaggattatcctgccagcaggtcagcacgctggcggagacatcgccatccggcagggcaaaaaccttcacgcccagctgtgttgcttcttcaatcgcggcactcaggcgcggtttatccagcgtaaccatgcgcagcttgtccagcggtttacctaacgcccgcgccacgttacgcaagttgtccgccagaggcaaagacagatcaatcaccccggcagccagtcgattaacaaccagctttttcatatacatatcgggcgcatgtaacaggctatctcgaggggcgaaagccatgaccgccagcgcattgctctgccccatcgccaccatccgcgtgccttcaatgggatcaaccgcgatatcgacttctggcccatcgcctttgcccacctcttcgccaatccacagcatcggcgcatggtcaatttctccttcgccgataaccactcgtccacgaaaagcgacgtcgtttaatgcctggcgcatcgcggtgaccgccaggtcatcaattttatttttgtcgccacatccggtttgcggccaggcagccaacgctgcctgttccgtaacgcgaaataatggccacgccagggacatcattgcgcggcctccccgatatcaacgccaaattgtgccagcagatatttctcggcctgttcattccagatgccgtgcgtttcctcaaccagccgcgccaactctttaaacagcggatcggttttgcctttttcggcaaaatcggcaatggcagtgagcggcatggtcacgccgttataaatgagttttttaccgccagggatatccggcagattgagcacggtttctggcaccgcatccaggccaccgatatgggtcaccataaacgacggctgtaactgcccagtggcgctaagggcaatcgcctctttcatgtcgtccgttgaaccgccggatgtaccgacgacgtgcgtgctgttgtaatggacgttgtagaaattaaacggtactttgaagtttttatccgtcggaccggcaaagaagttcagacagccatcttccgccagtaattcgtcagccatctcaacgacagcaggcaccgccgcataaacaaaaatgtcatcgaacccgacatctcctgtcagcgcccgcagcatctggacaggatcgctcatccctttggtattcacatacaccagctcaatgcctttactggccgccagttccaccggcagcagcttctgtacctgcgccagacgtttgtcgtcgatatcgaccaccaccacccgcgacggttgtatgccgccgttaatggcgtaatcgatagcgccaatgcccatcggacctgcacacgccagcagtgcaatattgccgccaggtttgacgcccatgcgatgctcataaacatattgcgtggtgtgataattggcatgataagcaccaataatgcagcacataggctctgccagcgacgccgcagcaaaataagagccgtgatacggtaatacgcagcccaaattaatggcgatttcgggaataatcatataagtggcattgccgccaaaatattcgtagctgtagcccgctgaatatccgcttggtaaccccatcgccggttgcaatacaaaacgctggccttttttatatttgccagtgagatttttacccacttcgacaataaccccggcacattcatgcccggtaatgaccggatgattttctaaatcgtcgggtacgcgtttatgttcactaccgagtaacgccgctttccaggtggataaacagacgctgtcagaaatcacactcaccagtaattcattatcggtaatttctggcagttcaaattcgcgcagacggacatcccgcttgccataaatagcagcaactttggttttcatttttacctctgtaatcagtgtttatgttcggcggttaattgattaaataaagtgtcgagttttggatcgccaatatagttattaatcaatatcagtggtttatccgtcacacgtttcacgcgcccttccagactggcatgagtaacgacgatatccgcatccgcaggcacgttttctatggcgtaatgttttacttcaattgccagccccgctttttccaggcgtttacggaaggtggtcgcgcccatcgcactggagcccatccccgcatcgcaaacaaaggcgatacgcttaaccctgcttaacgagaatgcaccctcttgtttcatcgccttaaccgcattggctgactgagcaaactcatcttcgctctccgtttccaccgttttttccatcttcagtatcagcgaagtgatagcaaaggacaccagggtacctaccgtaacaccggcaattgtcgccaggaacgagcctttcggcgtcagtgccaggtaagcaaagatagaccccggacttgggccagccaccagaccaccgtccagtaagttaaacatccaggtaccagacataccgcccgcaatcatggcaataatagtcagcggcttcatcagcacatatgggaaatacagttcgtggatcccaccgaggaagtgaataatcatcgccccgggcgcagaacgtttactcatccctttaccaaacaaggtaaacgccagcagcagccccaggcccggacctgggttagaggccaccataaagaagatggatttaccgttaaccgaagcctgttgcattcccagcggataatagacgccctgatcgatcgcattattgaggaaaagcactttcgccggttcattgatgactgacaacaatggcagataacccgcatgtaccagcgcctcaatacactctttgacgaaagtattggcaattaacaccgccgggccgataacttcaaaacccagcagacaaaggagcatccccgcgatacctaatgagaagttattgataaccatctcaaaaccggcaggtatgcgtttttccagtgccttatcgacatattttatgaccaacccaccgagcggccccatgatcattgagccaaggaacatcgggatctctgcgccaacgatcacaccaatagtacctattccgcccatgaccgccccgcgtttaccgccgaccagatgaccacctgtagaaccaatcatcacgggcaataaataggtaatcatcgggccgacaattttggcgaaatgttcgttaggcagccaaccggtgggaataaataacgcagtaataaaaccccaggcaataaaagcaccaatattggggatgaccattgcagtcaaaaagcccccaaaagcctggacctttgcacgagcagacttgttttccataatattatcctgtagaggagagagtaattatccgcggctgataatgtccgctaattatttttctgatgatgctgttaagagttgttcgagtatttcttcttcgcacagtaattcacttaacgcctgaatagcgccaatgtgcgaatcggcatcggcagcagagagtccgatgagtaatttaattggttcgtcattccccggaaaataaacaccttgttcaagtaatgtcaaagacatcccggttttaagcgccccacattccggtcgcgcatgaggcattgccacgcctggtgcgagaatataataagggccattgttaatggtggaatctttaattgcctgaatgtaattctcgctgatatagtttttatccagcaatgataccatcgagaaatcgatagcttcctgccaatcttttgctgaatgtataactgagattgatgattctggaaaataatcactaagccgcataaattatccttattttatttttagggtaccgtccggcggtaaaaataaaatactcgtgcggtttaatgaaagcaattgagcagggaaaccggtgttttgaaaacagttaattattaatttcttatataacattgagttatagttataacaacaaatgtcaatacgcatatcgtgatgcatattacataattgatatttattgcatataaatatttgtgatctacaacacgctttatctattgcttgtccgcaaacggacatatcaaggtaataaaaaaggtcgccgaagcgacctttttacccgaaatgctaattacagcagttcttttgctttcgcaacaacgttatcaacagtgaagccgaactcttcaaacagcagctctgccggagcagattcaccgaaggtggtcataccgacgatagcaccgttcaggccaacatacttgtaccagtagtcagcaatacccgcttctacagcaacgcgtgcagtaaccgctttcggcagtacggattcacggtaagcagcatcctgcttgtcaaatgcgtcggtagacggcatggacaccacgcgcgctttcacgccttcggcagtcagtttttcgtaggcagcaacagccagttcaacttctgaaccggtagcgatgaaaatcagttccggctgaccggcgcagtctttcagcacataaccaccgcgcgcgatgtttgccagttgctcttcagttcgttcctgctgcgccaggttctgacgggagaggataagcgcagtcgggccgtcctgacgctcaacgccgtatttccacgcgaccgcggattcaacctggtcacacggacgccatgtagacatgttcggggtcacgcgcagagaagcgacctgctcaaccggctggtgagtcgggccatcttcgcccagaccgatggagtcgtgggtgtaaaccatcacctgacgctgtttcatcagcgcagccatacgtacggcgttacgtgcgtattccacgaacatcaggaaggtggaggtgtacggcaggaagccaccgtgcagggagataccgttagcaatcgcggtcataccgaactcgcgaacaccgtagtggatgtagttacccgcagcatcttcgttgattgctttagaaccagaccacagggtcaggttagacggcgccaggtcagcagaaccgccgaggaattccggcaacagcggaccgaacgcttcgatagcattctgagacgctttacggctggcgattttcgccggattagcctgcagtttagcgatgaactctttcgctttagcgtcgaagtcagacggcatttcgcctttcatacggcgggtaaattcagcggcttcctgcggataagctttcgcgtaagcagcgaatttctcgttccatgcggattctttcgcctggcctgcttctttcgcatcccactgagcatagatttcagacgggatttcgaacggcgcatatttccagcccagttgttcgcgggtcagggcaatttcagcgtcgcccagcggcgcaccgtgggagtcgtgggtaccggctttgttcggggaaccgaaaccgatgatggttttgcacatcagcagggaaggtttgtcagtcactgcgcgcgcttcttctactgcgcgtttgatagatgccgcgtcatgaccgtcgatgtcgcgaataacgtgccagccgtaagcttcgaaacgcattgcggtgtcgtcggtgaaccagccttcaacgtgaccatcgatagaaataccgttgtcatcgtagaatgcaatcagtttacccagcttcagcgtacccgccagagagcaaacttcgtgggagatgccttccatcatgcagccgtcgcccatgaaggcgtaggtgtagtggtcgacaatgtcgtggcccggacggttaaactgcgccgccagcgttttttctgcaatcgccataccgactgcgttggcaataccctgacccagcggaccggtggtggtttccacaccagcggtgtaacccacttccgggtgacccggagttttagagtgcagctgacggaagtttttcagttcttccatcggcagatcgtaaccggtgaggtgcagcaggctgtagatcagcatggagccgtggccgttggacagcacgaagcggtcacggtcagcccaggacggattctgcgggttgtgtttcaggaaatcacgccacaggacttcggcaatgtcagccatacccataggggcacccgggtgaccggatttggctttctgtactgcgtccatgctcagcgcacgaatagcattggcaagctctttacgtgaggacattttgactccagatcggatgatgaagggcacgcccttaacgacttgacgacagcgcgttttgggctacgccggaaaatttgccaacaatttaccgcaagccgcgcgtcatgtacatggaacatccttttgccgcttcagaaatctctggatcatgctcgcatgttgcgcaatctactcgcccgtccgctgcgcttttccttatactgagactgagcgtcgattcacctgcaaacggcgcatttttagaataatcctgaccttgtgcggaagagaaaacatgaaaattcgcgccttattggtagcaatgagcgtggcaacggtactgactggttgccagaatatggactccaacggactgctctcatcaggagcggaagcttttcaggcttacagtttgagtgatgcgcaggtgaaaaccctgagcgatcaggcatgtcaggagatggacagcaaggcgacgattgcgccagccaatagcgaatacgctaaacgtctgacaactattgccaatgcgctaggcaacaatatcaacggtcagccggtaaattacaaagtgtatatggcgaaggatgtgaacgcctttgcaatggctaacggctgtatccgcgtctatagcgggctgatggatatgatgacggataacgaagtcgaagcggtgatcggtcacgaaatggggcacgtggcgttaggccatgtgaaaaaaggaatgcaggtggcacttggtacaaatgccgtgcgagtagctgcggcctctgcgggcgggattgtcggaagtttatctcaatcacaacttggtaatctgggcgagaaattagtcaattcgcaattctcccagcgccaggaagcagaagccgatgattattcttacgatcttctgcgccaacgcggcatcagcccggcaggtcttgccaccagctttgaaaaactggcaaaactggaagaaggtcgccaaagctcaatgtttgacgaccatcctgcatccgccgaacgcgcccagcatattcgcgatcgcatgagcgcggatgggattaagtaaagcctggtggtgtcgaacgtaggtcagataaggcgttcacgccgcatctgacatgaatggcacatttgttaccttgtgcgcattgccggatgcgatgctggcgcatcttatccggcctacgggtgccgaacgtaggtcggataaggcgttcacgccgcatccgacattaatggcacgttttacccgtgcgcatcgcatctggtgcttactcgccctttttcgccgcctgaatatacagcatttccagcgccagcgttgccgctgccagagcagtgatttccgactgatcgtatgccggagccacttccactacgtccatcccaacaatgttgagatctttcaggccgcgtaccagtttaatagcgcgatcggaggtcaggccgccaatcactggcgtaccggtgcctggtgcaaaagcaggatccaggcagtcgatatcaaaagtcaggtaaaccggcatatcacccacaatctgtttcacttgggcgataacgtcatccacgctgcgatcgttcacctggcaggcgtccagcacggtaaagccgttgtctttatcaaactcggtacgaataccaatctgcacggaatgattcgggtcgatcagaccttctttcggcgcggtatagaacatagtgccgtggtcaaattcacaaccgttcgcataggtatcggtgtgggcgtcaaagtgtaccagcgccattttgccgaaatgcttcgcatgagcacgcagcagcggcagcgtaacaaagtggtcaccaccgaaagagagcatacgcttaccggcagccagcagcttctcggcgtgcgcctgcagcttttcgctcatctcacgggcatcgccaaaggcatataccagatcgccgcagtccacgacgttcagacgctcacgcatgtcgaaattccacgggaagcggttgtgttcccaggccagattcgtcgaaacctgacggatcgctgccggaccgtggcgaccacccgcacgaccagaagtggccatatcgaacggcacgccagtaatcacccagtctgcatcgctgtcatacggctggaagttcatcggcaggcgtaaaaaaccaaaggcattggaaaccagtgagttatcgtattgatgacctaaggtgctcatggatggactcctattacaaagtcgatataaaaaaacccttccgcgtcgttaggcccgacgaggaagggttggatttgtcacaataaattgtggcggattatcaccgctaaattaagcggattcaagtaacacaggacttactcatcttcaagataagtataaccgtacaaacctgcctcgaactcttcaaggaactgttgttgcagttcagcatcaagatcggttttcttcacttgatcgcggaactgggttaacagcgttttcggatcgagctgtacatattgcagcatgtccgccacggtatcgccttcgtcagacagttctacttctacgctaccgtcagggaagacgaacacgtcaaccgcttcggtatcaccgaacaggttgtgcatgttgccgaggatctcctgatatgcgccgaccataaagaaaccgagcatcggcggattctctggatcgtactccggcattggcattgtcgtggcaataccgtcaccatcaatatagtggtcgatagcaccgtcagagtcacaggtaatatccagcagcacagcgcgacgttccggcacttgatccagcccttccagcggcagaaccgggaacaactggtcgatcccccatgcgtccggcatcgactggaacagcgagaagttgacgtacattttgtccgccatacgttcctgcagctcgtcgataatcggacgatgagcacggttttgcggatccagctgcttttgcacttcatggcacatgctcaaataaagctgctcagcccatgcacgttcttgcaggctaaagatgccggaagagtagccgatatgaatgtcgtgcagatccatctgactgtcgtgtaaccattcacgcagagaacggcgagttcccggttcgtgcatctcctgccaggtttcccacatgctttgcagcgcgcgcggcgcatcttctgcaggcgcggtcggcaccgtgtattcgttacgttccacgccgatgatattagacaccagcacggtgtgatgcgcagtcaccgcacgacccgattcggtgattaccgtcggatgcggcagaccgttttcttcacacgcatcgccaatcgcccagataatgttgttggcgtattcattgaggccgtagttcaccgaacagtcggactgcgaacgagtaccttcataatccacgcccagaccgccgccgacgtcgaagcactgaatattgacgcccagcttgtgcagttccacatagaaacgcgcggattcacgaacgcctgtcgcgatatcgcgaatattcgccatctgcgaaccgaggtggaagtgcagtagttgcaggctgtcgagacgcccggcttcacgcagggtttcaaccagttgcagtacctgagtcgcagccaggccgaacttcgatttttccccgccggaggactgccatttacccgaaccctgcgaagccagacgtgcacgcacgcccagacgaggaacgacattcagacgttctgcttcatccagcacaatggcgatttctgacatcttctcaatgaccagatagaccttgtgccccatcttctcgccaattaatgccaggcggatatattcgcggtctttataaccgttgcagacgatgacgctacgggtcatgccagcatgtgccagtactgccatcaactcggctttggaaccggcttccagacccagcggttcgcccgaatgaatcagggactcaatcacgcggcggtgctggttaactttgatcggataaacaaggaagtaatcgccgttatagccgtaggattccctcgcacgtttgaacgcggcgttaatggaacgcaaacggtgctgcaggatctgtgggaaacagaacagtgcaggcagacgctggccctgtgcttcacgagttttcactaactgcgcgagatcgacgcgagcttccgggacgtccgggtccgggcacacgctaatgtggcccagctcgttaacgtcatagtagttattgccccaccaggcaatattgtaagtacgcagcatcttgctggcttcctgggagctcattgcaacctcctgcatggagcgtagtacaccgtgttcgcccgctgacgaaggcaaacccatagacatgtcgtcagacatagcgaacctcaaattattttattaagtgtaaaacagttaacgactatcgcagcctggaactgcgataacaacccataagcacatggattttccagcagtgaatgctgacgctccaactgcgcaaccggtttctttttcataacattattaagcacataaccgaacgtaagtgtgaaagttcggcgaaaccacgagaaaactcttgtttttacaagagcgcccttgttcagtcctcagtaactgtaaccagctcttgaatcctgagaagcgccgagatgggtataacatcggcaggtatgcaaagcagagatgcagagtgcggggaacgaatcttcaccagaacggtgagacaggttaagcagcagacaacggttcattatttcgtatcacctccacggccgcctgttaagacgaacccacaagccaaaactctgatttcaacccggctggaagtggcaacacgaaagaaacgtcgtgtgctttttatttaagccgcgcgccgcgttttataccccacaatggcagaaaattgcaaaagataaatacgcagaatgccggcattgtcaggaaaaatttccagccacgtttttaacagaatgagacacgattcaaaaaaaagtggaaatcgggtgaagaattgacctaaaatagccatccagatgttaatccatccataccgattaacactcagactgccagtgtttttaacctgcagagtcgtggtaggatccgctaccacagaaaatccacacaacagtttgagctaaccaaattctctttaggtgatattaaatatggcaaaacacctttttacgtccgagtccgtctctgaagggcatcctgacaaaattgctgaccaaatttctgatgccgttttagacgcgatcctcgaacaggatccgaaagcacgcgttgcttgcgaaacctacgtaaaaaccggcatggttttagttggcggcgaaatcaccaccagcgcctgggtagacatcgaagagatcacccgtaacaccgttcgcgaaattggctatgtgcattccgacatgggctttgacgctaactcctgtgcggttctgagcgctatcggcaaacagtctcctgacatcaaccagggcgttgaccgtgccgatccgctggaacagggcgcgggtgaccagggtctgatgtttggctacgcaactaatgaaaccgacgtgctgatgccagcacctatcacctatgcacaccgtctggtacagcgtcaggctgaagtgcgtaaaaacggcactctgccgtggctgcgcccggacgcgaaaagccaggtgacttttcagtatgacgacggcaaaatcgttggtatcgatgctgtcgtgctttccactcagcactctgaagagatcgaccagaaatcgctgcaagaagcggtaatggaagagatcatcaagccaattctgcccgctgaatggctgacttctgccaccaaattcttcatcaacccgaccggtcgtttcgttatcggtggcccaatgggtgactgcggtctgactggtcgtaaaattatcgttgatacctacggcggcatggcgcgtcacggtggcggtgcattctctggtaaagatccatcaaaagtggaccgttccgcagcctacgcagcacgttatgtcgcgaaaaacatcgttgctgctggcctggccgatcgttgtgaaattcaggtttcctacgcaatcggcgtggctgaaccgacctccatcatggtagaaactttcggtactgagaaagtgccttctgaacaactgaccctgctggtacgtgagttcttcgacctgcgcccatacggtctgattcagatgctggatctgctgcacccgatctacaaagaaaccgcagcatacggtcactttggtcgtgaacatttcccgtgggaaaaaaccgacaaagcgcagctgctgcgcgatgctgccggtctgaagtaatctttcttcacctgcgttcaaaggccagcctcgcgctggcctttttcttttggataggcgttcacgccgcatccggcaaaaaaaccgcccgcacaataacatcattcttcctgatcacgtttcaccgcagattatcatcacaactgaaaccgattacaccaaccacaacagacaaagatttgtaatattttcatattattattcggttttcacagttgttacatttcttttcagtaaagtcttaattgcagataacagcgtttaatctatgatgatataactcaattattttcatgcacttaaatcataactaagataaatgttagtgtaagcgattacactgatgtgatttgcttcacatctttttacgtcgtactcacctatcttaattcacaataaaaaataaccatattggagggcatcatgcctgacgctaaaaaacaggggcggtcaaacaaggcaatgacgtttttcgtctgcttccttgccgctctggcgggattactctttggcctggatatcggtgtaattgctggcgcactgccgtttattgcagatgaattccagattacttcgcacacgcaagaatgggtcgtaagctccatgatgttcggtgcggcagtcggtgcggtgggcagcggctggctctcctttaaactcgggcgcaaaaagagcctgatgatcggcgcaattttgtttgttgccggttcgctgttctctgcggctgcgccaaacgttgaagtactgattctttcccgcgttctgctggggctggcggtgggtgtggcctcttataccgcaccactgtacctctctgaaattgcgccggaaaaaattcgcggcagtatgatctctatgtatcagttgatgatcactatcgggatcctcggtgcttatctttctgataccgccttcagctacaccggtgcatggcgctggatgctgggtgtgattatcatcccggcaattttgctgctgattggtgtcttcttcctgccagacagcccacgttggtttgccgccaaacgccgttttgttgatgccgaacgcgtgctgctacgcctgcgtgacaccagcgcggaagcgaaacgcgaactggatgaaatccgtgaaagtttgcaggttaaacagagtggctgggcgctgtttaaagagaatagcaacttccgccgcgcggtgttccttggcgtactgttacaggtaatgcagcaattcaccgggatgaacgtcatcatgtattacgcgccgaaaatcttcgaactggcgggttataccaacaccaccgagcaaatgtgggggacagtgattgtcggcctgaccaacgtacttgccacctttatcgcaatcggccttgttgaccgctggggacgtaaaccaacgctaacgctgggcttcctggtgatggctgctggtatgggcgtactcggtacaatgatgcatatcggtatccactctccgtcggcgcagtatttcgccatcgccatgctgctgatgtttattgtcggttttgccatgagtgccggtccgctgatttgggtactgtgctccgaaattcagccgctgaaaggccgcgattttggcatcacctgctccaccgccaccaactggattgccaacatgatcgttggcgcaacgttcctgaccatgctcaacacgctgggtaacgccaacaccttctgggtgtacgcggctctgaacgtactgtttatcctgctgacattgtggctggtaccggaaaccaaacacgtttcgctggaacatattgaacgtaatctgatgaaaggtcgtaaactgcgcgaaatcggcgctcacgattaatctcctcaggcttcctcccgtcgcggaggaagccgcctcttgcagtcatcttttcttcgctctatcctctgccgctatgaaaacatcccgtctccctatcgccatccaacaggccgttatgcgtcgcctgcgggaaaaactcgcccaggctaacctgaaattggagcgtaactacccggagccaaaactctcttacacccagcgcggcacctccgccggaacagcctggctggaaagctatgaaatccgcctcaatcccgttttgctgttggaaaacagtgaagcctttattaaagaagtggtgccgcacgaactggcacatttgctggtatggaaacatttcgggcgcgtagcaccacatggcaaagagtggaagtggatgatggaaaacgtgctgggtgttcccgcccgtcgtacgcatcagttcgaactgcaatccgtgcgtcgcaacaccttcccctaccgctgcaagtgccaggagcatcagcttaccgtacgccgccataatcgcgtagttcgtggcgaagccgtctatcgctgtgttcactgcggcgaacaactggtcgcaaaataaccatctgaactatcaggaactttcctgatctggctgattgcataccaaaacaactttcgctacgttgctggctcgttttaacacggagtaagtgatgtaccgttatttgtctattgctgcggtggtactgagcgcagcattttccggcccggcgttggccgaaggtatcaatagtttttctcaggcgaaagccgcggcggtaaaagtccacgctgacgcgcccggtacgttttattgcggatgtaaaattaactggcagggcaaaaaaggcgttgttgatctgcaatcgtgcggctatcaggtgcgcaaaaatgaaaaccgcgccagccgcgtagagtgggaacacgtcgttcccgcctggcaattcggtcaccagcgccagtgctggcaggacggtggacgtaaaaactgcgctaaagatccggtctatcgcaagatggaaagcgatatgcataacctgcagccgtcagtcggtgaggtgaatggcgatcgcggcaactttatgtacagccagtggaatggcggcgaaggccagtacggtcaatgcgccatgaaggtcgatttcaaagaaaaagctgccgaaccaccagcgcgtgcacgcggtgccattgcgcgcacctacttctatatgcgcgaccaatacaacctgacactctctcgccagcaaacgcagctgttcaacgcatggaacaagatgtatccggttaccgactgggagtgcgagcgcgatgaacgcatcgcgaaggtgcagggcaatcataacccgtatgtgcaacgcgcttgccaggcgcgaaagagctaacctacactagcgggattctttttgttaacccctaccccacgcgtacaaccgcgtggggagacgacgcggatttttaactatgcgtatcccccgcatttatcatcctgaaccactgaccagccattctcacatcgcgctttgcgaagatgccgccaaccatatcgggcgcgtactgcgcatggggccggggcaggcgttgcaattgtttgacggtagcaaccaggtctttgacgccgaaattaccagcgccagcaaaaaaagcgtggaagtgaaggtgctggaaggccagctcgacgatcgcgaatctccgctgcatattcacctcggtcaggtgatgtcgcgtggtgaaaaaatggaatttacgatccagaaatcgatcgaactcggtgtaagcctcattacgccacttttttctgagcgctgcggcgttaaactggatagtgaacgtctgaacaagaagctccagcagtggcagaagattgcaattgctgcctgtgagcagtgtggtcgtaaccgggtgccggaaatccgtccagcgatggatctggaagcctggtgtgcagagcaggatgaaggactgaaactgaatcttcacccgcgcgccagtaacagcatcaatacgttgccgttaccggttgaacgcgtccgcctgctgattggcccggaaggcggtttatcggcagatgaaattgccatgactgcccgctatcaatttactgatatcctgttgggacctcgcgttttgcgtacagagacaactgcgctcaccgccattaccgcgctacaagtacgatttggcgatttgggctaacggagaagaataatgatcaagctcggcatcgtgatggaccccatcgcaaacatcaacatcaagaaagattccagtttcgctatgttgctggaagcacagcgtcgtggttacgaacttcactatatggagatgggcgatctgtatctgatcaatggcgaagcccgcgcccatacccgcacgctgaacgtgaagcagaactacgaagagtggttttcgttcgtcggtgaacaggatctgccgctggccgatctcgatgtgatcctgatgcgtaaagacccgccgtttgataccgagtttatctacgcgacctatattctggaacgtgccgaagagaaagggacgctgatcgttaacaagccgcagagcctgcgcgactgtaacgagaaactgtttaccgcctggttctctgacttaacgccagaaacgctggttacgcgcaataaagcgcagctaaaagcgttctgggagaaacacagcgacatcattcttaagccgctggacggtatgggcggcgcgtcgattttccgcgtgaaagaaggcgatccaaacctcggcgtgattgccgaaaccctgactgagcatggcactcgctactgcatggcgcaaaattacctgccagccattaaagatggcgacaaacgcgtgctggtggtggatggcgagccggtaccgtactgcctggcgcgtattccgcaggggggcgaaacccgtggcaatctggctgccggtggtcgcggtgaacctcgtccgctgacggaaagtgactggaaaatcgcccgtcagatcgggccgacgctgaaagaaaaagggctgatttttgttggtctggatatcatcggcgaccgtctgactgaaattaacgtcaccagcccaacctgtattcgtgagattgaagcagagtttccggtgtcgatcaccggaatgttaatggatgccatcgaagcacgtttacagcagcagtaacccaccttagcgagaaggatctcgttgagactctgagtgacagcgcccttctttccacgcatactgggcgctgttgcttttttgaaccaggaaacagaacctctgacaatgaatttacagcatcactttcttattgccatgcctgctctccaggatccgattttccgtcgttccgtggtctacatttgcgaacataataccaatggtgcaatggggatcatcgtcaacaagccgctggaaaatctcaaaattgaagggattctggaaaagctgaagatcacgccggagccgcgtgatgaatcaatccgtctggataaatcggttatgctcggcggcccactggctgaagatcgcgggtttattttgcatactccgccctccaattttgcttccagcattcgcatttcagacaacacggtgatgaccacttcccgcgatgtgctggaaacgctcggcaccgataaacaaccgtctgacgtattggtggctctgggctatgcctcctgggagaaaggtcaactggaacaagaaattctcgataacgcgtggctaaccgccccggcagatctgaatattctgttcaaaacgccgattgccgaccgctggcgcgaggcggcaaaactgattggtgtggatattctcaccatgcctggtgtggcagggcacgcctgatgagtggaaccttactcgccttcgacttcggcaccaaaagcattggcgtagcggtcggccaacgcattaccggcaccgctcgccctttgcctgcaattaaagcacaggacggtacgccggactggaacattatcgagcgtttactgaaagagtggcagccggacgaaatcatcgtcggtttgccgctgaatatggacggcaccgagcaaccattgactgccagagcgcgtaaatttgccaaccgtattcatggccgtttcggtgttgaagtaaagctccatgacgagcgtcttagcactgtggaagcccgttccggtctgtttgaacagggcggctatcgggcgctcaacaaaggcaaagttgactctgcctctgcggttattattctcgaaagctatttcgagcagggatattaaggcgatttaaacgcctggcggagtgtaaataatatcatcgcgtcttattgccggatgcggcgtgaacaccttatccagcacacatctggcagcggctataggtctgataagacgcgttagcgtcgcatcagacatttattgcctttgtaggcccgataagcttgcgcatcgggcatggcaacgtcacaaacgcccttcccccacccggtgctgataactctgctgaaacgttatcatccccacctgctgcccggtttgaataacatgcggtaactggtgggttttcccttcgcgaatcaaattccccaccgcgggtgtgttaatcagcaattcaaatagcgccacgcgtccttcctgtttatccacttccagcttttgtgacaacacggcccgtaaactccctgccagttgattacgtacgggatctttttcctgcgccggaaatgaatccaccagtcgctcaactgactgcgcggcaccacgcgtatgtaatgttgccagcaccaaatgcccggtttctgccgccgtcagtgccagacggattgtctcgctgtcacgcagctctccgagcaaaatcacatcaggatcttcccgcaatgcggcccgcaatcccgatgcgaacgtcatacagtgcaaaccaatttcccgctgctggatcaaacatcgctggctggcatagagatattcaacaggatcttccagcgtcagaatatgcgcatcggcatgttgattgagatagccaaccatcgccgccagcgtggtagatttgccgctccccgtcgcccccgtcaccagaatcaggccattctcgctcttgagtaattccggcaataccgttggtgcgccaagctgttcgagctgcgggcagtgcgaaggtaacagccgtaacgccagcgaaatgccatgccgttgcgcgaatgcgctgccacgcaatcgctggttttccgccagcgacacggcaaaatccagctggccattttccagcaatattgcccgctgatcgtcatccagccactcccgcagtagctcttcgacgtccggcgcatcaaacggcgcagcttccattagcccgcgaatgcgccatcgtgcgggccaggcgctgcacaggtgtagatccgagacgttatgctttacactaagggccacaatttcttccatattcatactaagatcctcggaaaatgaacgatattgcgcataacctggcacaggtccgggacaaaatctcagcggctgcaacgcgttgcggccgttctccagaagaaattacgctgcttgcagtcagtaaaacaaaacctgcgagcgccatcgcagaagccattgatgccgggcagcgtcaatttggtgaaaactacgttcaggaaggggtagataaaattcgccactttcaggaactgggcgtaacaggattagaatggcattttattggcccgttgcagtctaataaaagccgcctggtggcagagcatttcgactggtgtcataccatcgaccgtttgcgcatcgctacccgtctcaacgaccagcgcccggcagaacttccccctcttaacgttctgattcaaattaacattagtgatgaaaacagtaagtccgggattcaactggctgaactggacgagctggcagctgcggtcgctgaactaccgcgtttacgtctgcgcgggttgatggcaatccctgcgcctgagtcagaatatgtaaggcagtttgaagttgcacgccaaatggctgtagcatttgccggactgaaaacgcgctacccgcatatcgacacgctctctctgggaatgtcggacgatatggaagccgccattgcggcaggtagcacgatggttcgtatcggcactgcaatttttggtgcgcgtgattactctaaaaaataaggaattaaaggaacgccatgaatacgttgactttcctgctttcaacggtcattgagctgtataccatggtgctgttattacgcatctggatgcagtgggctcattgtgatttttacaaccccttctcacagtttgtagtgaaggtaacgcagccaattatcgggccactgcgccgcgttattccggcaatggggccaattgacagcgcctcgctgctggttgcctatattctcagttttatcaaagccatcgtgctgtttaaagtggtgaccttcctgccaatcatctggattgccggtttactgattctgctgaaaaccatcggcctactgattttctgggtcctgctggtgatggcgattatgagctgggtaagccaggggcgtagcccgattgaatacgtgctgattcagctggccgatccgctgctgcgcccgattcgccgcctgctaccggcaatgggtgggattgatttctcgccgatgatcctcgttctgctgctgtatgtcatcaatatgggtgtcgcagaagtattacaggcaaccggaaatatgctgctgccagggctgtggatggcgttatgaatgccgtaacagttaatgatgacggtctggttttacggctctatattcagccgaaagccagccgtgattctattgtcggtttacatggcgacgaagttaaagtcgccattaccgcgccgccggttgacggccaggccaacagccatctggtgaagtttctcggtaagcaattccgggtagccaaaagccaggtggtaattgaaaaaggcgaacttggccgccacaaacaaattaaaatcattaatccgcaacaaatcccgccagaaatcgcggcgttaattaattaggtatcctatgcaaaaagttgtcctcgcaaccggcaatgccggtaaagtgcgtgagctggcgtcgctgcttagcgacttcggtcttgatatcgtggcccaaacagacctcggcgtagattccgctgaagaaaccggcctgacctttatcgaaaacgcgattctgaaagcgcgccatgcggcaaaagtgaccggtttaccggcaattgccgacgactctggtctggcggtagatgcgctgggtggcgcgccgggtatttactccgcgcgttattccggtgaagacgcgaccgatcaaaagaatctgcaaaaactgttggaaacactgaaagacgtaccggacgaccaacgtcaggcgcgtttccactgcgtgctggtatatctgcgtcacgcggaagatccgactccgctggtgtgccacggtagctggccgggcgtgattactcgtgaaccagcgggcactggtggctttggttatgatccaatcttcttcgtaccttccgaagggaaaaccgctgccgaactgacccgcgaagaaaagagcgccatttcccaccgtggtcaggcattgaaactgctgttggacgctttacgtaatggttaaattaccgccgctgagtctctacattcacatcccgtggtgcgtgcagaaatgcccgtactgcgatttcaactctcacgcgttgaaaggagaagtgccgcacgacgattacgttcagcatctgctttgcgatctggacaatgatgtggcttacgctcagggccgtgaagtaaagacaatctttattggcggtggtacgccgagcctgctttccggcccggcgatgcaaacgctgctggacggcgtgcgtgcgcgtttgccgctggcagcggatgcagaaattactatggaagcgaaccctggtacggtagaagccgatcgctttgtcgattatcagcgtgctggtgtgaaccgcatctctattggtgtgcagagttttagcgaagaaaagctgaaacgacttgggcgcattcatggcccgcaagaagcgaaacgagcggcaaagctggcgagcggtttagggttacgtagctttaaccttgatttgatgcatggactaccggatcaatcactggaagaggcgcttggcgatctacgccaggccattgaactgaatccgccgcatctttcctggtatcaactgaccatcgaacccaatacgctgtttggttcgcgaccaccggtgctgccggacgacgacgcgctgtgggatatattcgaacaggggcatcagttattaaccgcagcgggttatcagcaatatgaaacttccgcttacgccaaacccagttatcagtgccagcacaatctcaactactggcgctttggcgactacatcggtattggctgcggcgcgcacggcaaagtgaccttcccggatgggcgcattctgcgtaccactaaaacgcgtcatccgcgtggttttatgcaaggaaggtatctggaaagccagcgtgatgtcgaagccgcagataagccgtttgagttctttatgaaccgctttcgcttgctggaggccgcgccacgcgcagagtttagtgcgtataccgggctttgcgaagatgtgattcgcccacagttagacgaggcgattgcccagggttatctcaccgaatgtgcggattactggcagataacggaacatgggaagctgtttttaaattcgctgctggagctttttctggctgagtaaacttgtattgccggatgcggcgtgaacgccttatccagccgacatgtggcagcggttgtaggtctgataagacgcgcaagcgtcgcatcagacgttgattgccagatgcggggtcaacgccgcatcctgctacaaatcgtgcactatatcaaacttacttaatcaccccattgcgccgcagttgttcggtatcttttttccagcgttcattagcttggttgatatcgtcaattttcatcaaaatcgcgacttttttactgtttatttctgaaactttcatcgttaacggatattgccctttttcgagcgttacccagtcatcctgcaatttacggctgagtttttgtgattgcagaaaagtctgtcgccgttgttcgttgatatcgaaatctcgtttctgctgaatcggcacttcataacactcttcactctgtttatgacatgccgcaatcgccggttgataaacctctttgtcatatttaaccgcgaacgcctcgctatcgttctgtttattaaactcatcacgctgttggtgaatttttttaaaggcttcttcgcgggtcatttgcttaccgtttgcatcttttccccaatatgcatccgctgctttctgcgccgccaccatttgcttatcaagcgctttcacttccttttccagcgcaggaatcgagttcttctgggtattcaacgcagattcaagctgactaaagcgataattgaaatcttcgctattcacgatcagatatttattattcgttttgatatcgtcgaccacccgcccacgatcgctggctgccgcctgaaaagagtaaaagttcaccgaccagccagacgcgggcgttcctttactggttaacatcgccgagaattttaccggtttatctttcgtccaggtctgttcgagcagttcgtaatctgccaactgaccgacccaggtatagagatcgtcactggaagagacatagccttccgctgaccaggtggcctgattacccttagcatcaagattttttaaggtgatagcatcaagcttgagaatgccgtgatactgctttttgaattgatcttttaagatattttcagttggcggttcgccatctgcccagacattaccagtcatcaacataagcagcgccgtgccaacaatccattgctttttcacccgaataccctcgcgcggaataatttattccggtgattatcattagggtaattaaaattggcaatggacgtgagtctgaagtgaaaaagccccggcacgataccggggcgaggcgattagtactgattgaagatctgctggatctgctgcggatctttggtttgcgtcagagccagctgcagcaggacgcgcgctttttgcgggttcagcgtgccagaggcgacgaagccgtatttcgcatcatccacttcagcatcctgagtggtagcacccgtcggtacgcgggaagaacgcacgactgcagtgccgtttttcgcggcggttgccagggtgtcgaacacggatttatacaggttaccattacccacaccagcgctaacgatgccatcatagcccgcatctaccagtgctttagccggaagatcggatgcgttagcgtagttataaacgatgccgactttcggcagctcattcagcttagagacatcgaacggcgtgtcgctggtgtgcttacgtgccggggtacgttggtagtcaatcttaccgttgtgaatgtaacccagaggaccgtagttaacagacttgaaggtcgctacgtcggtggtgttggttttggtgacatcgcgaccgtccagtacggtgtcattcattaccaccagcacgccacgattagcggaggctttatcagctgcggtcactaccgcgttatacaggttgaatggaccgtctgcgctcatggacgtggacgggcgcattgcgccgaccatcaccaccggtttgtcgcatttcaccgtcaggtcgaggaagtaagcagtttcttccatcgtgtcggtaccgtgggtaatgacgaagccgtcggttttatcgcagtcggtgttaatttttttcgccagtgtcagccagacattatcgttcatgtcctgggagccgatattcactacctgctcgcctttaacgttcgcaatgtccttcagttgcggcaccgcattaaccagattttctacgccaactttacccgctgtgtagttagatttggttgcggagtcaccaccaccggcaatggtcccgccggttgctaaaatggtgatattgggtaatgccaatgctgcaccactaaaacccataaccagtgcggcaagtgccgtctttttgaaaaactccatttcattcctccagttacgtgaacgctacgcattatcccttagctttgtatgggaaatttgacgttaaacaatttacaacgtgaatatattttggagatctacaaagttagaggcaggtaacaaaacgaagaattaaacggcataaaaaagtattatgccgtcttaaaatagaggattattttaaattcccgaccagggctttgcggctatcttccagagtcacaacgcggctacaaacatctttgccaaactgctggaaatctttttcctgctttttccactcggtttggattgaggattgcagaccgcccaggcttcccagcacattctgtaatgggttaccgccgcttttcagcaccgctttcgcgcccatttcattaatgctgtcctgtaaaattccgcccattgcctgattcactaattgctggccttcggcgcgaacctgatcaatggctttatagtgaaacgtcaggccatcgctgcgcgtttcgataatgcggttcatctgctctttcagctgcgcatcaagtttggtcagacggctgcgcattttgctgctttcgcccatctcctgaacgataattttatccagagcaatacgggctttctcgacgcggcttttcgcgccttcatcaatccacggcagcgtgctacgtagttcagcctgataatccttcgcctgctcgcgctgggcggcattcagggaatattgcttaccgttatacatcacgttgccgtctggcgtgatcaccagattgccgttttcgcccttcacctgcacggtttgcgggctgacaatcacatcgtcacgcggcgtgacgctgcactggtagtcggcgtgagcggtcattgccgtcactgaaagtgctgccgccagcagcattttgcgcatcatagtcttccctcaagaaaaaatcaggccagcatttgctggccccagattgataacaaagtacgcgttttccatgccggatgcggcgtaaacaccttatcccgcctactcgatcgtgcatctttccaggcctgataagcgtagcgcatcaggcagttttgcatttgtcatcgcccgtatgctttcttagtcccaccaaacgtcgaaaagttcgctggtgcgtacctcatccagtttgcgctcttccagccacttacgcacaatcgcctgatgttcttcggtgcatttgccgatttcctgcatgcagatcagaccttcccaggccagataaccgctgccgtcaaaggccagtttgttcggttcgataacctcgttaataaaatcatcaacggttttatcaatctgttcttccgatgtaccttccgggaatcgccatgccaccgaaaatcctaattcctggaattcgtcgatgtgcatttttttacgcagacgacggctacggttctttgccattatttcaccctctcgaacattaagtcccatactccgtgaccaagacgatgaccacgttgttcaaatttcgtcaccggacgtgatgccggacgcggtacgtaatcattgctctctgacaggtttttataaccgtcaatagaagacatcacttcaagcatatgttccgcataaggttcccagtcggtcgccatatggaatacgccccccagctgcagtttgctttttaccagttcggcaaacggcacctgaacgatacggcgtttattatggcgcgctttgtgccacgggtcagggaaaaagagctgcaccatgcgcaatgaattgtcaggaatcattttatgcagcacttctaccgcatcgtgacacatcacgcgcaggttgcttaaaccttcttcatgcgcagaagccaggcacgcaccaacgcccggtgaatgcacttcaatgccgaggaagtcctgctcagggcgatctttagccattgccaccagcgacgcccccatgccaaaaccaatctcaagcgtcaccggcgcttcacggccaaaaagcgcggggaaatccagcatatcttcgctgaactcaacgcccatcaccggccagtagttttccagcgcatgttcctggcctttggtcagtcgcccctggcggcgcacaaaactacggatacggcgcagtgggcggccgttttcatcaaattccggtgaaatgacgtcgtttttcataaaggtttagtcgcttgtgaaagtgttctgaaaacgggcattatccaaagttagttgccggatgcaagcatgataaggccgtggctgcggaaagttccggtttacaccctgccgtcgctgtgctgcaatcttgcccccaacaacagtgaattcggtgaccatgcaagcgtcgcaattttcagcccaggttctggactggtacgataaatacgggcgaaaaactctgccctggcaaattgacaagacgccctacaaagtatggctctcagaagtgatgttgcaacaaactcaggttgcgaccgttatcccctattttgaacgctttatggcgcgcttcccgacggtgaccgatctcgccaatgcgccgctcgacgaagttctccacttgtggaccgggcttggctattacgcccgcgcgcgcaatctgcataaagcggcacaacaagtggcgaccttacacggcggtaaattcccggaaacctttgaggaagttgcagcactgccgggcgtcgggcgttccaccgcaggcgcgattctctcgctttctctgggtaagcactttccgattctcgacggtaacgtcaaacgggtgctggcgcgctgctatgctgtaagcggctggccagggaaaaaagaggtcgagaataaattatggagtttgagcgagcaggtgacgcccgcggttggcgtggaacggtttaatcaggcgatgatggatttgggtgcgatgatttgtacgcgctcgaaaccgaaatgttcgctctgtccgctacaaaacggatgtattgccgccgccaacaatagctgggcgctttatccgggcaaaaaaccgaaacagacgctgccggagcgcaccggctactttttgctattacagcacgaagatgaagtattgctggcgcagcgtccgccgagcggattgtggggcggtttatactgtttcccgcagtttgccgacgaagaaagtttgcggcagtggctggcgcaacggcagattgctgccgataacctgacgcaactgaccgcgtttcggcataccttcagccatttccacttagatattgtgcctatgtggcttcccgtgtcgtcattcaccggctgcatggatgaaggcaatgcgctctggtataacttagcgcaaccgccgtcagttggcctggcggctcccgtggagcgtttgttacagcagttacgcactggcgcgccggtttagcgcgtgagtcgataaagaggatgatttatgagcagaacgattttttgtactttcctgcaacgtgaagcagaaggtcaggattttcagctgtaccccggcgagctgggaaaacgcatctataacgagatctccaaagaagcctgggcgcagtggcagcacaagcaaaccatgctgattaatgaaaagaaactcaacatgatgaatgccgagcaccgcaagctgcttgagcaggagatggtcaacttcctgttcgagggtaaagaggtgcatatcgagggctatacgccggaagataaaaaataaaaacagtgccggagcacgcctccggcaacttgcataaaaacaaacacaacacgcacccggaatgatgaaaaaatatctcgcgctggctttgattgcgccgttgctcatctcctgttcgacgaccaaaaaaggcgatatctataacgaagcctgggtcaaagataccaacggttttgatattctgatggggcaatttgcccacaatattgagaacatctggggcttcaaagaggtggtgatcgctggtcctaaggactacgtgaaatacaccgatcaatatcagacccgcagccacatcaacttcgatgacggtacgattactatcgaaaccatcgccgggacagaacctgccgcgcatttgcgccgggcaattatcaaaacgttattgatgggtgacgatccgagttcggtcgatctctattccgacgttgatgatattacgatttcgaaagaacctttcctttacggtcaggtggtggacaacaccgggcagccgattcgctgggaaggtcgcgcaagcaacttcgcggattatctgctgaaaaaccgtctgaagagccgcagcaacgggctgcgtatcatctacagcgtcaccattaacatggtgccgaaccaccttgataaacgtgcgcacaaatatctcggcatggtccgccaggcgtcacggaaatatggcgttgatgagtcgctgattctggcaattatgcagaccgaatcttcctttaacccgtatgcggtcagccgttccgatgcgctgggattaatgcaggtggtacaacatactgccgggaaagatgtgttccgctcgcaggggaaatccggcacgccgagccgcagtttcttgtttgatcctgccagcaatattgataccggcaccgcgtatctggcgatgctgaacaatgtttatctcggcggaattgataacccaacatcgcggcgttatgccgtcatcaccgcctataacggcggcgcaggcagcgtgctgcgagtcttttcgaatgataagattcaggctgccaatattattaacaccatgacgccgggcgatgtttatcagacgctgacgacccgccatccctctgcggaatctcgccgttatctttataaagtgaataccgcgcaaaaatcctaccgccgccgataattccattaaccgcccctgacgatgctcaggggcaaaaatgttatccacatcacaatttcgttttgcaaattgggaatgtttgcaattatttgccacaggtaacaaaaaaccagtccgcgaagttgatagaatcccatcatctcgcacggtcaaatgtgctttttcaaacactcatccgcatcacgatgtgaggaaattaacatgaatcttaagctgcagctgaaaatcctctcttttctgcagttctgtctgtggggaagttggctgacgaccctcggttcctatatgtttgttaccctgaagtttgacggtgcttctattggcgcagtttatagctcactgggtatcgccgcggtctttatgcctgcgctgctggggattgtggccgacaaatggttaagtgcgaaatgggtatatgccatttgccacaccattggcgctatcacgctgttcatggcggcacaggtcacgacgccggaggcgatgttccttgtgatattgattaactcgtttgcttatatgccaacgcttgggttaatcaacaccatctcttactatcgcctgcaaaatgccgggatggatatcgttactgacttcccgccaatccgtatctggggcaccatcggctttatcatggcaatgtgggtggtgagcctgtctggcttcgaattaagccacatgcagctgtatattggcgcagcactttccgccattctggttctgtttaccctgactctgccgcatattccggttgctaaacagcaagcgaatcagagctggacaaccctgctgggcctcgatgcattcgcgctgtttaaaaacaagcgtatggcaatcttctttatcttctcaatgctgctgggcgcggaactgcagattaccaacatgttcggtaataccttcctgcacagcttcgacaaagatccgatgtttgccagcagctttattgtgcagcatgcgtcaatcatcatgtcgatttcgcagatctctgaaaccctgttcattctgaccatcccgttcttcttaagccgctacggtattaagaacgtaatgatgatcagtattgtggcgtggatcctgcgttttgcgctgtttgcttacggcgacccgactccgttcggtactgtactgctggtactgtcgatgatcgtttacggttgcgcattcgacttcttcaacatctctggttcggtgtttgtcgaaaaagaagttagcccggcaattcgcgccagtgcacaagggatgttcctgatgatgactaacggcttcggctgtatcctcggcggcatcgtgagcggtagagttgttgagatgttcacccaaaacggcattaccgactggcagaccgtatggttgattttcgctggttactccgtggttctggccttcgcgttcatggcgatgttcaaatataaacacgttcgtgtcccgacaggcacacagacggttagccactaattacgcaaagaaaaacgggtcgccagaaggtgacccgttttttttattcttacttcaacacataaccgtacaaccgtttcatgccatccgcatcggtttcgctataaacaccttgcagctccggcgaaaatcccggcaacaaattcaccccttcttccagtgcaaggaaataacgttgaaccgccccaccccagacttccccgggtaccacgcaaagcacgccaggtggataaggcaacgccccttctgccgcaattcgcccttcggcatcacgaatccgcaccaactccacgtcaccgcgaatataagcgctatgcgcatcctgggggttcatcaccactgacgggaaactctgctggcggaacatcgctttttgtaggtctttgacgtcgaaactgacatacagatcgtgcatctcctgacacaactggcgcagggtgtagtcgcgatagcgcaccggatacttgttataaacgctcggcaacacctcaaccagcggcgagtcatcctcaatatgctgttcaaattgcgccagcatcgccaccagttgtgccagcttctcgtggctttccgccggagttaataaaaacagaatggagttgagatcgcacttctccggcacaatgccgttctcacgcagatagtgcgccagaatcgtcgccggaacgccaaagtcgctatattcgccggtttcggcatcgatacctggtgtagtgagtaacagcttgcacggatcaacaaaatactgatccgcggcatatccttcaaagccgtgccacttcgcccccggctcaaaactgaaaaaacggcggtcgctggctaacactgatgtcggataatcctgccacaatttgccatcaacaacgggcgggataaacgggcggaacagcttacagcgcgcaagaatagccttgcgcgcttcaatccctatctcaacacactcagcccacagccgacgcccactctccccttcatgaattttggcgttaacatccagtgcagcaaacagcggatagaaagggctggtagaagcatggagcataaaggcgttattcaaccgcttatgcgggcaaaaacgcgcctgtccgcggatatggttatcttttttatggatctgcgacgtctgtgagaatcccgcctgctgtttgtgcaccgactgagtcacaaagatccccggatcgttttcgttaagttctaacagcagcggcgagctatccgccatcatcgggataaattgttcataaccgacccacgcggaatcaaacagaatgtaatcacacagatgcccaacggtatcgatcacctgacgggcgttatagacagtgccgtcataggttcccagctgaataatcgccaggcgatacgggcgcggcaggtcggctttttctggcgcaacgtcgcgaatttgctggcgcagatactcttcattaaaacagtgcgcatcaataccgccaatgaaaccaaacgggttgcgtgaagcttccagatagaccggcgtcgcccccgcctgaatcagcgcgccgtgatgattcgacttatggttgttacggtcgaagagcaccagatcgccacgcgttaacagcgcattcgtcaccactttattcgctgccgatgtgccgttcagcacaaaataggttttatcggcatgaaagactttggctgcgaatttctgcgcatctttcgccgatccttcatgaataagcagatcgcccaattttacgtcagcgttacacatatcggcgcgaaagacgttctcaccaaagaaatcgtaaaaatggcgtccggcaggatgctttttaaaaaacgcaccatgttgatgtccagggcaagcaaaggtgctgttgcccatctcaacgtactgcgtcagcgtgtcataaaacggtggcagcaaattctcttcatactgacaggctgcggattccagctccagccactgctgctcgttgccgttgattaccgccgtaacgcccgcaggtaattcaacagcatgttcggaatacaaaaacaccggtagatgaaaaccggtgcgcttaagcaacgcaagaatgccactgcgactatccgcagcggtaatgacgactgccgcgacgtccgtaaaatcagtatctcccaacgccaccacgcgacgatgagaagaaagtcgggataccagttcactactggcggcaatattcattgatttcataagcgcaaacccgtttcggggaagtaagaataccggacaaggtggaaaaccctgccccatgagatatgggtcaaactggtcaccagctccgaccgccagacatcagtaaaagcagaaacgctctgattttactgttgtcctgcagtgagcgtgcgttaacttcaccgcatgagcagtaacatagaaagggaaacgtttcgcgcgaaacggcgataagcgagagaatgtaaggagatggcgtgcatcgggcaaactccgtacagagaggagaaaattcgcgcaatcatggcacctttcgctaaagcgtgcaagccaggactttgcgaacaaacaagccatcgacggcaccaaacggtcataataagaaaatcaaacaatacagttaacaggaactcttgtggtcatcggcccttttatcaacgctagtgcagtattactgggtggcgttctcggcgcactgctcagccaacgcttaccggaacgtatccgcgtctccatgacatctatttttggtctggcatcgctggggattggtattttactagtggtgaaatgtgccaaccttccagcgatggttttagctacgctacttggcgctctaattggcgaaatttgtttgctggagaaaggtgtcaatacagcagtcgccaaagcacaaaatctgtttcgtcactcacgtaagaagccagcgcatgaatcttttattcagaattatgtcgcgattattgtcctgttttgcgccagcggcaccgggatcttcggggcgatgaacgaagggatgaccggcgatccgagtattttaatcgccaagtcatttcttgatttctttacggcgatgatcttcgcctgctcgctgggtattgcggtatcggtgattagtatcccattactgatcatccagttaacgctggcgtgggctgccgcgctgattttaccgctgaccacaccgtcgatgatggcagacttcagcgccgtaggcggtttattgctgctggcaaccggattacgcatctgtggcattaaaatgttcccggtggtcaacatgcttccagcactccttctggcaatgccgctttccgccgcctggaccgcctggtttgcctgacaatgcgtgcaatatcggcaaagtgatgatagattgtgcagtctgcagtaaattgaagaaatttgattgacgagacgaggcgaatcaggtttaatgcgccccgttgcccggatagctcagtcggtagagcaggggattgaaaatccccgtgtccttggttcgattccgagtccgggcaccaaattcatatcaacggacctccacggaggtccgtttttcattccaggacgccacgatttaagcgtcctgcctccaaatcaattctaccgaactcaaccagattccccccacatcaacctcattgtgtgggtataattgtgggcataccccagttcgacagaatttgtaccctctttaacgcattcagaaggctgaactatggcactgactgacgcaaaaatccgggcagcaaagcctactgacaaggcttataaactcactgacggggctggcatgttcctgctggtacatcctaatggttcccgttactggcgtctccgttatcgtattctgggtaaggagaagactctggcacttggtgtgtatccagaagtttctctctccgaagctcgtacaaaacgggatgaggcccgaaaactgatttcagaggggattgacccttgcgaacagaaaagagttaaaaaagtagtccctgatttacagctctcttttgaacatattgcacgacgctggcatgccagtaataaacaatgggcacaatcacacagcgataaagtactcaaaagcctcgagacacacgttttcccctttatcggcaaccgggatatcacaacactcaataccccggacctgcttatccctgttcgtgctgcagaagcaaaacaaatttatgaaatcgctagtcgtctgcagcaaagaatatctgctgtaatgcgttacgccgtacagtctggcatcatcagatataacccggctctggatatggctggtgcattgaccacggtaaaacgccagcatcgccccgctctgaatctttcacgcctgcctgaacttctgtcgcgtattgacggttataaaggccagcctgtcacccggcttgccgttatgctgaatttactggtttttattcgttccagtgaactcagatatgcccgctggtctgaaattgatattgacaatgccatgtggactattccagccgaacgcgaacctctgcctggcgtaaaattctcacaccggggctccaagatgcggacaccacatcttgtgccactcagtaaacaggctgtagccatactgacagaacttcagacatgggcaggtgaaaatggtctgatatttacgggtgcacatgacccgcgtaaaccaatcagtgaaaatactgtaaataaagccctgagggtgatggggtatgacacaacccaggaagtctgtggccatggattccgggcgatggcgtgcagtgcattgattgaatcaggtttgtggtcccgcgatgctgtggaacgtcagatgagccatcaggaacgtaacggtgtacgtgctgcttacattcataaagcagaacatctggaagaacggcgactgatgctacagtggtgggccgattttctggatgcaaacagagaaaaatttatcagtccatttgaatatgcaaagattaataacccattaaaataataaaatccgggcaatagcccggattttattttcaatatatttttctttaaactctataataaattgtggcacaaatttctctaaatagctataacgaatactgctacatatccgataacatcagtgattatcttcttcctgattgcaaaagaatctgcctctaacccatatattttatcttacacagcatccttaacaaaagctgttatgatataatttaccataaatataatctcattttgtctaagctagtatccaggatatttgggaggagactttggataccaggacaggaaaagactagcaaatgttgagcattctctgtaagtgatgaagataaataaaattttgggaacaggtgatggctgattttactggtgaaatgcatagactcatttctgaatatttgcagtgtaagcgacgtaaagatcaatctgttgagccccccctttatattatctctggagcagggaggctgtggctaacgataccactccttatcttatggtgctgctacttaataacgatgtctggtgtaagagtcgtgaggtggtggttctcagaaatctgattgagcaggcgtggggaaaagtattggatgaagataactccattacacatctggttgtgtatcctgaagtgctgacgttggtatttgatgcagctaacacatacaacgctgagcctggtgtactggaacagacggcccgggcttacattgaaatcacatggtgccattgaacgtcatcttgggtgtagtgacttttaacgtcaggtgatgcataagggtctttcgcggagaggccctgtttacacaattaaataagtcgagtcctctaggctgggctgtgtgcacgcccccccgttcagcccgaccgctgcgccttatccggtaactatcgtcttgagtccaacccggtaagacacgacttaacgccactggcagcagccattggtaactggatagtggatttagatacgcagaactcttgaagttgaagccttatagcggctacactggaaggacagcatttggtatctgtgctccatcaagccagttaccacagtcgattagaagaggtcgaagacttctaatcggacggaaaaagccgccgcaaggcggctttttccgtttacaagccgaagattacgcgcagcttaaaaggatctcaagaagatcattttaattttgctgatcgttgcgccctaccagtgaccatacggatagggcttttccttgataaaatcgcggataaatggatcgtaaccgttagccttgatgtaactgaaatcaatcttgttgggaacatttttgcatatcagcatatcatctcccgtcagggtgaactgtcgggcaggattctggagtacaacaggattacgattgtcttttaaccataccctgactttaccaccggggggcaggccaataatcattttgtttcggtaatatatttttcccggacgataagtatcaggataggcagtcagcatctgctgccacgtatcccggctgaaccagatctccgtctcatacgcctttttatcgataactgagtcccagcataccgtcatcctgacaggcagcgccttgccaatattaaaactggctaaaaaaccgcctacgtgctggctccattttcccacactgctctgactgggttcagtcggatccagtcgccggaaaaagctctcccggatatccccgtcctcctcacaatcttatccgtaaccggctttttgcattaaaaaaaacaacgctgaaaattcagccgtcagtccggagacgacagtcgggttatcacagagtgcctgagatattgcccggttggggataacttcagggactctccgcattttttacggcgtggttattccgtatgaacgaaaccatacggagatttaaccatgacctacaaatacaaccccttctggcaacaacgtatccgtgagacggtgctgcgcgcactggatgttcatccccgcctgacggcattgcgggttgacctgcgtctcccggatgtaccgtcagcaacggacgcggctgtgatatcccgcttcatcaatgccctgaaagcccgaatcaacgcttaccagaagcgtaagcgccgtgaaggtaaacgcgtacatcccacgaccctgcattacgcctgggcccgggagttcggggtactcaggggcaaaaaacactatcacctcctgctgctggtcaaccgggatacctggtgtcgtgccggcgattaccgcgatccggggtcactggccggaatgattgaacaggcctggtgcagtgccctgggggtggatgccggatgctatgccacgctggtgcattttccggtcaggccggcggtgtggctggaacgcgatgatgacactggctttcagcaggtgctggaacgtgctgactatctggcgaaggaacataccaaagctcacgccactggtgagcgcaactttggctgcagtcgtagctgagcccgacagacgagttatctgacctcagtgtgatgacgcgctcacgaccaccacactgattttcccttctgagaccgaactgaaaccgccattcacaccagaccaggctgcccgtaccgggacggctgttgcctgcgtgtcgtctggcgctaaggaacatatactatgtacgcaaaatcttttctcgcacttgatggcagcggacgtctgaccggtgcccgtaccgcacagactgcaccttatgatcgctacacctgccacctttgcggcagtgcactcagataccacccgcaatacgacactgaacgtccctggtttgaacacactgacgacgggctgactgagcacggtcatgagtgcccttatgtcagaccggaacgcagggaggtacgcttgattaaacgtctgcagcaattcgtaccggatgccttacccgtggtgcgtaaagccagctggcactgcagacaatgtcaccacgattattatggggagcggtactgcacacactgccagaccggataattcagtattccccggacagctcaggagaaaatatgcggattctgaactgttatatggcgaatgacagcaaaggccattttgtcacggcgaaagaagctgcgaagcacaaccgactggacgttttgtgctgtgtgtcctgtggttgtccgttaacacttaatcggggcaatgacggacaaccaccgtggtttgaacatgaccagatgactgtcgctgagaaaatcctgctgcgatgcacctggcttgacccggcagagaaagaggcccgtcgtttgcatctgcagggtatgacggttccggattatacggtgaaggtgagaaagtggttttgtgtgatgtgtgacgaagattatgaaggagaaaagtgctgcccgcgttgtggtaccggggtatacagcagggcgtgggggcggcaggaggtgccgtcggaaaatatcggaactgataatccgttactgaggctgtaatggttacctccggcgcagtttgcggtgatgccgttcccgggaatggattgccagtgcggggactgtggagcttaattccggtattggtggcctttccgttgattttgagccaacagcccccctgtgactgacaggctgcctcgtcattccattcgtatctccagtaacagggggtgtattttattgtgccggttcaggcgtgcgtttcccggcgtgtctgcaccggcttaaccaaattcaacagggataaaatagtgcaaataaccgaagtattacttgcagaatcgggggaagcatccggggttttattcaacaggctgtagatcactgactgcgtctgttggccgtccacttcacgcgtcattcgaccagagtaaatattgatgattactagattcgtgtattttatcaggcattttacttgcgaataaatccccttgttatccagcgaaaccacacaggtagctattaccatatgtcgtaatacactggttacaggaaaaacatgcaggttccgcaatatgttgtgtgttgctgcttagtcaggatcttttcttccatgcgagatacgacaacacttctgaggaaggatgttcgtaactggtagagttactacaacaggcatgggaggctccggctctgacagacattgtactgtggaatgttgttacaggttggggcggcaaccgtgccaggagaccatgagccgttcacggcattaaaggccacacttcagtcgtttacattccctgtggtggcaggcatcttccgttaaggcgtcagagcgttgccaacgttatgttgtcatggctcacctttcataatcaatgcttatctggtgactgaaactagccgcagataaagagtgtgaagttgataccatggagtggagtgacgtgcaggcaggagattcgctctatgcagggttgtgagatgaattcaaaccggctgtcagcgccagtgatatttgaagattcgtccggttgttatccagtgtgcattaaaaacccagacattatggacaatacaacggattccataacagggaggagcctgtttattatccgggcgtaatgactcacctttgtgggctttttcccgtcgcgcttttaacgttgaaggcattttctgcctgccgattcaggacagcgacaaaagccatatcagactattggtcaatgatgaccagcgtctggagtagatgataagccaaattgataagctggaatatgtgatgaaagtgcaacgtaatcagtccaatccgacgatgtttaacaagagtacggtgttttttcagtaagtcattcgtcttctgaatcaggtgtaatgatctttacagaagcattccggcagtgcgtaacataatctgcctgtaacggacgacgatggcgcgactgccgcaactggcggggaacctgtggatcgtcttcacgcccactgtaacgatcgctgtcctgttcgcgttgttttagcagggcctcagcctgttcaacttcacgacgcagtttttcagaacaggtaccgaacagcatccggcgcagtttttctatctgagcccgcagatgttctatttcccgtgcatcttcttcgatcttttcttcggcacgtgccagtgcagagcgcaggaaggcctccgtctcctcaaccagactcagttgctggtctttctgatggagctggctttccagttctgcaatgcgaatgaggtatttctgactcatagccgtttttataatgcggccaggcgttttttacaacattgtcagtgagttaaggcggaatgtttttggctgacgccagtccagcttatcgaggagcattgccagttgcgagcgggtaatggataccttaccgtcacgcaccgcaggccagataaactggccttcctccaggcgtttggtgaacaggcacagaccatcagcatcggccctgagtattttaacagtgtcaccccgtcggccacgaaagataaacaggtgacctgagaaggggttctcatccagcacatattgtacctgttcttccagcccgttgaaggatttacgcatatcggtaacgccggcaacgagccagatgcgggtacctgatgggagtgagatcatcttcccctcccggtcagttcacggatcaacaccgtgagcagctctggtgaaggattttccagtgtcattttaccgtaatggaattccacatggcaggaagccgcacaagcaactgataatgcctccggagcaggagcatctgtagcatagcgcggggtgtcgataagttccactggaaccagagtcggagaggccggaaaagattgtggtactgtagggcctacaatagttggaggcattctacgagaaatacgtccttctcgttgccagaggcgtagccatttaaaaatcaggttgttatcaacgccatgttcccgggccagttgtgcaacattggcatttggtttcgaagccagttcaaccatatgaagcttaaattcattagaaaatatccggcgggtcccagagcaccagtttgtaggtttatccatcaatagaactccgtctaatttagaaggagctctaatttagtctgcaaggatcaggagttacagacggcattggctttacgcttacacccactcacgtgagtggactgatataacaatcgacgatttctggaaaggctgtggatttgcccctatatttccagacatctgttatcacttaacccattacaagcccgctgccgcagatattcccgtggcgagcgataacccagcgcactatgcggatgccattcgttataatgctcgaacgcctctgcaaggttctttgctgccgttaacccgtctggtttgggcatgatactgatgtagtcacgctttatcgttttcacgaagctctctgctattccgttactctccggactccgcaccgccgtgttcttcggttcaagtcccaacatccgggcgaactggcgtgtttcattagcccggtagcatgaaccattatccgtcagccactccactggagacgacggaagatcgttgccgaagcggcgttccaccgctcccagcatgacgtcctgtactgttcactgttgaagccgccggtagtgaccgcccagtgcagtgcctcacgatcacagcagtccagcgcgaacgtgacacgcagtctctctccgttatcacagcagaactcgaacccgtcagagcaccatcgctgattgctttctttcacggccactctgcctgtatgtgcccgtttcgatggcggtacagcaggttttcgctcaagcaacagcgcattctggcgcatgatccggtaaacacgtttggcattgatcgcaggcataccatcaagttctgcctgtctgcgaagcagcgcccatacccgacgataaccatacgtgggcagctctccgataacatggtgtatacggagaagcacatccgtatcatctgagtgacgactgcggcggccatccatccagtcatcggttcgtctgagaatgacgtgcaactgcgcacgcgacacccggagacaacggctgactaagcttactccccatccccgggcaataagggcgcgtgcgctatccacttttttgcccgtccatattcaacggcttctttgaggagttcattttccatcgttttcttgccgagcaggcgctggagttctttaatctgcttcatggcggcagcaagttcagaggcaggaacaacctgttctccggcggcgacagcagtaagacttccttcctggtattgcttacgccagagaaataactggctggctgctacaccatgttgccgggcaacgagggagaccgtcatccccggttcaaagctctgctgaacaattgcgatcttttcctgtgtggtacgccgtctgcgtttctccggccctaagacatcaatcatctgttctccaatgactagtctaaaaactagtattaagactatcacttatttaagtgatactggttgtctggagattcagggggccagtctaggctgggccatatttctccggcagaagcagaaaaagcttattatgcttccatcggaaacaatgatctggcagcctgagttcacagataaaatgctctctaggaaacccgggtggttcagtagtgttgatcgagctaaagacttaaaaaccagtctggttcaactgttactttttcaaccagctctgttttaacacctaaactaagttctttaagcttatcggctaactgatcaccatcaaccaaatcaatcggagcaacgccatcacgattagcttcttcaatagcagcttttgtaaaactgcctgtggtaataaacatgccacgatctgctcgtcctacagttgcccctctgaaatctcggatttctggtgccccaactgagcctttgtatttcttacactgaaaagcaatatgaaaactcatcaagccgttaattctggcaattcctttaccatcgataccaccatcaccagtgcggccagtcacttcaacatgaatgaatcctgactctctcagtaacctctgtgttaatcgctcaaaagcatcagggctcatttcttcaattagcacatgatgcagtttttcacgccaacgcatagcctcttctggggagtcatcggacgacagttcgggggccgatggcgtagtactagtctgttcaagcttgcggtccagagctcttacaaaattaacaatttctctgctatcaatttccggttcctgtctggctttatctgtaagagcccacacgccacgagatgaattttcaaggtatccagctttcttaagataggttctagcccaagctaaccgatatccaacctcagtttggctgcttttttcagggttgtgcagaaccgccaaagtatcctcatcaaatttctcaagctcgacaacctcttcgtatatctcgtcgatgctgcctgaaccaccaagttcaaccagcgctttcatcaaaggcagcattagttgatcgtaagtcaccatttttccagcgctcatttgctttcactccatccggatgtcatcagctcagtaaaatctcggcgcgagagtacgatggagcaatcccgccaatctttttcggatggagacatggtatcggtatatcgcaggtcgaatccattggcctgtttctgggcgttgatatactcatccattttttcgcccatggtttcaatgtcctcaatccattcatcacgaatggtatcgggcagcgagccaaacaggttgtatcggtcttgcattcgttcggacagcttttcataaactttttcgtcgacagtttgttcgttgacgaggtttagcatgtcgactttttcgcgtacctgcccaaagcgcttgatgcgtccaatacgctgctctaaacgagtagggttccatggcaggtcgatattgattagggtgcccagtgtctgaaggttcaacccttcgcaggctgcatcggtggccaccataatttcgagctggtgctcggccaccatgcgcttcagtgtttcccgttcaatattgacgctatcacccttttggtacagccgactgcgacctgcgccggcatagaggcctaccgcttggtctgggtaacgctctgcgagcgaatctgcaacccattttgccgtgtcgtagtactggctaaaaataatgacgccaaactttagccacctctcgttttcaaggtaatggattaccgcgttgagctttgggtcttcttcaattcgctcaagccgggcgatcattcgttcgagaacggcaatttcatccgggctttcggctttgacctctatcagttggtcgtcactttcttcacgaacagtcctgccttccagcagcattcgtgcagtgttcaatccagccgcgatacttgagcaaatccgttgttccatcaagtttttcataaacccgctgcctttgccactttgagcaagagctttagcaaagtgtctagcttcggcgtaggcttgcctgaagtcctcgcttgttcgcagtgctttaccctcgaacaagctgttaaattggtgaacttccttcgacaattctcggtcgggatgcaagtcgacgcctatacgtggcagaagccccgcatcttcaagcgttacacgtttgcgtaaaacgacgtggcgaataaaaggattttctcgctgaaaaaaactggcacctgatatatttctatacagttcatcttcaaggtattccagcgaatcatctgacaaatcagagagtgtgctcttaatgtcccacttgtcgttttgattaattaatccaagatcctgacgaagagagctgaataagcggcgtgcatactgctcgttggttgaatcgacgacgggcagtggtgagcgaagcagctcccaagcgaagctgggttctgtaacgcgctgctcaccggataaaataggtagcacctctggtggacggtgccatttggcaaaatcgttgccgagcacaaaattacccctgccttgatgcaggataccaatcaagtcccacaaatcttcggggcgggtttgtataggtgtggccgtaccaagaatgacgtgatctgatcgcgcggcaatctcgcgcataaaggccagtaattcattgtgggtacccgcatctttaccgaagccttgcctgcttcgcgccttatgtgcttcatccaagatagccacgccaaagcgtaaccccagcaggtgttgcttctccaatgagtcgcgcataattagcccggtggatacaatacctacacgcagcgggcacttggcaatatgttcttgtcctgaaggagaaataattcgcccctcaggatctaaccaagctttcttctgggtttgccagcgggcacagggaatccccagcttatcaatcatttctacttgccactgctcgcagagcgtggctggggcgaagatgatgacaggtttacgcttcttgttctctctgtcgctcagtaagcacagcaaaagcgctgccgtagccatggacagggttttgcctaggccaacctcgtcggcaatcagtaaacgcacgataccgtggttgtgataatggcgaacgcattcgccgacaaagccttgttgccaaggctgcaaagagaaaccttggcgatacaatggggactcaatcagcgcagcaggtgcaatatcatcgtcttcgacaatatcttcaaaaagcacctctctgcgatagccacggcgtttcacctctcggatcactgcttcaggcaatgggcgcgcggcattccataaatactcaaactcatgctcaatccactgcacaccttctggtgattcgtcttcccagaggatttcatagtgacgttgccagccgctgctggtttcgttcatggagccaatgaagccaatttttttgccgttggctagttcaattacgccagccttgccatgaagaaaaccgcaaatgctgtcgggcgcaacgcggatgacctggccatgtttggcaaggaagctgtccaagcgacgatagcggtcacggttcagcaggctttcagcttcaatatctcgctcattccagcgcccaatcatcttagtttcgcgcagctgtgccacctttaagtcatcgggatggatatccacattgcaaacgatctttacatcggggatagactcgatcagctcattggccacttcaaacagcgagctagtaaagtaaccggcaatacgcttatagctgcgagcacctttgaggtgctccagcaagaagctactgtcgagcctatgggtgcgcgacgaaaatcgacgaatgctcattattgcggaatctccatccctatcttcataaccagttgttattcaactaatcgattcattggctttcattttgctgttgccattatcattgctctattcatcactgacccaaggcacgcatattcttcaagcgcgcgcctaacacttcagccgcatctcgagtggccttttctggcgcctttttctcaataaaggtcaacatgtcgatcaatatcggccgtacttccataaactctggtaagtctgcctgcaactgacggataaccgtctgcggctctttctcattgagaatctgttgcaaaccaataaccaagtgccccagccaagtggagccgatttcagtgctatctgtcaggtcgcgagaagcaaactcagggatccgcttaagctgggccttattggctgccatattacccattacccgggcgtaatcttgaacgcggaaggctttagcaaagttctggtagttgtctagcttagatgcaccggtagtttcaatgtccatcatgcgcaaatagaaacgctgaatgccgttgattttttgccaggtatcgttcgacaagccttctgggaccaacaagctgtttgcagcttccgcagcttgttgcacgatctcatcgacaaccgttacttcacctttggtgcgtggccgcagggcaaagctggtgacatcttcaccgccaatatgggtataggaagtcagcactttgagagccgccgcataacccgccatttgcaggtcggaatcgttaaagactggctcacccagcttgtcttttacctcatcgttcaggtgcatcatggtttctatctggcgcttcacttccgcgcgcacagcggggagcagtcgctgtttaaagcccgcgttttcgccggcaggacgcttacgcagcattagtatcactgtaccttgtacataaccgccttttttcagctcggtgctggtttcagtggcgatataccatgcaccaacaacctgcaatccggatgcccagaaaataccgatcatgtccgaccaaaccccggtatcctggtgggtgaacatcacgcattgcatgccgttgtcgggcatatggtcagccatggctttataggccttgaccatgcctttgcgaaagtcgtcacctgagcccttgatggctagagcacggcgcgaatcccaagtccattcatcaaatggtttgggtggattcttacgtagccatgcgatgaagtactcggtgatttcgtgataatgaacagcatcggcataaggtggatcagtgatataaacgtcgtttgactcagttaatgccgatgcttcatgattcttaattcttaccgttacattaggaattggtgcatttgcaaaaccaaatgatcgaccagcctcatgactggtaaagcagcggataccgtaattaaaaaatgtattaagcgcttggttataaaaaacgttgttcgtcttttcccaatggatcatccagttggcaattcgcgcattccagtccagagtcttcgcgttaaaaatatagtcttctggtgttgaatgtttgaaatacattgcatacatcaaaagctggcggccattgaagagatgatgccaatgtgaccaccccctttctctcttcaatcgagtcgtctcttctccatcttcaatcggcatatctggaataagacctgattgttgccatgtcgcgatattcttgtgaacgatatcgttaactaatgcctcccgttctaaatctttttcagtgacacctgtaaaaaatgtttcttggcggccctgatctaaagtgtctttggttatccaatgaatggcatagagccgctcttgaaaaatgtcgtccggacgcggagcaaaatcttccttctcccaaagacgaagtcggtttttcgtatttccattagcgtctttatagtcgcctctcagggtttttattggagtgcgataggtttttccatccaactcatacaccaaagcgccatctcttacggtgccttgatctgccgctttcatttcagccgcactggcgtttgtgatcacttcaatgttgaagcgcttatgtttatgatcgggaaccagttttgcgattacattcttcaactttgaaataacccagctaggggacatcggcaccatccagccggtttctgggcatttggtttctaagcaatagaggtacgactttgcacgattaccccggtggtcatgttcaatgcctaaagcggttatttcttgatcgacaatgtttgccacgtttttctgagcggcttcaatttcttgcttcctttctggtgaggcaccgatgacattcatagcgccccaagtcagcataagtgcaactgggtttaaatcagatgcatatacatcgcatcccaatctggctgcctcaaacggaattgagccaccaccactgaaggtgtcagccactttggggcgatgcccataacgaagcaggccaagctgttctatcagttcttgatgtgatttagccttaatgttgaggctttgataatgccgattgacggtggaccaaatgtgtccatagagccactcctgatctacctcttccggtcttttacaaagacttgcctttgcctcgtagccttcgatcgtttctaaatagtcacgataaagtgcaagcttttcgttctcttcaatgtcgcgacgccagcgcagctttaaaccgagcgcatcactattgatgggaaattgcagtgtatcgatttcgttgaaactatcgtcggtaactttgacgttgtgactaaaataatcccaagggttgtgcagctgaatgcgtgcagcgatttctgcgggtttaatgtcattttgaatgagcgcgcgcttagcgaggctttcgatatcaaagcccatcaacatttcgaatatttcgagatctttttcagtatcttcggtttggggtaagagtgtgcccagcaccaccgagcgaacaaggattagcggttttctgcctttccagtatgaccccaaacctgtaagtgtttgaccaagattggctttgcgctctttttgcgcttcgaatgaaattttttgtgctggatagactgcttcaatgagtgcgggcgcatccttgagttcgaatggtgttaattctgtcatttacattttatctccaaacatgctgagcaaatgctgattttttgctcccgctgtttttcgtttaattttgtattattcaaaaaccaaaagtgttttctagctattgcaacggcggttgttcagtttttttgccgtagcctaagtcttttaggctattgccttgcaaatctttccaagcatccatgccgctgcgcggattaccggctattacacaagcggcagcgctggggcttttgaacaaataatcttgagagaaagaataaacttccccttgatgaactaatattctttgttccagcatctgttggcgtaaatctcgtatagctggacgtaatgatttggccattgcgatgtttgcggtagacccctttttcactaaaaactcagggctactcttgttgccaacaggaagtccgatcgctttggcatgctttgcttcaaacaaaaataaattttcttcgcctatagctaaatcatcttggtcaagtttagtgcttgcaggagctaatggcatcaaagggttgccattctcagacgagagatgaagcaataagtcagaaccattatttagttgcttctcgatataggtttctgatgtttctttaatatcttgtgctcgtgttacttcacgagaataatttgcatctttgctttgggaaaattctacctgttcagcctgaacaatatcacctagggcatgacgcagtgcaatacgccaaccgacgtcacggtcttctgcagctcctgtgcttcttgctgtcataccgaataaccaccagcgttcttccggtactaatgccaaccaattacgcacagcaactggaatgttttcaacatccattccttcaatggcccatgctagaacacataactctttgcccaaaaggcgatcaacgacgttttctcctacttgccatgagcttgtgcttaagccatagcttttcagcctaacgttaaatgtacgctgaacttctgagcgtatagccgtccaacgggaacgatcaagtaataccctttcaatcatggcaaactcgtcactctgagcttgtagaccaaggtactcattgatttgcacttgaccactatttgatttgggaatgataactttaaagtgatgtggatcgcttgtagcgggcacaccaaagcccagcgtcgcatgcttcaccgctgtattgcttgtctttgatggtgcctttgccatatttcttgcctctatttcttcaaacgtgtcgctcaaatgcgacgcttactcgtcctgagcaatgtctccaggttttaactcaataccaactaatttggcgaactctttggcttcaaaaccgttctcaaaatcgatgccatctcttactgcaatcgaaacattagcatcagcttcatttaatacatcgcgcaaactattaacagtagcctcgatcattgcggcggtgatctgacgttcgccaaagcgaatacccactgtgttttcaccttcgccaatttcgatccgcacacctttaaagcgcgtattggcttggtctttataacggtttatcacagcgaatactttttccgtgctatccaatagaacacgcttgccgccattcatgcgagcaggcttggtgtcatgaatttgcacagtcttgtctccactgtgtgggatctgaaagtcggctgttttggttgcttcatttgatttagcataaactagcaatcgggccgcttctaaccccacttcgaacggagcggtatagggttgcccatctttgggatttgaaccatccaacgtgtagaacatgtcggctttcggtgtgcactgcagggtgaccttacgctgatcggcggaaggctcaatttggtgtcgtacttttaagtcggccacccagcgagtcggcaaaccgttttcgtacttgcccgttggatcaaccacaaggaaataaagcgtcccctcagtggtagcaaaattttctaaatcatccacgtgcgggtcagcaatcgacacagtagctgaggttgaataatagatgacaggactttcgccagcatttctcggtgtcaggctgattaaagactcaccggtatctggattggttcccaatagcgatacgttgacactggttttttctttcgggaatgggcctttttcaatgtatccgtcctcgcccaagcgccagcgaccttgtttcagggcttcggttttcagtgtgtccataccactactgccaggcatccaaggccagcccggattgcatttggcgcggttgacgacatctttccatggggttcgacggttgttagcaccggaaggccacagttcagattcggccatagcgaagtattgcccgaagtcatctttcagatcagcggccagtttgtagttagcccgtgggtcagccatcaggttttcgatttgtacttcagctgattgatcaccttcgcccactttcaaaccattgtctatggtaactttgagcagtcgttcagagccatcgaactcatcgatgccagggaaaagaatggtgttgtaagcggcggaaagtgctttggtaaagcggccttccgcttcttcgagtcggtctcgagcttcttcaaataaagtgtcgccagccttgagacgtttctctatctgctcaatagcatagagctcgcgcaagcgttcttccacagcctctgccatgatactgtcttggccagtaagcaccaatagattgtttttttcttgttggaactcgaagaagttgatgagttcattaggtggtactttgccatctggctttatcacaatcaatacacgaggaccactcaacttgagttcgtccatacgcggaagaatctgaacctcctgataaacgttgcggcgattaggttgaagaattcccttgagccggttaatcagagcttgatcaattttgggctggggaatttccttagcgttacgctctatctggcgagagaggttttcggtttctttaataaagaaacgctggtcttcacggtgtaagtaccaagcttgctcacgcagcttttgaagggcttctaagaattcatcagctttgcggttaggcgcagccaggaattcaattacttcactttctgacagaccaatgcgcccccccacagcacgtgatagtgaggatgccaatagcagtgtcattaattgactggcagcatcgttgctttgttcggcatcgatgctttccgcaatggaatcacctttatctgcaatatctcgagtaacagctggaatcagttttggcgagattcgttcaatctcgtctttgacttgttcatcatttaggtctagatgctgagtgcctactagaaatacgtcatctgtttggcgttgctcgacgcttttcagcaagcgagcggtaaactgcatcaagccgcgtgtttgacggaagccttcattttctttaaagagcgcaaccaagtgcttgaacgaagggtggaagggataggtctctctgacctgttcggcaatttgctcgatgctagacgcaatgatgtagccaccgtcttccgctttttttacttgctgcgcatattcctcagcgacatcgctgatagtttgctcatccggcagttcatcaataaggcgcttctttaaaatttcataaatttcattacctgacagttgcaccggggtaatggtcatcgactgcctgcgggtttcttgctgcagattagaaatagcttcttttagtgttttggtttgcgcaccatagctaccagataggttggcaatgactatacagcagttaggcagctcaagtgctgcactcataagcgtacttagactgtaaaccaccatatttgccaaagtgcctgaaccatatacttgggtgctggcgttatcgaggtaaggtggcaactcgtcgatcataatcagcgtgggagtatcaccgattatctctttccatttttgctggtcaactgatttaggtccattgatccaatgaggttttattttctctgcttcgcctaattgagtagcaatttcgccccagatgtagttgtcggggttattacgaccattaaaagcagcaattcgagcattgccaaaatccagtcgctcacttaaatcagcaggtaatacatcaggccgcagatgggcatgctttgccagcaagcctagggcgatcatcatatgggttttacccccccccattgcttgtgtaagttcaaacactgcctggtctgatttgcctgataggcgaagcataccctcgcggaagagttgttccataccatgagtaacatagttgcgagagaagaactctttaccatcacctgcgtcgttaatgagatcagccaggttctcaattccttggctcattcgataatcctggatcacaggattaaaacgacatgcctgcttaactgtcttgatcatgcttaacgctcccacgttgatctgaatcttgggcttgctctatggctataccatttttatcgcaatgctcgcgtattagaacttctatcatgttagcgatagaacgatgttccgcttgcgcagctactctcaacgcctccttcaagtcaggatcgactcggatggtaagcgtcgcagttttgatggtagccattacactctcccagaatgcctgcaaatgtactgcatattacattacagcattgtaatcaacaagaataaaatttacggtgtaattaacttataattccttatttttattattttttttggaataaatcatcacaccagtattgttatatttattcttgatagatatctcccgaatgcgccaggcaacttcagcctgggctggtagcaatggcaacatcccttcagcaatcgcgtccggtgcagactcttgcccacaggacatcaaatgcttccatggatctttaagaaagcactcgaacgtgatgccaaattcaatgatgcgggcagaaacgaagatttcgccccagtattcaatgtaggtgtcttggtacatggaaaggttcctcttgttgataaaatcatgagttcactttccattttccagaggttttcaaatatgcaaggggctatgacaaagctttaaatcgattgcgggcatctttgtagtcatagtgggcatgttctgagccacgatggtacaaaccatctaagtaagtttgttcctgcggcaactcgtcttcgctgattgcgcgccttgaagtggtcaacaaaaactggccaccgagttagagttttttccagtatcgattttccgattcgtttggtggtaacccaccattatattcgtgcggtcttagtgcgctgtaatatccaacgatatagtccgttattgcgtgagctgcatcgctgaagcttacatagcccgtcgccggcacccattcgttcttcagactcctgaagaagcgctccattgggctgttatcccagcagtttccacgccgactcatactctgcctgatccggtatctccacagtaactgccggaactgcctgctcgtataatgactgccttgatcgctgtggaacatcaccccgacgggcttaccacgggtttcccatgccatttccagtgctttcatggtaagcctgctgtccggcgagaacgacatggcccagcccactggttttcttgcgaacaggtcgagaacaacggcgaggtacgcccagcgcttacccgtccagagtagagtaagaggcagggcgtagtcggactatttccctgcctcttactctactcagcacatggcggggcttcgtctatgtggcgttcatcattgatgtgtttgccggatacatcgtggggtggcgggtctcatcgtccatggaaacgacattcgtgctggatgcactggagcaggcgttatgggcccgtcgaccgtccggcacggtccatcacagtgataaaggttctcagtatgtatcgctggcctacacacagcggcttaaggaagccggattactggcatcaacaggaagtacaggcgactcgtatgacaacgcgatggcggagagcatcaatggtctttacaaagcggaggtaatacaccgtaagagctggaaaaaccgtgcagaagtggaactggccacactcacgtgggtggactggtataacaatcgacgattgctggaaaggctgggccatactcctccggcagaagcagaaaaagcttattatgcttccatcggaaacgatgatctggcagcctgagttcacagataaaacactctccaggaaacccggggcggttcactccattcctgtcaacacaaccactttgcctgagacagcgtcgatgttttggactggcccattctaaatggcttagtcactatgtagctaacacatcacttgcccacatcatcctctcaccacgttttgccattatccggtatggcacaacccataattttaaagtctctgaaaaagcaaagtgctgcggtatcggttggctaaagtcatcatgcgcagggtaaatcaggtacatttcgcctgttccgccaaggtatttttggccgtaggcaaacatttgatagaagtcggattgcgctagcccataaagtgattttttttgctggctgctattcacctgcttccattttgtatccatcaccattttggtttgaatcggttgccgagattgaatcagcaagtctgggcgaagcttaaagcaatctttgagtccatgctttaccaaagaatacgttgctgcttgagaaaaaacttttaggtgagaaggtaattcgtagggtagggtctgtgccacaaaggattcaaataccgcttccataggaaacaaaagtgatatcgctttggtgtttccttgcaatgcacttgggctcattcctctcaggatcaactgcgcccaagctattggctcgctgtaatgagtcataccacgctcaatgcgtaagctgttcagatcgctctctatatccctactaagtggaataccgtcaaaagcaaagcacagttcgtaaagccagcgttgattctctgatgacagcttcagactaagtaacttatccagtgtggagtgtaagagccgattggcagcacaatcaggcatatactcatcataatcgacacaaaacttatggcgattcaccgcgttatgtcgcagttgtgcagagagcatcagtttgcccttcataaaagccagattacctttctcactcacatagtcggagcgtaaaccttgtttaagcaattggctgacgctttgcaaaaattggctgataaaaatctcgagcaaaggcatgcgttgcgcctgaagagtggcctgctgggtttgaatgtgtcgaaacctaggtaggtgacttagcatcgtaatgaatgtttctcgcgcactcgcaagcgtgaggtttttaccaatcttgggcagtatctcaagctgcaaaccgtgaggtgtagaaagcatccccgcgtagttttgtacctgcagcaatttgaaacctgaacgagaggtgagtttgagaaactggcttccttgctcacttgttaggctaagtgtttctaaataatcaaagacctgttgaggcaccaactttgcgccaactgaagccgcttttccactccccaacaggtcatattcaaaaattgagataacttcactcatggtttacgacctgctcatcaggagtggtccgctgtggctgataaattgaacgataagcctttggcatattccagaccccttgatcgagatctttgagctcgtaagttgttgattgctgatcatggcgtcgtaaaccatggttgttaccaaaaagcgtatcgagatcgtcagttttctcaatcacgaattgctggttgtcgtcttgcttttgattgtctgccagcaccaaccggatcttgttccagtcatcgaaaaagtattcctgtaaaagcggaatgatctttttctgaaatgcgatcttcaattgtttaaacgcagtttcttcatcaccggtatcgagagcattttttaccggcataaagaatgcatgtcctagtgtatgctcacgatcgtaaagagcttcgatgcggctattgagtttttctaacaacgactcaagctctatgcctttcaccttagctccactcagtaaagaaagatctggcatcatttcgacaaagtcaaagcgacggcgcaaagccgtgtccagcagagctaaagaacggtctgctgtattcatggctccgatgatgtcgacattggcgggcacgctaaagtaatcaccgctataagacagttgcagactcattgcattgggcatacccgcacgcttgtctacttcaatgagtgagattagttcgccaaagatcttggatatgtttccgcgattgatctcatcaatgaaaatggcgtagcgatgtgctggatcggcattagcacgttggcaaaggcgcataaaaatacccggctcaatgggataagatatattgccactctcgtcagagcgtgcacgcataccttcaataaattcttcatagccgtaagattggtggaacgtaacaaccgcaaaacgctggatggcttcggcagattttggaccacgtttaagttcggcgtagagcgctaacaaatcctccacttgctcgagctgtgaatcaactagaaaccattcgctgttatccgttttgtcaaatacggcaggctcacgccgatttttataatcaacagttaacgattcgggaattgtataggcttgcaaagccttccaggcagtattcgatagattgccattacgaccgtttaataatgccttacgttgaaaccacatatgttcaataatttggcgaactttggctagtttcccaagatcgagcagcaccagcgttataacctgcatccagttcaacgattcaagacgagaatccagccaggcttcacgatcagcaggaactgcatgagaagtatactctttcattttttgctgcaacgtgaaggtcttgccagtgcctggagggccaaagaagatcacgttagttggtgaatgtggaatagtcttgttctcgatgggctcactgcttgctactttctcttgcttctgttcattatcgcgctcacggagcaattcatagatatgccagatagccatattcacgtaatagggatctgtgtcaggagattgggcgtgtatggcttgtttcaattcatagtttttctgtaaccaatttccagtcagtaccaaaccgagatggaagcgttgatttaggaattctgctgttttattgaaagcattctcatccacagtactggtgtagttttctggcgagaacgcggcaaagacacgatttcttaaactccaatacatgcgtttaagctgtccgatctttttggcctgctgcagtgcagtgcctacgtattggtaggtaacttcatttggttgttgacgaacacgttcggtgagttctctaagcaatgggaggctttgctgatattctgctaatgatggaacgccctgacgaatactggcaataccgttatcacgttcataccagagcctcttgactaaatcatccgtttcaggctcagcaaaagttgaggtttgttgtagcaaggtcgtaaattcccggtatcgctgctcccacttggaagctgtgtaatttttatctttcaccagggcatcaatcaattctctgatcgtcagcttgcctgcttcgacactatctacaagatccatcgtgatatttcctcagctattacattacttactaggcagctagtctgctgttttataatctatattaccaagcatgcaattgtagccaagcgccataagtaagattttcgatgtacaatacatgtttttcataaaaatgattttgtactctcgaacggattttgggcgcattcaccttcagtcgcacttcttgcatttcacaatgagataacgggattcctgattgcgtacaccacgacgagcgcaggaaaaatcactgacgctctttgaatctatcttcgctgtcaacttaccaatgaaccccaggggcttctggtactgcgtgcttcgtccggtgacacaaagcgcttacattgcccatggcatccatcatcaactgatccagaacaggagtgtcgaaatacacctttcgggtacactacaacacgttatattccggcatatcgggagcaggtcagaagtgacggtcatcagatcgggcaagctatctatcattgcagccaccggggttcatcctcctgaggcaggaaaaggctgagacgacgcacgcgtgtggttgattgacaccacagtgcgaattcggtgaatgcgagatcacggtacaattccgcaccacactacacaatcaataccccgggttttattcaggtaagcaggattgcggatatccggtgtcgcgcctttgtgtcacgaacggggtaggtgcgaaacaccggataaaatgcaggctggcaatacctctgaacgccctgcgcagagcggatagtttggattaagtactcgcacctccgcagtcctgaaacaagtctggctggtagctgtaaacagacttcgtacatgttgctctggaatagatccccgtgccacaggcttcgcagaactttttcccgggaaaatgctgcccgcacatcacacaatgccactccagcacgaccggtaatggcgatagaaacatcgccatatcctcaatgtaagggtgggacttttccggattcagcaccacgcaggccgccttctgttgcgcgctcagggcatgtaaatcatgctcaaaccacgccccctgagcatctgtctgcaaaatcaaccggccacgacaggaaaggcagaaacactgccggatatttctgctgagcgcagagtcggcactgataatgtgttcacccggcgtcatccccagccccgtttttataccgttcattcagccactccctcctcactgaagtgccctgtatggcagtgagtgcagtaccgctccccataataatcgtgatgacattgtctgcagtgccagctggctttacgcaccacgggtaaggcatccggtacgaatttctgcagacgcttaatcaagcgtacctccctgcgctccggtctgacataagggcactgttgaccgtgctcagtcagcccgtcgtcagtgtgttcaaaccagggaagttcagtgtcgtactgcgggtggtatctgagtgcactgccgcaaaggtggcaggtgtagtgagcataaggtgcggcctgtgcagtacgggcgcccgtcagatgtccgttgccatcaagagcgataaagtgaaccgccccggaaatcctggagactaaactccctgagaaagaggtaaacaggatgactaaaaatactcgtttttcccccgaagtccgtcagcgggcgattcgtatggttctggaaagtcaggatgaatatgactcacagtgggcggcaatttgttccattgccccaaagattggctgtacgccggagactctgcgtgtctgggttcgccagcatgagcgggataccgggggcggtgatggtgggctcaccagcgctgaacgtcagcgtctgaaagagctggaacgtgaaaatcgtgaactgcgccgcagtaacgatatccttcgccaggcttccgcttattttgcgaaggcggagttcgaccacctctggaaaaaatgatgccactgctggataagctgcgtgagcagtacggggtcggaccggtatgcagcgaactgcatattgccccgtcaacgtattaccattgtcagcaacagcgacatcatccggataaacgcagtgcccgtgcgcagcacgacgactggctgaagagagagatacagcgcgtatacgatgaaaatcatcaggtgtacggtgtgcgtaaagtctggcgtcagttgttacgggaaggaatcagggtggccagatgtacagtggcacgtctcatggcggttatgggacttgccggtgttctccggggtaaaaaggtccgtacgaccatcagccggaaagccgttgccgcaggcgaccgcgtaaaccgtcagttcgtggcagaacgacctgaccagctgtgggtggctgattttacttacgtcagcacatggcagggcttcgtctatgtggcgtttatcattgatgtgtttgccggatacatcgtggggtggcgggtctcatcgtctatggaaacgacattcgtgctggatgcgctggagcaggcgttgtgggcccgtcgtccgtctggcaccatccatcacagcgataaaggctctcagtatgtgtcactggcctatacggagcgactaaaagaagccggattactggcatcaacagggagtacaggcgactcgtatgacaacgcgatggctgagagcatcaatggtctttacaaagcggaggtaatacaccgtaagagctggaaaaaccgtgcagaagtggaactggccacactaacgtgggtggactggtataacaatcgacgattgctgggaaggctgggccatactcctccggcagaagcagaaaaagcttattatgcttccatcggaacaatgatctggcagcctgagttcacagataaaacactctccaggaaacccggggcggttcaaactaaggtgggaagagtttcctccctgtgtcaatagcatctatgccagagaaattctgtgcctgtatgtcgatgagccctaccatggtaaaggatttgcgcaagcactgatgcaaaagtgctttgctgaatttgaggcaaagggatcggatcctgtctggttaggtgtctgggaatataacccaagggcaatctctttttatcgtaagcttgggtttaccgaggttggagagcatatttgtcaggttgggtcagacccgcagagagacatcattatgaaacgctcaacttacgctagctgaacatacattttgacgtccgcttttggtacgaagcggaaaagttacatgaactgaaggtccgctgcgagcgaacagcagacattcaatcgatcgtgatgtatttacaatacttaacattagttaatgtatatatgtttttaagtaattatatcggttgaaaataaatgtcaaatttatcactgtacaaatttcctttatagtaattaacatttgggtccgtaattatacttcttaccaaatgtatatctgacatatctgtcttgcagccgaaataaacagaaattaattctgcgggccaaggatgtaactcattaccttgctcaactacatgcctccactcctgctcgtattcccaatgtttagattttgtatgtaatattctaattttattagataatgtatcgacttcatttaaaattgaacttgcctgtatcgatggataattatcattgtaattcatcggcctagttattttatcatctgctaaggctgtgccggcgatgcgtttaaactctaagcacatacctttatgttcagaagcataatgcgaccacatcagcaaatttttgttactgcttgctagtgaaagaatacctaacttttctaaaccgcttttaaatctgtccaaaagttcatcaagagaacgttttttggaaaccattacatctgacatatcttcaccaaaaatggctgataatttttcagagtccatttcccgttcgtacacatgcctttgtcctctcacataaaattgggtgtcaaaaggatcgttaaatcctgccggttttgagtaccagattttccgctgtgcaagagcacttaattgattcttaccgatagggcagtatttgaatagagatgtaatttcaggctttatcactagcattcctatgattttttcaatgttaacataattaattatgtaactttactatcacaagttcagattgtaatcttctgattataagataaaaactcgcatatactctcataagaaaatgtatcttggttacataattaaaacattctaacaaaatcgtttccggaatactttaatcttcttgaattatgttagtaacgtccgctactggcacagagcggactgtcagattagattcagacctgtatcagccacatatacctgcattccaaataatttcagacagatattatcgttgtgaatcccccgccacctttccggtgcgcggggttttgtcttttttcaccgggaatacatgtatgaatccgtctgatgccattgaggcaattgaaaaaccgctctcctccctgccttactcactttcccgtcacatcctggaacatctgcgcaaactcaccagtcacgaacccgtgattggcattatgggtaaaagcggggccggtaaatcctcactctgtaatgcactgtttcagggggagatcaccccggtcagtgatgttcacgccggcacccgggaagtgcggcgcttccgtctgagtggccacggtcacagcatggttatcactgacctgcccggggtgggcgagagccgggacagggatgcagagtatgaagccctgtaccgtaacattctgcctgaacttgacctggtactgtggctgattaaagccgatgaccgtgccctgtctgtggatgagtatttctggcgacacattctgcaccggggacatcagcaggtgctgtttgtggtgacgcaggccgataaaacggagccctgccatgaatgggatatggccggtattcagccttctcccgcacaggcacagaacattcgcgataaaacggaggcggtattccgtctgttccggccagtacatccggttgttgccgtatcggcccgcaccggctgggaactggatacgctggtcagtgcgctcatgacagcgcttcccgaccatgctgccagtcccctgatgacccgcctgcaggacgagctgtgcacggaatctgtccggtctcaggcccgtgaacagtttaccggcgcggtggaccggatatttgacacggcggagagcgtctgtattgcctctgttgcacgcacggttctgcgagccgtccgtgacacggtggtctctgttgcccgcgctgtatggaactggattttcttctgaacagtctgccagggaaatgcctgattacattacgttaaccaactgaaaacatgacacaaccccctcatccccctcctgtttctcttgcgtgaccgctccgctgtcaatagaataaaacgatcgataaaacaggtatcgatcgttactatcgatcgtttatagtggttaatggtctgcgaaaaggcagttgaatctcttcatcatgcagaacggaattgcacaaaacggactgatacttctctggcggatgagagaggggaagcatttatgtccgggaaaaaccactttatctgaccatgctgttttgtacctgccggtatccacatttgtgggtaccggcttttttattcaccctctgtaaggaaaagctgatgaaacgacatctgaacaccagctacaggctggtatggaatcacattacgggcaccctggtggtggcttccgaactggcccgctcacggggaaaacgcgccggtgtggcggttgcgctgtctcttgctgctgtcacatcagtcccggcactggctgctgacacggttgtacaggcgggagaaaccgtgaacgacggaacactgacaaatcatgacaaccagattgtcttcggtacggccaacggaatgaccatcagtaccgggctggagtatgggccggataacgaggcgaataccggcggccaatggatacaaaatggcggtatcgccaacaacactactgtcaccggtggtggtcttcagagagtgaatgccggaggaagcgtttcagacacggttatcagtgccggaggaggacagagccttcaggggcaggcagtgaacaccactctgaacggcggtgagcagtgggtacatgaaggcgggattgcaacgggtaccgtcattaatgagaagggctggcaggccgtcaaatccggcgcaatggcaaccgacacggttgtgaataccggcgcggaagggggaccggatgcagaaaatggtgataccgggcagtttgttcgcggaaatgccgtacgtaccactatcaatgagaatggtcgtcagattgtggctgctgaaggaacggcaaataccactgtggtttatgccggcggcgaccagactgtacatggctacgcgctggataccacactgaacggcggtaaccagtatgtgcacaacggcggtacagcgtctggcactgttgtgaacagtgacggctggcagattgtcaaggaaggtggtctggcggatttcaccatcgttaaccagaaaggcaaactgcaggtgaacgccggtggtacagccacgaatgtcaccctgaagcagggaggcgcactggtcaccagtacggcggcaaccgtcaccggcagcaaccgtctgggcaatttcacagtggaaaacggtaatgctgacggtgttgttctggagtccggtggtcgcctggatgtactggagggccattcagcctggaaaacactggtggatgacggcggtaccctggcagtgtctgccggtggtaaggcaacagatgtcaccatgacatccggtggtgccctgatagcagacagtggtgccactgttgaggggaccaatgccagcggtaagttcagtattgatggcatatccggtcaggccagcggcctgctactggaaaatggcggcagctttacggttaatgccgggggacaggcaggcaacaccactgtcggacatcgtggaacactgacgctggctgccgggggaagtctgagtggcagaacacagctcagtaaaggcgccagtatggtactgaatggtgatgtggtcagtacctgcgatattgttaacgcaggagagattcactttgataatcagacgacacaggatgccgtgctgagccgtgctgttgcaaaaggcgactccccggtaacgttccataaactgaccaccaccaacctcactggtcagggcggcaccatcaatatgcgtgttcgccttgatggcagcaatacctctgaccagctggtgattaatggtggtcaggcaaccggcaaaacctggcttgcgtttacaaatgtcggaaacagtaacctcggggtggcaacctccggacagggtatccgggttgtggatgcacagaatggtgccaccacagaagaaggtgcgtttgccctgagtcgcccgcttcaggccggagcctttaactacaccctgaaccgtgacagcgatgaagactggtacctgcgcagtgaaaatgcttatcgtgctgaagtccccctgtatgcctccatgctgacacaggcaatggactatgaccggattctggcaggctcccgcagccatcagaccggtgtaagcggtgaaaataacagcgtccgtctcagcattcagggcggtcatctcggtcacgataacaacggcggtattgcccgtggggccacgccggaaagcagcggcagctatggcttcgtccgtctggagggtgacctgctcagaacagaggttgccggtatgtctctgacgacaggggtgtatggtgctgcaggccattcttccgttgatgttaaggatgatgacggctcccgcgccggcacggtccgggatgatgccggcagcctgggcggatacctgaatctgacacacacgtcctccggcctgtgggctgacattgtggcacagggaacccgccacagcatgaaagcgtcatcggataataacgacttccgcgcccggggctggggctggctgggctcactggaaaccggtctgcccttcagtatcactgacaacctgatgctggagccacaactgcagtacacctggcaggggctctccctggatgacggccaggataacgccggttatgtgaagttcgggcatggcagtgcacaacatgtgcgtgccggcttccgtctgggcagccacaacgatatgacctttggcgaaggcacctcatcccgtgacactctgcgcgacagtgcaaaacaccgtgtgagtgaactgccggtgaactggtgggtacagccttctgttatccgcactttcagctctcggggtgacatgagcatgggtacagccgcagccggcagtaacatgacgttctcaccctcacagaatggcacatcactggacctgcaggccggactggaagcccgtgtccgggaaaatatcaccctgggcgttcaggccggttatgcccacagcgtcagcggcagcagtgctgaaggttataacggtcaggccacactgaatgtgactttctgataatcaggtcactccccttcaggccccggtcatcatgaccggggccttttacttacagggagcaacagatatgccgggttgtacatcacgtttattgcccgaaggccctttctcacgcaaccaggctcttgccgtcacaacggcttaccttaatgtgcttattgaagatgaccagggaacgcatttccggctggtgatccgcaacgctgaaggccagctacgctggcgctgctggaattttgaacctgatgccggaaaacagctaaacccgtatctcgccagcgagggaattctcaggcaataaacgtcttcatttcatccatcaggccgcgtcttctccgggagacgcggccttttcgtttataccgctaattcattcataaggagcaaagtatgcaattagccagtcgttttggtcatgtaaatcagatccgtcgggagcgcccactgacacgcgaagaactgatgtaccacgtcccgagtatttttggagaagaccggcacacctcccgcagtgaacggtatgcgtacattcccaccatcaccgtcctggaaaatctgcagcgggaaggctttcagccgttcttcgcctgccagacccgtgtgcgcgaccagagccgccgggaatataccaaacatatgttgcgtctgcggcgggccggacagataaccggtcagcatgtgcctgaaattattctgctcaactcccatgacggttcatccagctaccagatgttacccggatattttcgtgccatttgtaccaatggcctggtctgcggtcagtcgctgggagaagtccgggtgccacaccggggaaacgtggtggacagggtcatagaaggtgcttacgaagtggtgggcgtgtttgaccggattgaggaaaagcgtgatgccatgcagtcgctggtcctgccgccaccggcacgccaggctctggcacaggcggcgctgacttaccgttatggtgatgaacatcagcccgtcaccactaccgacattctgacgccacgacgccgggaggattacggtaaggacctgtggagtgcttatcagaccatccaggaaaatatgctgaaaggcgggatttccggtcgcagtgccagaggaaaacgtatccatacccgggccattcacagcatcgataccgacattaagctcaaccgggcgttgtgggtgatggcagaaacgctgctggagagcatgcgctgatgctgtttccctgaaagtgcagccctgactcacgtctgtaccagtccccaggcattcttccattcatttactttttataaggaatcatctcatgacaaccttttcgcatagctccaccacaccttctgtttccgcaactactgcatcagggaataaccagtctcaactggttgccactcccgtccctgatgaacagcgcatcagcttctggccgcagcactttggcctcattccacagtgggtgaccctggagccccgtgtcttcggctggatggaccgtctgtgtgaagactactgcgggggtatctggaatctgtacaccctgaacaacggtggcgcatttatagcacctgaaccggatgaagatgatggagaaacctggatactgttcaatgccatgaacggtaaccgcgctgaaatgagcccggaagctgccggcattgccgcctgtctgatgacgtacagccatcatgcctgtcgtacggagtgttatgccatgacggtccactattaccggctgcgggattacgccctgcagcatccggaatgcagtgccattatgcgtatcatcgactgagcaggagcgggaccatgcaacagctttcctttctgccaggagagatgacgcccggcgagcgcagtctcattctgcgggccctgaaaaccctggaccgccatcttcatgaacccggcgtggccttcacctccacccgtgcggcacgggaatggctgattctgaacatggcgggactggagcgtgaagagttccgggtgctgtatctgaataaccagaatcagctgattgccggtgaaaccctcttcaccggcaccatcaaccgcacggaagtccatccccgggaagtgattaaacgcgccctgtaccacaatgccgctgccgtggtrctggcacacaatcacccgtccggtgaagtcacacccagtaaggcagaccggcttatcaccgaacgtctggtacaggcactgggcctggtggatatccgggtgccggaccatctgatagtcggtggcaaccaggttttctcctttgccgaacatggtctgctttaacccttcacaaccacatcacacctgttttcacttttatcttctgtcttcagaggtatcccattatgaaaattatcacccgtggtgaagccatgcgtattcaccaacaacatccgacatcccgtcttttccgttctgtaccggtaaataccgctggcacggtagcacggatacatataccggccgtgaagtacaggatattcccggtgtgctggctgtgtttgcagaacgccggaaggacagttttggtccgtatgtccggctgatgagcgtcaccctgaactgagtctggaagggcattcagaagagcagaattatcgccaccaccggaccattcttaaccaattttctgtgaggattttatcgtgtcagacacactccccgggacaacacttcccgacgacaatcacgaccgcccctggtgggggctgccctgcaccgtgacgccctgttttggtgcccgtctggtgcaggagggtaaccggttgcattaccttgccgaccgcgccggtatcagagggcggttcagcgacgcggattcgtaccacctggaccaggcctttccgctgctgatgaaacaactggaactcatgctcaccagcggtgaactgaatccccgccatcagcataccgtcacgctgtatgcaaaagggctgacctgcgaagccgacaccctcggcagttgtggctacgtttatatggctgtttatccgacgcccgaaacgaaaaagtaactctccagaataaccttctgctccggcctggtgctttcaccacgccacttttccatttttcatctctgcatatcaggaaaatcttcagtatgaaaacattacctgtattacccgggcaggcggccagttcacgcccgtctccggttgaaatctggcagacactgctcacccgactgctggatcagcactacggccttacgctgaatgacacaccgttcgctgatgaacgtgtgattgagcagcatattgaggcaggcatttcactgtgcgatgcggtgaactttctcgttgaaaaatacgcactggtacgtaccgaccagccgggattcagcgcctgtacccgttctcagttaataaacagtattgatatcctccgggcacgccgggcaaccggcctgatgacacgcgacaactacagaacggtaaataacattaccctgggtaaacatccgggggcgaaacaatgaaactggccctgacgctggaagccgacagcattaatgcgcaggcgctgaacatggggcgcattgtcgttgacgtcgatggtattgagctcgctgaactgattaacaaagtcgctgaaaacggttattcactccgcgtggtgaatgaacgtgacgctaccgaaacaccggcgacttctgccagccctcatcagttgccggaagacaatacagtgatacagagcgtgatgccattaaccactgaaacagcgctggatatcctcattgcgtggctgcaggacaatatcgactgcgaatcgggaattatctttgacaacgatgaggataaaacggattcggtagcactgttgccctgtatcgaacaggcccgggaggatgtccgtactcttcgtcatctgcagcttctgcaccagaaccggtaaatatcactcaccatacttcattccactgacgtcagcctgaacagggctggcgttttcgtttataaaccaaaagggaaaccgataatgtcagacatcacaatctcccgtccggaagtggtcaccgggcatacggacgttatctgctcaaccagtatccgccacattctggctgtacgaaagagtacactgctgcaaatcgacacacttatccggcaactggctgaaatatcagcaatgacagaaagtattggcggtaaagccgccccggactgggccatgaaacaggattttcgctgcggctgctggctgatggagaaaccggaaaccgcaatgaaagccatcacacgcaatctcgatcgcgaaatctggcgtgacctgatgcaacgttcagggatgctttccttaatggatgcacaggcccgtgatacatggtaccggtcactggagcacgataattttccggaaatcagtgaagcgaacattctgagcacatttgaacaactacaccagaataaggatgaggtgtttgagcgaggggtgatcaacgtcttcaggggactgaactggaattacaaaaccaattgcccctgcaaatttggcagtaaaattatcgtcaacaacctagtgaggtgggaccggtgggggtttcatcttatcaccgggcaacagactgaccgactcgtcgacctggaaagaatgctacatctgttcagcggcaaaccgatccccgacaaccgggaaaacatcactattcgtctggatggtcacatccagtccgttcagggtaaagagcgctatgaagacgagatgttcatcattaaatactttaagaagggatctgcacacatcactttcaaaaggctggaactgattgacagaattaacgatataatagccaggtactttccttctgtgctctcagcctgatcccgagtgtgattccctttcgatatcaaaagggactgcgggtataattgagggtacatttttaatcaaaccaaataaattatattaatatcaatatgataaaagaaattttcgattccgagtccggcaccactaattcttaagaacccgcccacaaggcgggtttttgcttttggatctgacaataaccttcacgaaaaaagttagcttataaagtctgggggaattactctcgccacgttaacgagagtaattttattgatactaatctcctgatactttacccccgtccaaactccagccgctgcacattcaccatcccagtcttctcagcagcactggcatcaatttgtgtcacccgcagcgcatatttttcatccagtgcgtttaaccatttcagcaggtcattaaacaccacaggttctatccagacctgaatattctccccacgatcggctatccgcctgatgaccaccgagtgcgcggaagcactgtcactgatgacccgcgatacctgcgcaggcgttgttgtggcagattttcgcgctgcaataatatccggcgcggcgttcttcagtcgggtgttcatcgccaccagctgctgcaatattgtctcctgttgctcaatccgttcgctcaacggctgccagatgaggacgtaatatccgacgctaaacaggaacaccaccgctgccagtaacatgcccttttcacgcggagaacgccccgccaggtgttgtgccagccagtgttcgccacggcttaactggcgttcacgccattgctgaaaatagtgaataaatttatcgcgtaacatgttatttcctccgcaacgttacgccgccggaaaccgcatcaccctctttctgtaacgcgtcctgttgcacaacataatcggttgccagtgcactacgcagtttgtcgaaactggcaaagttcgcggcccgtagctggaggtgaagtatctggcgtttttgatcaaaggtaaaaccacgcatttcgatgtcggaaagtgacgctgatttcagggtgctggctatcgctgacaactcggcgagcagccgggtatcgtcggcctgtgggcgatattttttcagcgccatcgtcacctgagagcgtaaattcacaatccgcttctgctccgggaacaacgttaagaactgttcctccgcctgggtgcggctttgcgccacctgttcgctgacgctccataacgtcacgccccgctccactgccagcgcaaccagaatcagcaatatcggcagaatcatcacccgccagcgcgcccactgttttcggtagctgacgcgaggctgccacggccctgtcagcaggttcccttccggttcgccataagtggtaatggcgggcagagctgtaacggtcaggcgttcagcgtctgcgccagcccatgctgatagcttttccggtgcaatgccgactacggttagcgaaagcggtaaatcctgctcattgagctgggcgcggaacatgaccggagccagcgccagcccggcgctccatccccggcattcatcgatgcggcagataacccgttgcgcatcgcaagccataaacccacaaggaatggacatccagtccggcgcgacggtagcgcgggtgatgccgttttcctgcaaccactgcgcaatgttgcgcatatgctgttggtgaatcactgctacggttgccagttgctggtcgatattcaacggggcgaaatgcagttcatcgatatcctggttcagctcttcttccagtaaggcgggcagaatggtcggtatctgcttacgggcgacatcaggcagttcaacctgccagacgctgatccattcgccgggaatgtagagtcgaatcgcatcggtttgcagccattgctggagctgttcgttagcaacgtcagaccagataccgtgctccacatcgggtgtacggcgctgccaatggatgggatcagcggcgcaaagcgggaaaaaaatctcaaggatggaactcactcactttctcctgtctgatgccagagaaccgaaaagtgttgtgggcccatgcggacaattaacgagttcatcgtcagttcaatctcattcacggtgatatctgaacgcagccagaagtaattgctgtccacgctcaggacggtttttagctgttttttagtacgctcatcgacgtcagcaagtagcggctgtgcaagaaactgatcgacatcttcccagcccttcgccggacgttgttgtaataacgcccgcgcctgaacggggcttaaccacgggtcaaacagcgcctcaagaatcacactttgcgtgacgtctaaagtattgatgttgatttgctggcggatcatcggcagcgcacagaccagcggtttcagtttttgataaagcccggcgtccattccctgtaccacgcgcatctcactgatatcagccagcggttgattcgcggcgtagaaaggcaccgaacgggcgagatactcgctgtcttcacggcccagacgtgtctgcacgctgcggtcctcgtcaataaactcccacaggctttcggctatcagttcggcccgataagcaggcacatccaggcgcgagatcagggcaatcaactgttgtaccgcaagcggacgcgacgccgttgtcggctgagcaagggcattcaggttaaagcaggcctgtgcgtcacgcagagtgacggcgatttgcccctgcggcagtgggaagaaacgagggccggaagcccacggctgtgccagatgcacgcgcttttcatttttcaggctcagactgagcgcgctcagcgccaggctttctgcactggcgctgtaccacagcgcctgctggtactcctgctggctgcgcgttctttccagttgctgctgcatccgcccggaaagcgtgatggttaccagcatcataactgccagcaataccagcaccacgaccagtgccattccgcgttttggtggtgaggtgatcatgattattgcggcccgcgtaacaaccagatgcgttcaatctcgccccattgcggcgaatgcagggtcatgcgtaccgccacagggatcgcctgtactgacgaccagctctcctgccagcgcgtgccgtcgaagaactgcaaacggagcgaatcggccggaatcaacttttgcattgtcggcttcacgctgcctgcggcatcggtcagcggccaggctaaccgttcgagataaccgtcatgaatgcggtaaccgacggtgagcagattactgcgcggcagacgcatcaacgggttaaccacaccgccgcgcacaaaacgcattccttcactctcagacgccagcacgccagcgccagccagtaaagctggttcacgctggccctgatcgcctcttaccggacgcggcatcatttgggtcagatcgtgggtcagaaaactcatcgtttgctgcatgaggtttagtttttgatcgtgtccggcgacggcgctattcacgcgcgtgacgccgttagtcacctgctgcgccatcagtgccagcgaggcaaaaatggcaattgccaccagcatttccagtaacgtgaaaccagcgcgagtccttctcactgttggcctcccacggcgctaaaccaggcgcgtcgtgactgaatcaccgacgaaaagtcttcgtgaaggctgacttcaatatccaccgcctggagcagcgcgttgcctgtactcagcggtgtggttcgccagtaccagctgcttcctgccatatcgctctcgccctggtgcctgaccgcccgctgctcgcgggtcatcaggtagagcagcgcggtctggttttcagccacccagcccgctaccgttttttcctcaagaatttgctgattactcagcgcaccgctggcaatctgtaacaccgccgtggcagccagcgcaaaaatcgccagcgcgagcatcacttccagcaaggtaaatccgcgcttcatggcattctctcatcacattgattgagggataacgcgccatcgtgcgccagttttaccgcccaacatgcgttttgcgccgccgagtagaagcgcagcgtaaacggcgtggcgggttcaaaaggcgaaaaacggatctgcggcgtcttctttttcgcctctttttgcagctccagttcaatatcgtgcagcgtcaggcgacgacgttgcagctccagcgcatactccttctgccagatatcacttccgggttgtaacagcatctgcacctgttttggcaccgtaacctgtgccgataaccgggtcgcggaaacgggcaaccactgcccctgacgacgctgcataaactgatagccaggcgcgtcgattagcacaccgagtgtctgcccttcaatcactgccctgtccttaaactgcgcaaagcgagtcagaaaatcctgtgctgcttttttcgcgggcggttcagaatcggtcgcaaacgtctgtaccacgcccgaactggcaaggccgataaggaaaatcaccaacatgatttccagaagtgtgaatccgcgttcaggcactgcttactgaaactcctgcaaattccagttaccgatatctgcgccagcgccttccccgttttcctgaccatccgcccccagggtataaacatcaaacagtcctttttcacccgggctgagatactgataatcattgccccacggatcctttggcagtcgtttgatgtatccaccagtacggtagttgcgggcgtctgccatattggctggctgctggatcagcgcctcaagcccctgttctgtggtcggataacgcccgttatccagtcggtacatatccagcgcattctccagcgccacgatatcgctgatggctttttgccgatcggctttctctttattgcccaacaggttaggcaccaccagacttgccaggacgccaagaataacaatcaccaccatcacttccagcagggtaaaacctgcccgtggtttttgtgtgcgggataacgaatacatgtgataactccgtaaattacattccaaccatattgttcagttgcagcatcggctcaaggatggcgatgacgataaacagcaccacgcccgccatcatcaccaccagcgccggttcaaacagccctaacgccagccccacctgggtatcaaattcccgttcctggttgactgcggcctgctcaagcatggtttccagttcgccgctctgttcgccggaggcgatcatgtacagcatcatcggcgggaacaggcgcaactccgccagcgcggcacgcagactgcttccttcgcggacgcgatctgccgccagcagtagttgttgttcgacatagcgatttgccgacacggcggcagcggtctgaataccttccagtagcggaacactgctggcggtgaggatgcttaaggtgcgggaaaaacgcgccgtattcagcccgcgcgcaacacgccccgtcacaggcaggcgcagcacggtttgatcccagcgcaggcgcatagcaggatttttaagtagccgttgccccagcaccagaagccccagcaaacccgccagccagtaaacgccgctggcctgtaacgcgtcgctcatggcaataagcgtgcgggtggaggcgggcagcgcgtgtccgagatgatcaaactgttcgatgattttcggcaccactgccgtcagcaaaatagtgaccacgcccgttgccaccaccagcagaaccagcggatagagcatggcctgcaacagacgtgatttcaggcgctgtcgctgttcggtgtaatctgccaggcgattgagcaccacgtcgagatgcccggatttttctccggcagcaaccatcgaacaaaacagggaatcaaagacgcggggatgttcgcgcaggctgtccgacagggtgtaaccttcctgaatccggctgcgcagcgccattccgaggctttttacatgcagtttttcactttgctcacttaccgcctgtaagcaggtttccagcggcattgctgcctgtactaacgttgccagttggcgcgtgaacagcgccagatctgccgccgccacgcgacgatgtgcgtgccgccgacgctgcaacatcccccctgacgaagtattcatccgggcttcaatatgcacggggataagctctttaccgcgcaacaactggcgggcatgacgcgcggaatccgcctcaatcatacctttggttttgcgaccattacgctccagcgcctgatagtaaaacagtgccattacgcctccatggttacccgcagaacttcatcgagagaggtttctccggcgagcactttctcaatgccgttgctgcggatacccgcagagtgttgtcggacataacgttccagctccagctccccggcctgacggtggatcaaatcacgcaatgtggcatccaccacgatcagctcatggatggcagtccgtccgcgaaaacctttgtgattacaggcgggacagccctgtggatggtacagagtgacggtacgggcgtcggtaattcccagcaggcgtttttcttcgtcagtggctggtgcgggctggcggcagtcgggacacagcgtgcgaaccagtcgctgcgccatcacgcccgtcagactggaagagagcaggaaaggctccacgcccatatcctgcaaacgtgtgatcgcccccaccgctgtgttggtatgcagcgtggaaaggaccaggtgtccggtaagtgaagcctggacggcgatttctgcggtttcggtatcgcggatttcaccgaccatcaccacatccgggtcctgacgcaaaatcgcgcgcagcccacgggcaaaggtcatgccgacgcgggtgttaacctgcgtctgaccgatcccttcaatcatgtattcgatggggtcttcaaccgtgagaatgttgcgcgaatggttgttcagctcctgcaatccggcgtacagcgtggtgcttttgccggaacccgtcggtcccgtcaccagaaagatgccgtgcggtttgtgtaacagctggcgcaactgcactgtcagttgctggctaagccccagacgctccagcgtcaggcgggcctggtttttgtccagcagtcgcagcaccacgcgctcgccccaggcagaaggcatggtggagacacgcacgtcaatcgcccggccgcccagcaacagcgcaatacgtccatcctgcggcacgcgcttttcggcaatgtccagccgcgccatcaccttgatacgcgacaccagcagcgaggccagtttgcgccccgggcgcagcatttcatgtaatgtgccgtcaacgcgaaaacggatcaccagactcttttcaaacgtctcgatgtggatatccgaagcgccttctttaatcgcctctgccagcatggcattgatcagtttgatgatcggcgcatcgtcgtcactttccagcagatcttccgtttctggcagttcttccgcgagagtaaaaaagtcctcagcagaaccgagatcttccatcagctggcgagcctcggaagagtcccgctgccagaccgcattcagccgctgttcaaattcggccccgtcgatttgccgcagcgtaaagggcgcgttcagcccccgctgcagctcctgcaaaacagagagcgacaacggatgcacatggaggatctccagcgacgcttcgcaccatgccaccaggctaaaccgacggctgaaactgtagggcagacgcacggtgttagcggtggtttcctgtgctacaggcaccattaacgcgttctcccggcattaaggaatgcacgtacttccggcggtaaggcctggttttgcgctggcagtaccggctgtgcggtgtgcggcatcaggcttaagccttgctcatcacgatagatctgttcggcgcgcatatagttatatttgcgctgcgacacgccgtctgccgccataccgtcacgcagaatggtcggacggataaacaccatcaggttacgtttttcttttttatccgccgtcgatttaaacaggttaccaatcaatgggatatcgcccagcagcggcactttcgccacgctttctcccgcctgatcgtccatcagaccaccaagcacaatcagctcaccatcgttagccagcacggtggttttcagtttgcgctcaccaaacaccacgtcgaggctggtctgtccttccaccttcgagacttcctgctcaatcaccatctgtaccgcgttaccttcgttaatctgcggcgtgactttcagcatgatgccgacttttttcctttctactgtattgaaaggattgctgttattggaaccaacagtagagccggttaataccggaacgtcctggcccaccatgaagaaggcttcctggttgtccagcgtggtgatgctcggcgtggagagcacgttcgagctggagtcgtttttaaccgcctgcaccagcgccatccagtcgcctttcaccacaccaaccgccgtaccgctaaagccggaaagaagctgggcgagcgtggagagatcgccgttggtatccggattaatggtggtagcgccgttttcactgatcaccgtcgagcctttctgcggtttcgcctgagaaatggctgcccccagcgtaccgatagggatctgcgtaccattagcaaactgcattaatccggcatctttcgacgcccactgcacgccgaagttgatattgctaccttcggcaacttccacgatcaacgcctcgacatgcacctgagcacggcgaatatccagttgttcaatcacgctttgcagcgactgcatgatgtcctgcggcgcggttacaatcagggcattactgtgtttgctggcggcgatggagacaacctcacgcccgctaccgaccgtgccttccgcctcttctttagccgccgtgagcgtgccgctgacctgcttcagcacatcgaccagatcttcggctttgctgtatttgagatagaacacctggctgttgccgctgcgttccatttctgagtccagccgacggatcaggcggcgcattttgtcccgcgtggccgggtcaccactgacaatcacactgttggtgcgttcgtcggcgacaatttgagatttcagcgtcgcaggctggttctcgccgctgtttttcgtcaggctttccagcacgcgggcgatttccgaagccgaggcgttatccagcgggatcacctcttcggtgcgattacccgcgtgatccacgcgctggatcacttctgtcaggcgctccacaacggaggcgcgtccggtgagcataatcacgttggagggatcgtaattaacaacattgcctgagcctgcgctgtcgatcatctggcgcagaatcggtgccagctcgcgtaccgacacattacgtaccggcactactttggtgaccatttcatcgcccgcgtagttgtcgctgccttcaccgaccagcggcagcggctcgactttcgcagcgctggatttcaccaccttcagcacgtcgttttccatcggtacgacggcatacccctgtgcttccagcaggttaaggaatagctggtaatactggcgttcattgagcggggtcatggtgcgaatactcactttcccctgtacgcccggccccataatgatggttttattaaggttagcgccgacggtttcgatgaacgatttcaggtcggtatctttaaaattagcggtgaaagtggcttcttccgcccagaccggtgaactgcataatgccgctgccagcaccagcggcagtaaacgcttttttgttttgaggccagttgtcttcttacgccagaccgacaacgtaatatcacgccaaaacacgatgaatgattctcctggattaaatgcggttagcgcagcgcgatggaaatgtcgtggcgcgcacccttgcgtaaaaccgtaagttgaatggaatccattgaaggtaactgccgcatcagagcaatcattgctcgtggatcagtgaaatcctgctgatttagcgcaatggcgatatcgccttccctgaaaccgctggcatcgaacagagaacgatctgcccccggcttcactgcataaccgacaatcccctccttacgcacaggcgtaagctggatatagttaaaaattttctgcggatctttcgccagtgcctgacgcacggcagtcgggatctcaactggcgcactggcagcaggctcagcaacagcttgctttgcttcgtcactgatggcttttttgttggtcacggctacggtggaacgctcttcttcagccaggctcaggcgctctatttttccctgatagcgcagcatcacatggtcgcggttgatttcctcaatcactgcgttgtgcgagccaagcgtttcaccctgcaaatagacctgctgtttgccaccttcttcaataaccgcgccgggtctggcaccaaaggcgatcccacgcaacaccacattaagacgcgtttctgccacagatgcaggttcgggttgttttaccggcgtggcgacgggctgatatttgccaaaccagttttgctggctgattaattgcacgtcatttttatcgaacgtttttgcatccgcacggggcggtttattcgccgatggggaaacagccgtatattccgcagaaaaggagaaatagcgccagagtgaatgcgccacttttgcagaaataataagcagcatcagccagaacatcccgcgtacaatttttcgcagatgctctttgtctgtattaaaagattgtctctggttaagagtgtgacgaatttttgtcagccattgaatgagataaattcgtgcgtcacgaaaaacaacccgcgccaatttatatctacccgacgttatgctttgactattccacaggtggtacgatccagtttccgctgatactggttacctgtacgtgtatcattaatcgttatgctgtaattaattccctcggtaatcattaatttcaccgttgggtcagcgcacatttgtcgttgatagctggttaaaaaggcgtcaggcgtctgcgtggtctgagtccccgcttcgctgataatggtcatttttaccgtcgtgccgctactttgtgccagcactaaggtatatcccgcagatttaatcggcaggttttggctgatattttgcgcctgttttttcgccagtaaactggcgttttcattatggctggcacagccacttaataatcctgtaacgctcaacaatagcgatattaataccctccctggcatctgttttatcgacatggtaaataatctctaaggttattaataagagttaaaatgtcactttgataatgacgtggttatcattaaaacaatgcctgtagataaagtgttgctataccgcccagacttaaacacggtccaaaaggcagtgtggttgatcctctttttgtaataacggcatatatcaggccgcagcatgaggcgattaaagcaacattgggcagcgacaatgcccccacccagccacctaacgcggcgaaaagtaatacatcgcccatgcctaatgcttctttacgcagaactattccggctatccaacgcagagagtaaaaagtgataaatcccaccaggacgccggtgactgcatcttgtagcgtgagcggactctgctgcgcccatgccgcaatcagtcctgtccacaatacgccctgagtaaaaacatcgggcagccattggtgatcgaggtcgatgacgctcgcggcaatcagccaggcggataatatcatcaccgccagcccccatccactttctggccagaccagactcgccagcaaaaaagcaagtgctgtcaataactccaccagcggataacgcttgctgattttcgcctgacagtcgcggcagcgccctttgagcatcagccaggagagcagcggaatattgtcacgaacgcggatggtctgctgacaatgtggacagtgcgaacgtggcagcgccaggcttatttttgactgcgcactcggcatttcaccgtgaaactccgccatttgttggcgcagcatgatggggtaacgccaaatcaccacattcaaaaaactacctataatcaatcctccgacggttgccaggacgggcatcgccgcagggtattgctgaaaaacatcaaaaagcatggctaaaggttatttgttgtaacttgctggatgcggcgtaaaacgccttatccgtcctacgggtgtctgccagcgcaattaatcgcggctttccccgtctgtaggcccgataagcaggcgcatcgggcaaatgtgttaacccggtgcgccttatttcatgccggatgcggcgcgagcgccttatccggcctacgggcttactcggcagacatcttatgctcggtaacctgattaatggtttccggtccctgttccggtttcggcagatcgagtgacgcgagcgtgttgtaagccgactggctcacaccgccctcgaagctcatctcgctcgcccccggcagctggtaagcattcgcgcccggattccatttcttaaagaactccgaaagatccgtctgggcgacccaggaggcacacagcatcagcgtgtccgctgcgttaccgttggattcagcacagtaattcttgccgccaaacttgtcattgctgacctcatcgccgcgtgctttacgatgcatcaactggaacaggttccagcctttcatcccttcacgctcgctgtaaaactctggcagaggagtgccatctggataccatttcttgatatcaaagtttttctctgcccattccttcagctgtgcgtacatcagcagacggtcacccgcaccgccgcgtgcccatgcctggttgttgctctcctccagatattccggtgcgacggtaatatcgtcagcgacacggttcatcttgccgagataacgatcctgcatgtacagcgccagcacgttgttagcgacttcagttgcacccggtacagtcaacggcgtttctgcggcgttatgaccgacttcatgccagatcagccagtcgttcagcggcgtcgtcggcagcgtggtgctgttcggcgagaagctgctgttcatcaccggataaccagagtgcgcatcaccgatggagatctgcacatcgttggtgaaacgatgtttgtggcccggcaagtttttataggtaaacatccggtgcttaccgtcttcgctatcacggccgtagaagtcattcatcgagctggcaaaggtatccagatcgttagcgaattgctccagtccgccagtgtaattgctggcattcaggttcttcttcggtgtggtatagacgaaagcgtctgattccagctcacccagcggagccggtgagttcagatcgtttttccatgcgccgtctttatagaacggtgcttttaccacgccagtaaaggtgaagctggcagattcattggtagagctattgcccttgatataaatcaggccaccgtaaggcaccttgaacttcaccgtaccgctagcgtccagagagtacgttttagtcactcttggcggacggttcagcgcaacttcatgcttctcacgtccggtcaggtcgtcagccagcgccacggtgacggtcacaggaacgttcgcattggacttaatggtgacctctttctgagccggtgcccacaggccagttgactgcatgttacctgcaaaccatttggtcggattcgagtacaggctgatggtttcagtaacgttctgtccctcttccgatactgctcccggatacttctcgacatcaactttgatgttcagatcccaccaggaacggcccagcatcaggcgtgtcagcggtttttccatatagttgagcgggtagctcgggttcatcatgcccgctttgctgctaccgtcaccgtagatcatgttgttatcgaccagcgattttttcagatctgcagaacacttggtgccgcctgcataggcatcattggcgtagcagttcaggaactcggtgaacgttttaaagcccagctcgtcatttttgccttcttcataacgatagctcgtatcgttccacagccagaccgacatgttctggtacagacgttccagatcgacgctgctcagacgctcacctttgcgaccattggtccggaagtagagctcatgctgatacagacgctgaatgttggtgcctaaatccgcagcctgcaccatcgcttttgcagtgtcggcgttaaggcttagttgcgtatactgtggaacatacatgccaccagtaaccggaacccccgtgccaggacgatattccaggcagttgacctcatagtgatatgccggattagtacactctttcagccccgggaacgcggcgaaaattttctccttcgcagccttcagagaatcctctgttttatgatcggcctcatcaataaaggcataacgcgtttcctgtttgccatctacatcttccagccagctggcaacttccagcttcggtttgtcatcaggtttgttttctacctgatatttccacttaacttcccctgtcttactatcgatggtgtacggcagcgcaccatctacggcaggataacgttcatagacccaaatgcccgttgcgcgctgctgacgaacgcggttcggatacccttgcggatcgttatttactaccgacttgttcagtgccatcgacagacctgcggcatccaacagacgcacaaaaccagacgcgctctcttccttaagattgctcatcacgttttccatgatcagcaccgatccacctttgttcagataggcgatcagatcggtcacatcctgctgagtcagcttcggtttgctggtatctgcacgcagcgggatttcataaggatcgttacccacctgagtcacatattcaaagccgttaaggatcagcagcggcatttcctgcggatcgagatcgccatagctacttaaatgctcaacagagatgcccgcaaaatccggatggaagtcgaacgcagcgctgtttcctgtaacctgaccatgacgtttaaaatagacagtatccaggttggtgcctacgatcatgctggctttcgcgtccggcttccatttatcgtcggacagatagcgcagcacgttctccatgaagttcttcatgtcatccgggtcgctgttgagcgtacactgcccatctttattaacgcccccgttccagctgtaaccgttcgggcaacgcaaaatgctgttgtagtgtgggttaccgataaccatcagtttgccctcaccgacttgccccagcgaaataaacggcaggttaaaggtggcggtatcgcgcgtaacgttttccggctcaacaagagaaggcgcttccgtaatgtacgccagctcgtttttatcccaggcgcgtttttcgccgaaggccagccagtagtttttatcattacgcgccatcagaatcgggaaggccgcgttggagatattcaccaccgcctgaccgcgcgcattacccgtgctgccatagaagttggtggagtcatggaatacatggaacttactgacagatttgtagttcgtatccacgccccacagcttgttgataacgccctgaatctggccgtcattaacattgcgcgtcgtcagcgagaaccagcgagcctcgttacaaccgtcggttttcgcacaaatcgcggtatcgatctctttggcctgacccgtcttaaactgctcgataaattcgttaggcagattaacgacttgctcaccttcccccagcgtcgcaccattggataacgagagattgataatctcgttaatcacgttgggatattcagcaaaaaccttgcgtacttcatccggaactacacgggtattattttgcccggtcgtcgaatagcgatgaataagctgatcgatattcgccccgcgaacttcatcacccagttcagtcagcgcaatggtcgacttattgccgcgcactgaacccagttcaaaggtatcgataccaaaggagatggtttcgccccagctaaaagaaaattcaccattttcccctgtcacgccacggcctgaattggtgtagtagttgacgccagcaacaccatatccctggctatccaccaggcgaccttctgagagaatgatttccgaaggttgatactgataaaactcttccgcgttagccgacacgaaggaggcgttcagatccggttttgttcccggagtcgtgacggggactaccggtgaagtatgagtggatggcgctttatcagtcgcggcattgttttccacctcttcattgaccagctttttgaactcttccggtgccagatcgatttgcttatacagcgagtcgaaacgtttactctcgatcaccgaggagaactccaggcacacctgttctgtattcgccgggcaactgttcatggaggtgaccagcgagagcgcattgcttttcttgttgtcggaacccgccagttcttgcgcgtcctcaagactaaacgacactttttcaaccgcacgcaggctacgcgcagcttctgactgggtgtcgaaggtagcaattgtcgtgttgttccctgccacacaggtgactttgtcgcctggtgtaaaggtaaagccatcgctggattcatcattacaggtgatatcaccagttacccgcaggcttccgcccagggtcagataacccgttttcgtaggaacaggttctggctccggttctggtgttggctcaggatcaggtgtcggttccggcgtaggttcaggctccggcgttggctcaggcgtcggctccgggtttggtgttggatcaggtttcacttccggcaaagaccctgttccagaatctacaggcggcgtatcggaggaagatccggaaccaccgccatcacaaccggctaacagggttgcgctcaaaatagccgctaaaagcgatttcttatatttaaatttcttattcattaataacgcaagtgacaaaacaatgttaaaaaattcgtaactgggagaaatagttttatgctttatcttctctaataacttcctccattcttaagaaaacgacatcattgatagaaaacaggtgaaatttataagaataacccctatacgatgtctatctggctatttttacgaaatttcaacaaacaaaaaattaacaacatttcacaacgtaactatataaatttgttggtagttttaacgattaagattgcaaaagcaacagatagaacggtgtttgctcatcaagcgaacataattaatacagacttgttttgcgtgataaaaaaatagatgttctcacgctcttaattatttagcaggttatctgaacgcaaaacattattgctgcatggataataaagcgagaaatgattttcaattaataagacagaataatgtaaatgaagccggatgatattaacgatcatccggctttattgatttacgagactaacatcccggtaaacacatacgcctgcagcagggtgataatgccgataacgctggcaaaaatcagactgtgcttcacggtgtagcggaacagttcagattctcggcccaccatgcccgtcgcggcgcaggccacggcgatagattgcggggagatcatcttgccagttacgccgccgctggtgtttgctgccaccagcagggtgtcagagacgttgatttgctgcgccgtggtcgattgcagtgaaccaaacagagcgttcgaggaagtgtccgagccggtaaggaatacccccagccagccgaggaatggcgaaaagaacgggaacatcacaccagtacccgccagtaccagcgccagcgtggtggacatgccggaatagttggtcacgaaggcgaacgccagcaccatgccaatcgacaatatcggccacttcagactaattagcgtttcggcaaagacgccaatacctttcttgatccccacaccgaggatgaagatagagataatcgccgcaataaaaatagcggtgccgccagccgagaggggggcgaatttaaacaccgcatccattggcgttggttgggcgacaatgggtgccgctttcaacacttgttgatgcaaatgagggatctggaaattaatcaccagtgaataaaacgcgccgcccggagcaaataacgctttaaacggcttcatggtccagatggtgaccagcaccgttaagattaaaaacggtgaccacgcacgaatgatttgccccagactatattctgaaggcacgggaccgccagaagatggcttatttaccaccatcgcacctgcggattgtcccatgctgattgccgtttcggtatttttcggccgccagactttaaggaataaagcgagtgagacgatactcaccagcgccgaagtaatatccggcagttccggaccaatatagttagaggtaaagaactgagtgacagcgaagcttcccccagcaaccagcgccgctggccacgtctctttcacccctttccagccgtccatcattgctaccagccagaacggcacaagaaccgacaggaacggtaactgacgtcccgccattgcgccaatgtggaacggatcgattcccgttacctgaccggcgaccagaatcggcacgcccaacgcaccaaacgccaccggcgcagtattggcaatcagacacagccccgccgcgtataacggtttgaagcccaggcccaccagcagcgcaccggtaatcgccaccggcgcaccaaagccagccgctccttccagcaacgcaccaaaggagaaaccaatcagtaacacctgcaaacgctgatcgtcggtgatggagataaccgagctgcggataatatcgaactgcccgctggcaacggttaatttatacaggaacaccgccgcgacaataatccacgcaattggccataatccataaataaagccatagcccgcagcagcaaatgccatatcaatcggcattttaaaggcgaatattgcaatcaggatagataatataagggttattgctccagcgacatgtcctttcagacgtaataccgcgagtgcaacgaagaagaatattatcgggatcagggcgaccagagcggatagccccagtcctcccatcggcatatacatttgggtccaggtaaccatattgttcagtctcttattatctttatatgcttgatatacttaaggttgtaataagcaaaagaggactgaactgtaaaatataggcgttatactttacagcaacagtacgccgctaacgcaattgctacctctggcataacaagtatatcgggtaagggtttctgttccgcacacgcagacgcagagtatcgttaagatgtccatattgttgttttaggcccgctagtaatgcgctacgggtatttaatattgttaaaccctgataatcgctccggttatttccgggataaatgtactaccgcagttactatcatagccccgacaataaaacttgccggggcttttttgacgctattaatgactttctttttcgcgtaaacgccaggcgtgtaataacggttcggtatagccgtttggctgtttcacgccgaggaagattaaatcgctggcagctttaaaagcacacgagttagcgaaattccccgccatcggacgataagccggatcgccagcgttttgctgatcaaccactttcgccatattctccagcgacgcctgcacctgttctttggtcagaataccgtgacgtaaccagttggcgatatgctggctggagatacgcagcgttgcgcggtcttccatcaacgccacattgtgaatatccggcacttttgaacaaccaatcccctgctccacccagcgcaccacgtaccccagaatcccctgcacgttgttatccagctcttgttggatctcttgcgccgaccagttagcgttttcagcaaccggaatagtcagcagatcgtccagcagcggttcaaattcagcattgaactcggtctgggcaatgttggcttgtacgctctgtacgttggtttggtggtagtgcagcgcatggagcgtagcagcggttggtgacggaacccaggctgtgtttgccccggcacgcagttggtcgcccttctggctgtacatgtctgccatcaggtccggcattgcccacatgcctttaccaatttgcgctttaccgcgcagcccacagaacagaccggaaagcacgttattacgctcgtaggctttgatccaaggcgtcgatttcatctgatttttacgcagcatcgggccagcttccatcaccgaatgcatttcatcgccggtacggtcgaggaaaccggtattgatgaacgccacgcggttgcgcgcctgagcgatacagctacgcaagttcagcgaggtccgacgttcttcatccataatgcccattttcagggtattcggtgccataccgagcattgtctcaatgcgggtaaacagtttgttggcgaacgccacttcctgcggaccgtgcattttcggtttcacaatatagacgctgccagtgcgcgagtttttctgcacttttaaatcatagagggcaatcgcgccagtcatgacgccatcaagaatgccttccgggatttcattgccttcgctgtcccaaatcacaggaatggtcatcaaatgacccacgttgcggataaacagcagcgagcgtccgtgcagagaaatttcagagccatcggcggcggtgtaatgacgatcgtcattcagtttacgcacgatttgccgaccgtttttctccattttctcttgcagagtcccctgcatcaggcccagcaggttgcggtacagcaggattttatcttccgcatcaaccgccgcgaccgaatcttcgcagtcgagaatggtactgatagcagcttcgacgataacatcgttgatgtgcgccggatcgtctttgccaatccgcccattggcatcgatttgcagctcaatatgcaggccgttatttttcagcaaaatgcaggtcggcgcagcggcatcgccacggtaaccgacaaactgtgctggagtacgtaacgtggtttctttaccatttttcaactggatgcgtaattgtttatcaaccaccttaaacgccaccacatcctgatagctgccgttttccagcggtagagattcatcgaggaaacgccgaacccaggcgataacctgctcaccgcgttgcggatcgtagccgctgaccatcgccccttcctgcgggatgatgtcgctgccgtataacgcatcgtacagtgagccccagcgagcgttcgccgcgttcagcgcgtagcgggcgttcattgccggaaccaccagctgcggccccgcctggctggtgatttcgctgtcaatgcccgtggtttccaccgtcacgcgctccggttgcggcaccaggtagcccagttcacgcaggaaagatttataggccgctttatcttttaccggccccggattgctgcgatgccactcatcaagcgctgcctgaatgcgatcgcgttctgccagcaactgacgattttctggtgccagatcatgaacgatctcatcaaaattgcgccagaacgccgcagcgtccagccctgttcccggtaaaacttcttcatccacaaaacgtttaaaattggcgtcaatgcgtaaacggctctgggttatggtttgactcattgtttatctcctcgttttcgcttatttcgccaacaccgctgctgccgctttcgcgacctgcgcatcctgtgctccggttaaaccagaaacgcccacggcaccaataatttgcccatccacaacaaccggtacgccgccttccagcgacgttaataacggcgcagtcacgaacgcggtacgtccgttgttcaccatctcttcatagcccttagtttcacgacgccccagcgcggcggtacgcgctttctcctgggagatataagccgcaatcggcgcgcaatcgtccatgcgacttaacgccagcagatgaccgccgtcatcggcaacagcaatggaaacagaccagttatttttctgcgcctcttcctgacctgcggcaataattgcactcgccatttgctggctaagaatgactttagttttcattttgttattccttttcaagggcttgttctacaatttcaatccagtgacgcacagaggtacgaccggcgctcgccagatgcgtctggcaaccaatgttggcggtgacgatcatttccggtttgccgctttccagcgcattcattttgttatcccgcagctggcgtgccagatcgggatgcgttaacgcatatgttcccgctgaaccgcagcacagatggctgtcgggaacgtccgttaaggtaaatccaagacgaagcaacactttttccacttcgccgttcagcttttgcgcatgttgtagggtacacggacagtggaaggccagctttttatcgccgcgaattgccagtttttccagcggttcctcgcgcagaagttcgactaaatcgaccgccagttcactgacctgacgcgctttatcggcatataacgcatcgtttttcagcatctgcccatactctttgacaaacgcgccgcagccgctggcggtttgcaaaattgcctcggcacctgcttcaatcgcgggccaccaggcatcaatattattgcgcgcccgtgccagccctttctcctgcgcattaagatgatagtccaccgcgccacaacagcctgcttcgttagctggcatgacgctgatccccagacgatccagcactcgcgcagttgccgcgttggtgttgggcgaaagcgtaggctgggcgcagccttccaacattaaaacccgacgcttatggcgcagcggcggacgcggtttagctttcaccgtttcagcaggcagttttgctctgacctgttccggtaaaaacggtcgcagcaccagccctacctgcgtcagcgcacggaagaccgccggacgcggcactacctggcgcaatccttcgcgcagtattcgctccggcagtgggcgtttcactttctgctcgacaatatcacgcccgatatccagcaaattgtgatagcgcacaccagaaggacaggtggtttcacaattacggcaagtgaggcagcgatcgagatgctcctgtgttttaagcgtgacttcgttgccttccagcacctgtttaatcagatagatgcgcccgcgcggcccgtccagttcatcgcccagaagctgataggttgggcaggttgcggtacaaaatccgcagtgaacacaggcgcgcaggatgctgtcggcttccagcgcgcgcgcgttctgccgcatctcttcagttaattgggtttgcatagcctgctcctcaaagttccgcgtacatgcgaccggggttaaacacgccgcaagggtcgagctgctgtttaagctgctggtgatagcggaataaaggagccgatagcggggcaaagccaccatctccggcactaaagcgggtcgcatgaccgccagcgttgcgggcgatgcgatggatttgattgtcctcggctgtcgatttcagccagcgtaacgccccgccccagtcgatcagttgctcgccgggtaaatccatcatcggcgcatcactgggtaatgaaatgcgccataaggtacctggtaacgagaagaacggcagttgttgttcacgcaattgctgccagaactgaccggcaacctcttcgccacccagcagttcacgcgctgcttttaccgatccttcgccgccctcaaggcggatccacaacgcattgtcgaagtaacataagccactaatgggtaatggctggagttgccactcggcgatttcactcatggcttcttgcaggctgatttcccgacgcaggctcagggaggcgcgcggtcgcggtaacactttcattgagatttcagtgagcacgccaagacaaccgtagcttccgaccattaaccgtgagagatcgtatccggcaacgtttttcatcacttcgccaccaaaacgcagatgttttccagcgccggtaatgatgcgcgtgccgaggacaaaatcgcggaccgaaccgctccacgggcgacgcggccccgccagcccgcaggcgaccatcccgccccaggtggcttcttcaccataatgcggcggctcacaggggagcatttgccccgcgctttccagcgccgcttcaattgtcaccagcggcgttccgacacgcgcggttatcaccagctcggtcgggtcgtaattaacaatgccgcgatgacaacgaacatccagcgtttgcccggtgacagggcgacctaaaaaggctttgctattgctgccctgaatcaccagcggcgttttatcgctaatcgcctgattcacctgctccagcagcgcctggctgtaatcacactcgcgtagcatcagaaacgctccagttcagggaaaggtaaatgaccgtgatgcacatgcatggcaccaaattcagcacagcggtgtagcgtgggaatgtttttcccagggttcagcaaaccatcggggtcaaacgccgccttgaccgcatggaaggtcgtgatttcatcgctgttgaactgggcgcacatttgattgattttttctcgcccgatgccatgttcgccactgatgctgccgccaacttcaacgcagagttcgaggatcttcccgcccagctcttccgcgcgggcaaattcaccgggttcgttggcatcgaaaaggattaacgggtgcatgttgccatctccggcatgaaagacgttggcaacacgtaaatcatattgctgcgataaacgggcaatgccttccagtacgccaggcagggcgcgacgcgggatggtgccatccatgcagtagtaatccggggagatacgtcctaccgccgggaacgcatttttgcgaccggcccagaaacgtacgcgctctgcttcgtcctgtgccagacggacgtcagtcgcgcccgctttcaacaagatgtcgttaacccgctcgcagtcttcctgtacgtcagactccacgccgtccagctcgcataacaaaatcgcttcggcgtcgacgggataaccggcatgaataaaatcttccgccgcgcggatcgacaggttatccatcatctccagcccgccggggataatgccattggcgatgatgtcaccaaccgcaagtccggctttttctaccgagtcaaagctggctaacagaacccgcgccacgggcggcttcggcagcagttttaccgtcacttcggtggtcacgccgagcataccttccgatccggtgaacagcgccagcaggtcaaaaccaggtgaatccagcgcgtccgatccaagcgtcagtgcctcgccgtccagcgtttgcacttcaattttcagcaggttatgtacggtcagaccatatttcaggcagtggacgccgccggcattttcagccacattgccgccaatggaacaggcgatttgtgaggaagggtccggtgcgtagtagagattatgcggtgcaacggcctgggagatcgccaggttacgcacgcctggctgcacgcgcgcgcggcgaccaacggggttaatgtcgaggatctctttaaagcgcgccatcaccaacaacacacctttttccagcggcagcgcgccaccagaaagcccggtgcctgcaccacgggtcaccaccggtacacgcaggcgatggcagacagccagaatcgctgtcacctgttccatttgcttaggcagaacaaccagtaatggacgcgtgcgatacgcgctcaacccgtcacactcgtaaggaatgatctcctcatcggtatgcaggatctcaagtccagggacatgctcacgcagtgccatcagtaccgatgtgcggtcgacatcgggtaaagcgccatcaagacgctcttcgtacaagatgctcatgagtaggcttcgctttgttgtgttgtgtggcagctgatttttgcgcgctgcttctgtgaacagttattaagcgggcttttcgttttcgtctatctctttagctaccggtcagaccattttttttccagctctgtgaccttgtcttggttaactcaatgttaaattgatgtaacataatcacttacgtgatgtgcgtgttttgcgagttaagaacagaaaaattggtcctacctgtgcacgaggtccgggaatgaaagatgaacgtcgccctatttgcgaagtggttgcagagagtatcgaacggttaattatcgacggcgtactgaaggtcggtcagccgcttccctcggaacgtcgactgtgtgaaaagctcggcttctcacgctccgcactgcgtgaagggctgaccgtgctgcgcgggcgcgggattattgaaacggcgcagggtcgcgattctcgtgtcgcacggcttaatcgggtgcaggacaccagcccgctgatccatctgttcagtacgcagccgcgaacgctgtacgatctgctcgacgttcgcgcattactggagggcgaatcggcaaggctggcggcaacgctgggaacgcaggctgattttgttgtgataacccgctgttatgaaaaaatgctcgccgccagtgagaacaacaaagagatttcgctgatcgaacatgcgcagttggatcacgctttccatctcgccatttgtcaggcttctcacaatcaggtgctggtgtttacgctgcaatcattgaccgatctgatgtttaattcagtgtttgccagcgtaaataatctctaccatcgaccacagcaaaaaaagcagatcgatcgccagcatgcgcggatctacaacgcggtgttgcagcggctgccgcacgtcgcccagcgcgcagcacgcgatcatgtgcggaccgtgaaaaagaatctccacgatatcgagctggaaggccaccatttgattcgctcggcggtgccgctggagatgaacctgagttagctggtattaaatctgcttttcatacaatcggtaacgcttgtacggctccgccccaatgcgttccagcatgttattcatgcctgtattggtttcgaggatccatgacatctccagcgcatcgatcttccggcgggcaaacggatcgcgtaaggcttcaatcaataacagcgcaatcaccgggccgatgcggctgaactgatactcgtcgcgcacgcccatcagcggtactcgcgcagttcgcacaccgctgactttcaaacgccacagcaattttgcccagccgaagggaaagagcgatccgttcagatcggcaatcgcctcgttgatgttcggcaagccgacaataaacgcgcagggtgcagaatcaatctcagcgatatagatcatatcgtccggcaccagatatttaagttgatcgcccatggtcgcgaattcatgttcggtaaacggcacaaatccccagttgtgctgccagccagagttgaaaatctcacgcaggatctgcatctcttcggcaaaccgctgacgattgatgcagcgaatggtcacctttttgcgcacctgatccatcagtttttttagcgccggagagaaagtgagatcggttcgctgcatccaccacgccagtaaatcaatgcctttgtgataacccagttgttcaatatgcgcggcataccacggtttgccgtgtggcatcatcgcacagggtggtgtgtcaaaaccttcaatcagtaatccgctttcctgattgatattcaggctgaaaggaccgctgatcttacttgcaccttgtgacttcaaccacgcttccgctgcgccaaacaacgcggcaaaaacctgcggatcatcaatggcgtcaatcatgccgaaatgaccggtatctttgccgtaacgctcgcggtgcaaggtatctatttgcgcggtaatacgcccaactatctgccccgctttttttgccacccacgcctgccagatgatatggtccgtccccggatttttcgcagacaaatgctcgttgcgttcaatgaataaagggggtatccagtttggatcgtcgggataaagtgatgacggaaaagcgataaatgccttaaggtcatttttattaattactttttcaattttaatcatcagcagatcgcattccatagttctgttctgtgggtaacaaataattaacggtgacaaacaggttgcaacagcaacgaacggcaccttaataatcaacccaatgaatacaaacgacgaataaatagtatttattaatgattacgataaggtcagagactacacagaagcgccacaatgccttttgtcgatttaaggcgaccggacaaggcttcttcttaatatattcataaattaaatatcattcacaataaaaacaaaaaaactcaaactcattatttaaatcaatgttcattttcacactgatgaaaatactatctcatttatcttttatgcctatataatccaccgcattattgtcattttattttggatatccaattttttcgtggtgtatatgcctaataaaatctttacgcattccctacctatgcgctatgccgattttccaacgcttgttgatgctttggactacgccgctctgagtagcgccggaatgaatttttatgacagacgttgccaacttgaagatcaactggaatatcagacgttaaaaacgcgtgccgaagctggtgcgaagcggttgttatcgctgaacctgaaaaaaggcgaacgcgtggcgctgattgccgaaacgagtagcgggtttgtagaggctttttttgcctgtcagtatgctggcttagtcgccgtcccgttggcgattccaatgggcgtcggtcagcgggattcctggagcgccaaactccagggtttactggcaagttgccagcccgcagccattatcactggtgatgagtggttgccactggtcaatgccgcgacgcataacaaccccgaattacatgttttaagccacgcctggtttaaggcattaccggaagccgatgttgcgctccagcgtccagttccgaacgatatcgcctacctccagtacacctccggcagcacccgttttccccgtggcgtcattatcacccatcgcgaagtgatggctaatctacgtgctataagccacgacggcattaaattacgccctggcgaccgctgcgcctcctggctgcctttctaccatgatatgggactggtcggctttctcctgacccccgtcgccacgcagctttcagtagattatttgcgcactcaggattttgccatgcgtcctctgcaatggcttaaattgatcagtaaaaatcgcggcaccgtttccgttgcgccgccgtttggctatgaattgtgccagcgccgcgtgaatgaaaaagatctcgctgaactggatctttcctgctggcgcgtcgctggtattggtgcagaacccatctccgcagaacaactccatcaattcgctgaatgtttccgtcaggttaactttgacaataaaactttcatgccgtgctacggactggcagaaaatgcgctggctgtcagcttctctgatgaagcctccggggttgtggttaacgaagtggatcgcgacatcctcgaatatcagggtaaagccgtcgcgccgggtgcagagacacgcgccgtatcgactttcgtcaactgcggcaaagcgttgccggaacatggtattgaaatccgcaatgaagcaggtatgccggtcgcggaacgtgtggtaggccatatttgcatctccggtcccagtctgatgagcggttactttggcgaccaggtttcgcaagacgagattgccgcgacgggctggttagacaccggcgacctcggttatctgctggacggttatctgtatgtcaccggacgcattaaagatctgattattattcgtggccgtaatatctggccgcaggatattgaatatatagcggaacaggaaccggaaattcattctggcgatgcgattgcttttgttaccgcccaggaaaaaatcattttgcagatccagtgtcggatcagcgacgaagaacgtcgcgggcagcttatccacgcgctggcggcacggatccaaagcgaatttggcgtgaccgcggctatcgatctgttgccgccccacagtattccccgaacgtcctccggcaagcctgcccgtgcggaagcgaaaaaacgttatcagaaggcttatgctgccagtcttaatgtgcaggaatccctggcatgaatcaaactgtcgcggtgacgggcgctaccgggtttatcggtaaatatattatcgataacctgctcgcccgcggctttcacgttcgcgcattgacgcgtactgcccgcgctcacgtcaatgataatctcacctgggtgcgcggttcgctggaagatactcattcacttagcgagctggttgccggagccagcgtagtggtccattgcgccgggcaagtgcgcgggcacaaagaagagattttcacccgctgtaacgttgacggcagcctgcgcctgatgcaagcagcaaaagagagcggcttttgccaacgttttctgtttatctcttcgctggcggcgcgccatcccgagctctcctggtatgcaaaatccaaatacgtcgccgagcaacgactggcagcaatggcggacgaaattacgctgggcgtttttcgcccgacagccgtgtatggtcccggcgataaagagttaaaaccgctgtttgactggatgctgcgcggcctgctgccacgacttggtgcgccagatacacagctctcttttctgcacgtcaccgatttcgcgcaagcagtgggtcagtggttaagcgccgaaactatacagacgcaaacctatgaattatgcgatggcgtcgccggcggctatgactggcaacgcgtacagcaacttgccgccgacgcccgttgcggttccgtgcgaatggttggcattcctctgccggtactcaccggccttgcggatatcagtaccgcgttgagtcgcctggcaggtaaagaacctatgctgacccgctcgaaaattcgtgaattaacccacgccgactggtcggcaagtaataaccgtatttctgaagatattaattggtttcccgggattagcctggaacacgcattacgcaacgggctattttgattgtcttgtttaaaggtgtgttaacgtttctatggtaaatcgtgaaatagtaatggattacatcctttcctgtttacaggatttggtcgaaaacggtgtggaaattaagcccgacagcgatctcgtcaacgatcttggcctggagtcgatcaaagtgatggatctcttaatgatgctggaagacagattcgatatttccattcctattaatattctgctggatgtcaaaacccctgcgcaattaatggaaactctacttccatggctggagaataaataatggggctatacgataaatatgcgcgccttgctggcgagcgactgcaatttagtgacaacgggttaacaccgtttggcacctgtattgatgaagtgtattccgccaccgaaggccggatcggcaataaaaaagtgattctggccgggaccaataattatctcggtttaacctttaatcatgatgccatcagcgaaggtcaggccgcgttagcggcccaaggtaccggcaccaccggttctcgtatggcaaacggcagttatgcgccgcacctggcgttagagaaagagattgccgagtttttcaatcgccctaccgctatcgttttttcaaccggttataccgctaatttaggcgtcatcagcgcacttgccgaccataacgccgtggtgttactggatgccgacagccacgccagtatttatgacgcctgttctctcggtggcgcggaaattattcgtttccgccataacgatgctaaagatctggaacggcgcatggttcgcctcggtgaacgggcgaaagaggcgattatcatcgttgagggtatctacagcatgctcggtgacgttgcgccgttagcggaaattgttgatatcaaacgtcgtctcggtggttatttgattgtcgatgaagcgcattcgtttggcgtgttaggcgcaacggggcgcggactggctgaagctgtcggcgttgaagatgatgtggatattatcgttggcaccttcagtaaaagtctggcctcgattggcggttttgctgtcggttcggaagcgatggaagtgctgcgctacggcagccgcccgtatatttttaccgcctctccttctccgtcctgcattgcgaccgtgcgctcgtcgttaagaactattgccacacaaccagagctgcggcaaaagctgatggataatgccaaccatctgtatgacggtctgcaaaaactgggttatgagttaagttcacatattagcccggtagtgccggtaataatcggttcgaaagaggacggtttacgcatctggcgcgagcttatttcgctgggcgtttatgtgaatcttatcctgccacctgccgcgcctgcaggcatcacgctgctgcgctgtagcgtaaacgctgctcacagtcgtgagcaaatcgatgccatcattcaggcatttgctactctgaagcagtaatgtgagcccgccgtggtgttgcgccacggcgggtttaatgttgtctgtcataccaatacaccaggctcaacgccaccagcacaaacgctatcggtaaaccgagcgcggtaacaggtgcgctcaacgcaaatagcaatcccagattgaccatgatttgatagctgatccaggtgagtaagccaacgatgacacctacagcgagacggctacccatccctggcgagcgcggggcgctaaaggtaaacggcacagccagcaaaatcatcgccagggtcaggatgggttgccccagtttttcccacagtgcaaggcggtattcgctgctgggttgcccggtttcctgcaaataatggatgtaatgattaagctgacggacagaaaaagtattgcccggcattgataactcttcaagatccatactggtgaaggccgattgccaggcaagattatctaatgtttccagcgtttctttgccattcagccattttttatgattcacaccatgcaggatccacgttttgtcgtcttcaatggtggcactgcgtgcataaatgtaggattcgagcgagagatcgtcgcgataatgaaaaatctccacgcccaccggctggccctgctcgttcagcgatttcaccgtcacaaattcattaccacgcctggcccacagcatattgccggtaatgtcatcgtcctcccccaacgcggtggcggtcgatttgatttgcaacgcctgttgctgtaatggcgacgctacccactcatctatcgcgcctaacgaaacagtccacaatatccctgcaaccagcgccaccagtgcaatacggaagatagaaaaccccatgctgcgaatggcggtaagctcactgtttttcgataactgccccaggccgacaatccctcccaataaggcgataaatggcgaaagttcgaccagtgtgcgcggtaaggtcattagcaccaccagcaccgcctgagtccagcgataaccgcccgggctgacatcatccagttcgttaatcaggttgaaggtggtaaaaagcggcagcaatagccctgcggcggcggcaaaaccgagaaagagatgacggattaaatagcggctgaaaacattcatcgggaaaatttctgcagcaaagagaagtcgcgtgcgaccagcatcagcaggcccattagcatgagtccgggtactaaccacaaaccaggaatgaggggaatcgcgccgttagccaccagcgtacggcagacgtcaccgccataaaaaatggcaataaacagcaacgtcagtggcaataacgttgaaaatcgcccttgccgcggttttacccgacttaatgaaatggccagcagcgccatcaacaatgcggtcaggccacggctttgccgccattgcagttcggcatgatcggctggaaagacggagcgcgccagctccgtgaccgatttcgctttgcgtttgacgttagggctttgatccagcggattcagatgtaattgcagattacggtagatctgttcgttgtcatcacgcccctgatgatcgataagataggcagtgccgttgtgcaacataacggtcggtttctcgggtgatgggtcaaccacatcaaccgaacgggcgcggaaaatgcgggttcgattggcagtagaagtataaatcagcgcgtcagtcaggcgattattatcctgatcaaccgtctgcgaaaggatcattcgtccgttatcgttagtgttaaatttctttgcccgcaactggcgaacatccagctccgactgcgactgctgctccagttgataaatctgcgcataagcccacggacgaccatacatcgacagaagggtgacaaaaatacttagcggtatcgccagataaagaacggctttgtacaagcgtcccggactgccccccgccgcagagatagcggtaatttccgagtcggtatacatctgccctagcgtcacgccaactgacacatacagaccaacaggtaacaacatctccagtgcaatcagtactttgtagaaaacgatatccagcacaacatcaagagctaatgtcccatttgccgcttcggtcagataacgctgtgcggagtagctggcgaaaataaagatcagaaaaccgacgataatcagcaccagacggcgcgtaccacgcatgatgtagtgttcaaccagcttcatctcactaacgccctcaatcctttgagttttttattcattgatcagtttctgcgccagcgcaatgacatgatctacctcttccggcgtcaggctgccgtcctttgcccactgaatttgcccggctttattcagcaccagaatggttgaactctgctccagcaagcgccaggcaacgcgtccctgtccattgccgtcaataacgaattgcgcccacggatagcggcgtttatttttttcgattttgccaacgacaaaatagccagtaccaaagatggcatcatcagtgttcacaatggtggtgggctgaaaacgatcctgcggaaagtttgccgcttcaaccgctttaattaacagtgagttcttcttcttcgccgacttacgcccggcgatatactggataatgcggacttttcccgctaattgtgtgctgttccacttttggtagtgaatttcgtcgtcgctattcagaagcagctcgccgccttcctggatataaacaggggtaaccgttttgccagtgacgaaattgtgtgcctgcacacccggggctaagagcatgataatcagcgcaataatcaaacgagatgacatcattgctccggttatagcggaaaacgcgaaatcagcagctctaagcgctggcgaatatcgctatccagcgccaccggtgcatcatacgactggcggttttccatatcatccgccaccatgtcgtcgtgtttatcccccatcaggccattaatggcggcgaggaaacgggaaatctgtaacgcctctttattttcaggatcaagcgatcttaaggtgtcgtaataagaaacctgctggctgatgatttttcgcacatcatgaaattccctgccggttagtcgcggtttagcaattatctctttcagggcatgcatttgcttttgccgataggcaataaaaccgcttacgctttctaactggctatggcgtaatgaatagttcaccaacgaccagaccggagagcttaaataaatccgtaacaggttaccgtaatacgacacaatatttttcttaccgttacgaaagccgtcctgaaaacgccccagaaaaacggtcgttttgccgaataaaaatccggcctgatgcttctttaaatacagccgttgcgcaaaacgcaggtgcttgtagcgcgctcgcatgtatttaaattgtttgcgctcatcagcagtcagctcatcgcctttggcttgtttgcgaactaaacgcagtaattcctgacgattaacgccattgagccagaattgcaggcataacgcgtaattatcatggatgatttcggtggtacaacttagtgcaatagtcggcggcaaactaacctgtgcatcaacgacatcatcttcttcaatcgcaacaaatagacgctcgctcgcctcaagcgggaaatattttctcatcatcaggatttctctccggctgcgttataaagcaaggaatggcgcagaaaaaatgcctttaaggttggaattaacgagagcgccacgtccagacattgcccaccgaagtaagcaaacgctgctcccagcacaccaaacagatgacagaacatgaacagcaatacgatgtagccgattgaggcgatagtttgcgccacgagaaaagcgcgctgttttcccgccatcaatagcaatgactcctgcgggaaacccagcatcgaaatcacaattgcgcccagcatcacctgaatcaggtcatacgcttcgagatacttaacgccaaacaccagtgaaatgagcggcttgccgacgatcaacaccgcgagcgccaccagaataccgattccgcccgccagtaaaccggacttcacacctaacaaccacggtctggtggtgcgcggatctaaacgcatcacctctgggtaaaaacttttacccagcaaacccgctggcgttccggcggcgtcgaagaatgtcatggcgattttaaataacccggcggcagcgggtcctaacacgatccccaccaacactgtgctgcacgagttacgcgccgaccagatggagtgggcaatgttggttgaccagacaaaactccacgcgcctttaatgtgtcgggcagactcaaacagattcaatttgaaggcgttatggatatttctgcggcgtaattcgcgcgcggcaaaccaccagtacatggtgccgccaaccagattcgacacgtaccaggcaataacaaaacccgcaaaaccaaagtcaaaataccaggctgcgacgctccccgctgcgcgcagaaaaggtttcgtcgcctgctgtacagcaatcaaatcaaagcgatctaccgcacgcagaatgccggtcggcgtggaggaagccattgaaggaatgagcgtgcaatacagcgccgccagccaaaagctttggtcatccagacctaatgaatgagaaaggaatggcagtaaggcaatgccgccgacaatcgccaccgcgccgctgacgatatccagcgagaaggaaaatgagacgacattgcgaaattgctgcggattattgttggttaatgctggtgttccgtactgaaccaccagctgccatgtctgaaacttaataaaatcgctgatcgacttggcgtacgattgcacaatcaccagtacgccaaacatggcgggcgtcatccctttaccggcacacgagagcgccaacagacccagcaaggcgctcacgacattactggagcctaaccaggcgctattgcgaataatggtgcgaaacgcgccatctgcaaaccaatgtttgatgttaaaacccgccaattcagcctgaccttatcgttgatagtaaaaagtatcccgccagccttaagttaaacttcggcggtcagaaacgatggcaaccagagaaaccgccttctgtgcctgttccagcacttcgctgtagggcgctctggaatcaatctcaagaatttttgtgccgttatagccaatcttcgacatgacaccgattttgtcctgcagctcggcatagtcatggtcaggcttgcgggagatggcagtctcaatatcaatgcccaggcgaataattaattccgggcgatattgcgccatttgttggtataaacgccgttcgcgctgcgccagaaacatgctgattttcccggtcgcacgttcgacgccaatccccggtccatcataataaaagcccgaaatttcagcctgcgggaagcgatcgctgaccaccagaacgccactttgcgccagtcgctgaaccttgcgtagattcgccattcttcgcagcgagaagcagtacataatcaccgccgcccatagcgccggagatttggttttcatgctttgggttttcgaggatttggccgccagtcgccgttccagccagacgccaaccaacggcaatcgtttgattttgtcgccgtcttcgccggagagcagccccagatagcgccgctcggtttgccagtgttgttgcagcgatttcaccaggtcggtggtcagtgtggatttaccggtgccatcacacccgaccaccgcaatcagccccggaatgtagttgggctgcggcgcggttgtactattaacagtttgagtttgtagtgcatccattcgttaaatcatcccctatccattttggtgatcaggaaagcgcggcgtgaattgcgcgtagtgacgcttgcagaatttcatcggcggggtgtcgcccatccagttcaaggatctttgcgccattgaatgtcagttgcggcgtaacggcgattttttcctgtaacgctgccagttggtggtcaggtttacgcgcaaacgcggtttgttcatcaatgccaagacgaatcaacaatacgggcaaataagatgccatccattggtacagcttcagctcgcgctgccttaacatttttatccaaccgttaccgcccgtggtttttgccaattgcgggccatcaaagcgaaaccccggcacttcaacctgcgggtagcggtcggtgatgagcagaaagccttgctggcttttacacaacattttgcgaaacttgtacgcccgccagcaggaaagcagatagataaccagtgcagtaatattgccaggcggtgttgagggcttttcgtgcacatgtgccgctttacttcgcagataacgcccaaaaggtgcgccaataacagggagctgtgaaatccattcgccaattcgcccggacgattgcccgagataaatgtgttctgttggcattcttgctgccagttcatttaccaggcttgccgtgagggtcgatttacctgaaccatcacatcctacaatggcaataacacgcactggcgtggaattaattattgacatattacgttgattcacgaaaaacccggcagtaaataatgtattgaatattacgtggtccgtgctcagaatatccgttcaaccttattgtgacaatggttaattgtgacattgacctgaattacgctttcataaaaacatattaaccaaataaatatttttaatggatatttaaattaaaggatatattcatgcagtcaataacacctccattaattgccgttattggtagcgatggttcaggcaagtcaacggtgtgtgaacatcttattaccgttgtcgaaaaatatggtgctgccgaaagagttcatttaggaaaacaggccggaaatgtcggtcgtgcagtgacaaaattaccgttgatgggaaaatccttacataaaacaattgaacgaaatcaggtgaaaacagcaaaaaaattgcctggaccagttccggcgctggtaattacagcgtttgtcgcccgtcgcttactgcgctttcgtcatatgcttgcctgtcgtcgtcgcgggttaattgttctaaccgaccgttatcctcaggaccaaattcctggcgcttacgatggtacggtgttcccacctaacgttgaaggtggtcgttttgtctcatggctggcaagccaggaacgtaaagcgtttcactggatggcgagccataagcctgatctggtcatcaaactcaatgttgaccttgaagttgcctgtgcacgtaaacccgaccataaacgggaatcgctggcgaggaagattgccataacgccacagttaacctttggtggtgcacaactggttgatatcgatgccaatcagccactggaacaggtgttggttgatgcagaaaaagcgattacggattttatgaccgcgcgtggttatcactagtcaaaaatggaaatgcccgatcgccaggaccgggcattttcaggaaggttaaatcaactgcaatgctatccagtacagcccaccagaaagaaaaattgccgccggtaaagtaaatacccacgccatcaggatgctggttaccgttttacgctgtaacccaccgccgtccaccaccatcgtccctgcaactgcagacgagaggacgtgtgttgtggagacgggcatcccaatataactggcaagaccgatagacactgccgccgtcatttgtgccgccatgccttgcgcatacgtcatgccgcgcttaccaatcttctcaccgatggtcatcgctacacgacgccagccaatcatggtgccaatgccgagcgccagtgctaccgccatgatgatccacaccggagcgtactcaatggtgcttaacatatcgctgcgaagttttttcagcaggttctggtcttctttactgacgcctggcagtttcgctagcttcgcggaggtatcagagatgcacagcataatgcggcgcagctggctgcgctgactcacgcttaacggctcgtaactttccatattgcctggcagcatcgttttaacgcgcgcaatagcatcaaaggtatttgccggatgacagtgaaactctgttacttgcgtgccatcagtcgatgctgcaggcaatggaggttccatcgcaatcaacttctgcggcagttcaggatgctgttgcaggtagtgttcgaagttggtaacggcatcgcgggtacgggtaatttcatagccggacgcattcatattgacgacgaagccagcaggggcaatccccaccagtaccagcattaccaggccgatccctttttgtccgtcgttcgcgccgtgcgaaaacgccacgcccgcagcggaaacaatcagcgcaatacgcgtccagaatggcggtttacgtttgccttttttctttttgcgatcttccggaatgcggtgaatacggtcacgctttttcgtcccgctccagtagcgtcgcagcaggaatatcaggcctcccgcaatgaccaggccgacgataggggaaacaatcagcgaggagaaaattttggtcacttcacgcaggtttaacgcatccatcaccgatgagccggttaacagcgcgttggttaaaccgatgccgataatcgcaccaatcaaggtgtgcgaactggaggccggtaaaccgaagaaccacgttcccaggttccagataatcgccgccagcagcatggaaaagaccatcgccaggccgtgggttgaccccatattcagcaacaaatcggttggcaacatatggacaatggcataggcaacgctaagtccgcccaataacacgccaaaaaagttaaaaaatgccgccatcaccacagcaagttgtggttgcatggcacgagtataaataacggctgccaccgcattcgccgtgtcatgaaaaccattgattgcttcgtagaacaacacaaatgccagagcaagcaataacaaaagccctgtgtatatatcaaggccaacaaataaatttagcatatattagattacgccattttgaatttacgaacggacgcattatcagtgactttaacggcatgggcaaagtgaaatatcattttttaacgataaaaagagtgttatttcttgtgtatcagacaataagcattcattcaaaacctttagaaataatcaaaacacaggtattccactggttaatatattcacatatgaaatgaataaatattggaatatataaatattgaatattttgattaatccccgtactgattattcttcataatcagtacggggttgctacaacatgtattactttttcaccacaattaacggttcaatatcactctcttttttgatgaccagtgattcatcaccgcgcaaacacgtcccaccgtagttgccgccaacggtgaaggtacatacctgaatgtatttaccgtccactttcggcaaacaccacagttgctgatagatgtttttctgctcggcaaatttaccgctggttttgtccagcacctcttcatgatggctgacgaggtcgatattgctgccacagcgaccggcgatcggtttcactgcgtaacctgttttcaccagttcatcattaacagtgaaatcggtatccagcaggtaacgatggtgcgggaacagcgaccagaggatcggcagaatcgctttgttgccggggatcaccgtccacagcggctcaaagaccagcacttccgggcgcagcaatacgtcgataagacgcacttcgttttgcggatgaccggtacggattggcaccgcagcaaactcacggtcgctaacttcacgaatctgatcaaacgcggtttcccacgcccaggttttccacacgcagttaaccagtcgcccttccccatcaatcagttgcccggcagcatcccagcccagttcatccaatccacgcaagatacgcgtttcaaagcccgcctggtgcagcgcctgctccataaactgcgcgtgatagttttcctcgatatctttgtcctgcatgatatggacaaacggacgtgcacgactgtgtttccaggcaccagccaattcgttaatcagcccttccgccggattgaagccgttgcctttatagccctgctccgcccaacgttcgaggatcaagcccgcttcggtatgacaggaggcggagtcggcgttgtactcgtaaaccttcaggccacgctcatccatgcagaaatccatacgaccagtgatcatatggtgacggcgacgctgccaggagagacgcaaacgtggccagaggattttcgggatgtcgaacagcgccagcaggttgtcatctttcagcaccttgtcggttgcgtgaagatacatcaggtgcagctcgttggtggctttaattagctcctgctcggcactctcggtaatggtgtagtaatgataaggatcctgattgatcacctgaccgttggcctgcacataggcgttttgcagcggatctttttcatccagccatttaccgtcaaactggcctttgttttccaggcgcgctccgctgattttcagcagctcgcctgcaatttccggctgcggtaagctgtattcagtatcttccgtctggatcatccagcccagaatggtggtgtcatcaaaagtgtctttcagggtatagcagccgttttcgaccaccatctccagctcgcgcgtccactgttgcccttgcggcaacggggaatgaatcacgttctgttccgcaatacggactttgttgccatgcaattgggtaatgatggcgacatggccagtgtctttaaattcaccgcctttatcccagataagaagcgcacccgcgaccggcgcacgcggcgagccgttaggaaatgcctgcaatggcaggatgttgtcattaaccacttctcgcaggaagcgcagcgagaaaatctcccacgccatacccacgtcagtaaagaccacaccgtaattcagaaagagaaaacggcgagcaaattcaacgcattgccacttgtggcccatatattcgtcgtcgatatagctacggaatacggcgtcatcttcgtattcctgcggatcgagagaactgtaatctgaagagtagattgctaccccacctggggcgtagcccaataatgtcccgaacggggcatcctggctggtcgttcctttgctcatcactttacctttaacaatacaacctaagcagttggcgtaattgttgtgctctgattacctgctcagcgacattaaccggacagaggtcagactaatcatacacctcatcgcagcggctggcgcaaagggttaaaaaattcacattctgtacagcaagtgacctgctacactgcttcaacactaccactcagaaggcaactcactatgacagacaatacttatcagcccgcgaaagtctggacgtgggataaatccgctggcggcgcgttcgccaatatcaatcgcccggtttctggtccgacgcatgaaaaaacgctgcccgttggcaaacatccattgcaactttattcgctgggaacgccgaacggtcagaaagtaacgattatgcttgaggagctgctggcgctgggcgttactggtgcagaatacgacgcctggctgattcgtattggcgatggtgatcaattctccagcggctttgtcgaagtgaacccaaactcgaagatcccggcgctgcgcgatcatacgcataatccgccgatccgcgtgtttgaatctggttcgatcctgctttatctggcggagaaatttggctacttcctgccgcaggatttggcaaagcgtactgaaacgatgaactggctgttctggttacagggcgcggcaccgttcctcggcggtggttttggtcacttttaccattacgcaccggtaaagattgagtacgccatcaaccgctttaccatggaagccaaacgtctgctcgacgtgctggataagcaactggcgcagcataagtttgttgcgggcgatgagtacaccattgcggatatggcgatttggccgtggtttggcaacgtggtgttaggtggtgtgtatgatgccgctgagtttcttgatgcgggcagttataagcatgtacaacgctgggcgaaagaagtaggcgaacgtccggcggtgaaacgtgggcgtattgttaaccgcaccaacggaccgctgaatgagcagttgcatgagcgccatgacgccagtgatttcgagacgaatacggaagataagcgtcaggggtaagggttggtgttcgtcgcagcaagccatccaggccggataaggcgttcacgccgcatccggcaatcgtgcacaatgcctgatgcgacgctgccgcgtcttatcaggcctacgaaagctaatcatcacgcgctggtaatgtcgtaatccatttggcgcagtgcgtctaatgtggctttggcttcatcttcgtcgatgatgctcatggcaaatccgacgtgtaccagcacccactggcccagtagatcggcagggttaccttcacaaatcagggcgatattcacatcgcgcttgataccacatacttcaacctgcgcaagctggtgaatatcttcaccgacagccagcacctggcctggaacgccaatacacattattaactccggttattcaacttcaatacttttgacgatcagcgaatcgccggtatcgacacgcaaccgctcgccatgacagatcggacactgcgcatcgtgctgatgaatctccaccacctggctgcaatcccagcaccaggcctgggcgggtttatagacgatatgtaaatcgcacccttgcgccaccgttccgtggcagacaatttcaaaactaaaacggacggcgctctcctcaacgcaggagagcgcaccaatttccagccacacggcggtgacgcgcttaacatcgtgctgctccgcctgccgttggataatttcaacggcgctctggcaaagagacaactcatgcattttcgccactcctgcgaccaaacagcagggcgcgacgccctgcgtgtggtacatccggattcgtgactggcagcgaaaggatcattcgtgcgcagtcatccgtcaggcgttggccctcttcaatcgacatgctgtgcgaaagcggcgacatcagcgaacaggagagatattgcgaaacaccgtccagttcgccaacggtaaaggtcatagtgccatacggcagttgcagaccaattttttcactcactttgcgcagcggccagagttgatccgggccggggaagataactgcactcagcatccacggggtgatcacacaccccgtccactgaccttcgaacagcgtaaagtcagaaacatacaccggcattgaaggatgcagaaaagagagatcgtgcatcgaacgccgggcaatttcttcaaacgctgcctgtacttgcgccttcggggaggtctggaaacctgctatctcttcagtcatgaatcgcctcccgtgggatggcttccacgccagattcacgcagcgcagccagaacctgctcaagcgcaggttcaatcatcgcttcgaccgtcggcgtcaagccgatgtgcggctccagtgattccggaattacgccgaccagggtcagttttttcggaaactcgccggtgaagcgcagggccgacaacacgtcggccaggccaagctgatgcggagagattttgttggtaaacaacgccggaacttcttcatcccgcaggatcatcatcgttcccggcgcgctcttcttcgacacaatggcatccgcaataatcagatgatcgcgatttgccatgtcgccaagcagctccattcccgccgtgccgccatcgaggatctcaacataatccggcagaatgtatcgttgctctaacgcttcgacaatccgcacgccgatggcttcatcggtcagcaaaatattgccgacccctaagactaaaatacgcattacagaaccttcactgaaaccacttcgttgccgtcggcatccactacgtgtaccgcacaggccatgcacgggtcgaaggagtgaatggtacgcaccacttccagcggtttattcggatcggcaaccggtgtacccaccagcgactgctcgtaaggaccgacgtcatcattgaagttacgcgggccagagttccaggttgatggaacaactgcctggtagttactgataataccgtctttgatcaccatccagtgagagagcataccgcgcggcgcttcgaggaagccaacacctttgaattcacccgttgccggaatgttcggcttcacaaaggtggtgtgatcgcctttgccgatattggtgatcagtgcactgtattggttttgcaggatatcctgcaattcgcagcagtgaacggtacgaccaataatacggcccagcgtagagtgcagttgcgccacttccagcgtgttaccagtcagtttctgataaatcgcaacgatttcattcagtttgttctgggtagattcgcgacctgccgccagtttcaccagcatattagccagcggacccacttctaccgttttgccgtagaaagtcggtgatttcacccaggaatatttcccgtcgtcagaccaaccatcataagccggaatggtggtaccttcccacggtgcctgcggcgcttcgtctttataccaggagtgcttcgcgctttcctgaatgcctttgatcaggtattcatcggaatgagaagtgatcggacgatacgaggacagatccgcattctcaatgtagccgccagggaacaggaagctgccgtttttactgtcggtcgggaattccggcacgctcaggtagttcaccgcacctttaccacgctccagccattccgggtagaacgcagcgataaccgcggtatcgaccttgtaaacctgttcaacaaagtcgctcagcttgtcgatgaaagacttgatgtacatcaggcgctcaaggttcagcacgcccagaccgtcgaggttgattgggttagcgaccccgcctaccgccaggttctgaatgtgcggcgttttaccgcccagcagcgccacgacgcggttagcgtcacgctggcactccagcgcctgcaggtagtgcgctaccgcaatcaggttcacttccggcggcagtttcattgccgggtgaccccagtagccgttggcgaaaatccccaactgaccgctggcaaccagatctttgatcttgttctgaactttggtgaactcttccgggctgttcaggtgccaggtcgaaacgcctttcagcatttcagaggctttggttgggtcagcttgcagtgcagaagtgatgtccacccagtccagcgccgaaagctgatagaaatgaacgatatggtcatgcgtggtgtgcgcagccagaatgatgttacggatgtattgcgcgttaaccggaacgtcgatattcagcgcactttctgccgcacgaacggaagacagcgcgtgagtggtagtacatacgccacagatacgttgcacaatcatccatgcatcgcgcggatcgcggtttttcacgatctcttccatgccgcgccacatggtaccggaagcccatgctttcgaaacgacgccattttcgatttcgcaatcgatgcgtaaatgcccctcaatacgggttaccggatcaatagtaattctctggctcatgctttgctcgcctcatgacgattatgatcgttttgttttaaaggaggaagtatcggcagtagacgaatgagtacgatgtaagcgcaaatctcaatagccacaaaaccaatagaaatcaacagttcttcccaggtcgggaagtaggcgtaaccgccgcccgggttgaatgccaccagcgaataggtcagacgccaggttgcacaacctaacagtgcgctcagtgctgacaggaacagcatgcgggaatcattacgcagcttcgccacacgcagaacgaccagcgggaagagcatcagcaggacttcaatccagaacatcacggagtagaagtcaccggcaaacgctaacgacagcttgtcgcgatagataagctcgccaaagcgcagcacgatgaaaatcgccagcaacacactgatggtgttggtcagcttaacaaacagactcttttcatccggaccgttgccacgcagacccgcctgcaccagcgaaccttcaaagatgacaatcgagaagcccatgatgaacgccgtcagcagcgagaacagcggcaacatttcatagctctgccacaacggatgcaccttgtagcccgccgagatcatcagcgaccccattgaagactggtgcatggtcggcagcagcgcaccgagcgcgatgatgaagaacatcaccttgtttagtcgctgtagcgacaccttccaccccagacgttcaaacagtgccggagcaaactccagtgccatcacgccgatatagatggtcatacagaccgccgtctcgaacagtaccgagttcacgttgaagtgacccggaatgtagaagtacggcaggttccagtagcgacccacgtcgatagtgatcgacaagccacccagtgagtaaccaaacagactcgccaacagcgccggacgcaccagcggatggtattgcccacggttaaagacgtataccgcccacgccagcgcccagccgccacaggcaaagccggtgccaatcagcaggtcaaacgcgatccacacgccccacgggaagccgccgttcaggtcagagacagagcccagaccgaacaccagacgcttcacaatcaggagcatacagatgacgattaacggtccaaaaatcatgaccggtttactgatgattttgccgcccagcggttgtggatcatgactcatgatcgtctcctccgtcgtgatggtcgtttttggtgttgcgacgaaccagcacggttaagcccgccagcacagccagtggtagcatcatgcctttatacagggtgtgttgaatattttcggaacgcgcaccggtagaaagatcgtccagtttcggcaggtcgagattttcataaggcacacccgtcagtaccagaacctgagtaccgccgccctctttctcgccgtacagatgcggataatatttcggcaccgtatgcaggtaagtgtcgccagatttcagcgtctgacgcggatagtggtattcgctgccaggcttcagcgccagacgttttttcgcctccgccatcagctcttcacgcgtaccgaaaatcaccgcgcccgccgggcacacttctacgcagccaggtagaccgcctttatcgagacgttccacacctttctggttgcacagctcgcacttatgcagcgcaccaaacgggttgttgtagtcgtacttcggcacgttgtacggacaggcgaccatgcagtaacggcagccggtgcacacgtctttgtcgtaatggacaatgccggttttcggatcttttttcagtgcagagaccgggcacacagagacacagttcggatcgacgcagtgcatacactgtttcttaatgtacgcgtagccgttctcctcctggtctttgttgacccctgtgccgctggtccacacctgaatgatgttattggtatacggcgacagtttgtcgttgttcgaccaggtctgttccccttgcgggttacgttcagggaaattgatatcctgacacttggtgacgcaagcctggcagcctacgcacaaggtcgagtcgtacaacatccccagcgatcccggaattggcgggcggttttcagcagccgcatgactgacagacggcagcgcgcccgtcagcaatgccccgcaggaggctgctttaataaaattacgtctgttcacggttattctccccgtgagtcagcgttatctttcttttgctgacgacccagttcacgcaccgccatcacgctgacaccggcaaccaacccaaccacaccgccgagcaaaccaatagcgcctgcagagacgttgccgccctctttagcgttaacatccggtttctgtgaacgcggagtttgattttcgacgttggcaagctgatggatgcctttatggaagccgataccttcttcgttacagccatagcacgggtgaccaatcgccaccggccacacaccgccaacatcgcagaattgcagcgttgagcagttgccgtaagtttctggccctttacagccgaggtggtacaggcaccagccttcgcggtggccttcatcaccgaactctttggcaaaacgaccagcatcgaagtgcgggcgacgttcgcagtgttcgtgaatcagacggccataggcgaaggtcggacggtttttgtcatccagtttcggcggtttgccgtaagtgatgatgtgcgcaacggtcgcgaggaagttgtgcgggttcggcgggcagcccggaatattgataacggttttgcctggcagaacttcttgcaggctgactgcgccagttgggttaactccagctgcggcaacaccgccccacgcagagcaggaaccgatagcgataatggctgctgcgccttccgccgctttgcggatgtgatccacaatcggctcaccggcaaccatgcaataaataccgttatcttttaatgggatggaaccatccaccactaacacatactgccctttgtacttctcgagagcgttatgtttgttctcttcgacctgatgaccgaaggcggcggaaagcacttcgtgatactccagagagatagtctccagtacgaggttttctaccgttggatgcgttgcacgaagcagagattccgtacaaccggtgcactcctgcgcgccaatccagataactggcggacgctgcgggttagtaaccgattcggccatctctgcagcggctttgctacttaaccccatggtggcggctaatgctgcacaaagcttcatgaaatcacgacggttaatgccgtgagaatggatgagggtgttatctccagtcatttatagttattccgttgcgaagacctggcatatattttgcctcaatcgcaaaatcaataatgcgatcgatgcgccatttaccacacatttattatggttatcgatatcatgatactgcggcggggcgctaaaacgaagggaagaagcattagtgtaattaattaaagcaagataatacgtatgtttgatcaattttcgaggcgataaccggccataaaaaagcgcaacgtagaacaggaattattctcacgaaagaaatccattaccatctctttatccagtccatagcggcgcgtcagaatacccgcttcccaggcgctaagctggcgatctccggtcttttcgtacatccggtgtgagtagcctaatacaaaaccgcgtttataatcggcacagtattttgtcacattaaccgcactgtcggcatgcgttgcttttaatcccgccattaagcctttaccaaaatggttattcatcgttcacctcattcgctatatattgttatatatagcgatattttaggcaaagaacgacttttgcgcacgctattttttcatgcttgtttaagacgtaatcccgtaagagataaacctatcaggagagatatttatcgaaccatttcagtgtcctttgccaggaaagatcggcggcagatttgtcataacggggcgtggaatcattatggaatccgtgattaacccccggatagatatacgcctcataaaccttattattggctttcaacgccgcctcgtaagcaggccagccctcgttgattcgggtgtccagttccgcgaagtggagtagtaaaggcgcttcaatcttcgccacatcggcagtgggtgcctgacgaccataaaacggcaccgcgcaggccagttccggatacgcgacagccgccgcgttcgatacgccaccgccatagcaaaatccggtaatacccactttgcctgtcgcttgcggatagcgttgcataaactcaattgcggcaaagaaatcattcatcagtttggttggatcaacctgctgttgcagctcacgacctttatcatcatttcccggataacctccaacggaacttaagccgtcaggtgccagggcgatataccccgccttcgccactcgccgtgccacatcttcgatatacggattcagtccacgattctcatgcaccaccaccacggctggcgttttgccgctcatttttgcgggtttcaccagataaccccgtacctcgccgtgaccatttggcgaaggatacgtgatgtactcagcaacaatctccaggtcggtaaactctacctgagtcgccagcgcataatttggcttgagcaaatcaaacaacgctaatgccgtcatcccgcccaccgcatacttcgccgcaagattgaggaactcacgtttcgagattttcccgtgagcgtaatagtcgtagtaatccaacaactcttgtgggaaatctttggcggttaaacgcggcatcgttgcactcctcaactggtgtttttttaagcaaagcataagcgcgtgtttttgcccaatttttcgtcactctgtgagccagactacgggatacgcgctggcgaatcgctaaactagaaacattgtttcgaaattgaacggtggaaaggagaggtcatggtctggttagcgaatcccgaacgttacgggcagatgcaataccgctattgcggaaaaagtggtttacgcctgcccgcgttatcgctcggtttatggcacaatttcggtcacgttaacgcgctggaatcacagcgtgcgatcctgcgtaaagcgtttgatttgggcattacgcactttgatttagccaacaattacgggccgcctccaggaagcgcagaagagaactttggtcgcctgctgcgggaggattttgccgcttatcgcgatgaactgattatctctaccaaggctggctacgatatgtggcccggcccttacggctctggcggttcacgtaaatacctgctcgccagcctcgaccaaagcctgaagcgtatggggcttgagtatgtcgatatcttttactctcatcgcgtcgatgaaaatacgccgatggaagaaaccgcctctgcgctggctcatgcggtacaaagcggtaaggcgctgtatgtcgggatctcctcttactcgccagagcggacgcaaaaaatggtcgagttgctgcgcgagtggaaaattccgctgttaattcatcaaccttcgtacaatttactgaaccgctgggtggataaaagcggcctgctggataccctgcaaaataacggcgtgggctgtattgcctttactcctctggctcagggattgctgaccggaaaatatctcaacggcattccgcaagattcacggatgcatcgtgaagggaataaagttcgtggtctgacaccgaaaatgcttaccgaagccaacctcaacagcctgcgcttattgaatgaaatggcacagcagcgtggacaatcaatggcgcaaatggcgttaagctggttgctgaaagatgatcgcgtgacgtcggtattgattggtgccagccgcgcggagcaactagaggagaacgtgcaggcgctgaataatctgacatttagcaccaaggagctggcgcagattgatcagcatatcgccgatggcgagctgaatctgtggcaggcgtcttccgataaatgacctgttaataacgggcgcgcgaaccgcgcccgaatcagatcagtgattatgacgagtcagtcggtcaagatagcccatcacaaatgcagaaagcacaaacgtcagatggataatgacgtaccacatcagtttgttatccgggacatttttcgcatccataaagacgcgcagtaagtgaatggaagaaattgccacaatcgacgctgctactttgtttttcagcgacgttgcgtccattttccccagccagttcagcttctctttgttctcggagatatccagctgtgagacgaaattctcataaccggaaaacatcaccatcaccagcaaaccgccaaccagcgtcatatccaccagcgacagcaacacgaggatcaaatctgattccgccatcgagaagatattcggcagtacgtgaataatctcctggaagaacttcagcgccagggcaactaacgccagcgaaaggccaaagtacacgggggcaagcagccagcgagaagcatacattgcattttcaagaaaacgttccatacattcctgtcgtgtagttaaaacgggcaacagtatatcgcaattgagtaaacagcacgcaacagcaaatcaacatatacgttaaacctttgtcgcataattctgaggtttagggatcttcctggttcccttatcaacgcatcgagaacgtctacccttaaaggacgttgaacctgaagggagaaaaacgatgtctcatttaaaagacccgaccacgcagtattacactggtgaatatcccaaacagaaacaaccgacgccaggcatccaggcgaagatgacaccggtaccggattgcggcgagaaaacctatgttggtagcggtcgcctgaaagatcgtaaagcactggtgacagggggcgattccggaataggtcgcgctgccgccatcgcttacgcgcgtgaaggggctgacgtggcgatcagttatcttcccgtggaagaagaagacgctcaggatgtgaaaaagatcattgaagaatgcggacgcaaagccgttctgctgccaggcgatttaagcgatgagaaatttgcccgttcgctggttcacgaagcgcacaaggcgttaggcgggctggatattatggcgctggtcgccgggaaacaggttgccattccggatattgcagacctcaccagcgaacagtttcaaaagacctttgccattaacgttttcgcgctgttctggctaccccaggaagcgatccccctgctaccgaaaggtgcaagtatcatcaccacttcgtcaatccaggcataccagccaagtccgcatttactggactatgcggctacgaaggcggcgattctgaactacagccgtggcttggcaaaacaggtcgcggagaaaggtattcgggtgaatattgtcgcgccaggcccgatctggacagcactgcaaatttccggcggacaaacgcaggataagatcccgcagtttggtcagcaaacgccgatgaaacgtgcggggcaaccggcggaactggcccctgtatatgtttatctggcaagtcaggagtcgagctacgtcaccgcagaagtgcacggcgtgtgcggcggcgagcatttaggttaaaaaaatgcccggttgtgaaaagcaaccgggcatcattgtgaattcactcttacctgatgtggcgaaaacgccttatccgcctacaaacgcatgaagattcaacatgttgcaatagattttgtaggcctgataagcgtagcgcatcaggcattgagcacctaatgccggatgcgtcgtgaacgccttatccggcctacaaacgcacgaagattcaacatgttgcaatagattttgtaggcctgatgagcgtagcgcatcaggcaattctactttacttcgctttggcggtttcttcgccgaccagacctatcttcaggtaacccgcctgatgcagcgtatccattaccttcatcaacgtctcgtaatcgacggttttgtccgctcggaagaagatggtggtgtctttcttgccttcggttaacgcattcaacgccgtaatcattgtttcatcggtgaccggatcgttaccgataaacatcgagttgtctgccttcaccgacagataaaccggtttttccgggcgcggctgcggcgtgctggtagaagcaggcaagttcaccttcacatctaccgtcgctaacggtgccgccaccataaagataatcagcagaaccaacatcacgtcgataaacggcgtcacgttgatatcatgcatttcgccgttatcgtcgaggttttcgttaagatgcattgccatcggatattatcctgcgcgtaatttttgtgcgacacgaaccggatgcgcagcggcgctggcttccagatccaggtcacggctttgcagcaacaatacctgcgctgcaacatcacccagcatcgctttaaagccgccaatctggcgtgcaaatacgttatagataacgaccgcaggaatcgctgccacgaggccgattgccgttgctaacagagcttctgcgatacccggcgcaacgactgccaggttagtggtctgcgtttgcgcgataccaataaagctgttcatgatgccccagaccgtaccaaacagaccaacgaacggagaaatcgcgccgatggttgccagatagccgttaccgcggcccatttgacgacccactgcggcgacccgacgctccagacggaagctggtacgttctttaataccttcgttatcgtcgctgccttctgacagttccagctcattctgcgcttcattgagcaaatgcaggcttaagcttttgctaccaaaatcagcggcgatatcgttggccaggtttaaggaacgcgcttcagccagcagttgctgctcgcgcttaaggcgacgcttctgattgaagaactctacgctcttactgaagaagattgcccaggtgactacggaggccaaaataagcccaatcatcacgcacttaacgacaatatcggcgtgctgatacataccccagacggaaaggtccgtctgcattaaattattacccactgtgtatctccaggacgcaagtcacaaaatctgcgcataataatatcaaaacgacgtcgaattgatagtcgttctcattactatttgcatactgccgtacctttgctttcttttccttgcgtttacgcagtaaaaaagtcaccagcacgccatttgcgaaaattttctgctttatgccaattcttcaggatgcgcccgcgaatattcatgctagtttagacatccagacgtataaaaacaggaatcccgacatggcggacaaaaagcttgatactcaactggtgaatgcaggacgcagcaaaaaatacactcttggcgcggtaaatagcgtgattcagcgcgcttcttcgctggtatttgagagtatggaagccaaaaagcacgcgacgcgcaatcgcgccaatggcgagttgttctatggacggcgcggaacgttaacccatttttccttacaacaagcgatgtgtgaactggaaggtggcgcaggctgcgcgctatttccctgcggggcggcagcggttgctaattcgattcttgcttttgtcgaacagggcgatcatgtgttgatgaccaacaccgcctatgaaccgagtcaggatttctgtagcaaaatcctcagcaaactgggcgtaacgacatcgtggtttgatccgctgattggtgccgatatcgttaagcatctgcagccaaacactaaaatcgtgtttctggaatcgccaggctccatcaccatggaagtccacgacgttccggcgattgttgccgccgtacgcagtgtggtgccggatgccatcattatgatcgacaacacctgggcagccggtgtgctgtttaaggcgctggattttggcatcgatgtttctattcaagccgccaccaaatatctggttgggcattcagatgcgatgattggcactgccgtgtgcaatgcccgttgctgggagcagctacgggaaaacgcctatctgatgggccagatggtcgatgccgataccgcctatataaccagccgtggcctgcgcacattaggtgtgcgtttgcgtcaacatcatgaaagcagtctgaaagtggctgaatggctggcagaacatccgcaagttgcgcgagttaaccaccctgctctgcctggcagtaaaggccacgaattttggaaacgagactttacaggtagcagcgggctattttcctttgtgcttaagaaaaaactcagtaatgaagagctggcgaactatctggataacttcagtttattcagcatggcctactcgtggggcgggtatgaatcgttgatcctggcgaatcaaccagaacatatcgccgccattcgcccacaaggcgagatcgattttagcgggaccttgattcgcctgcatattggtctggaagatgtcgacgatctgattgccgatctggacgccggttttgcgcgaattgtataacattgccacttttggacaattttgcagacatttaattgtgaaaagtcttaaattgttgcgtccgggatcaaggcgtcccggacgattcaggagtacaataggcagataaaggcttaaacgctgttccacaggaaagtccatggctgttattcaagatatcatcgctgcgctctggcaacacgactttgccgcgctggcggatcctcatattgttagcgttgtttactttgtcatgtttgccacgctgtttttagaaaacggcctgctgcccgcctcatttttgccaggcgacagcttgttgatactggcaggcgcattgattgcccagggggttatggattttctgcctacgattgcgattctgaccgccgcagcaagtctgggctgctggctaagttatattcaggggcgctggttagggaataccaaaacggtgaaaggctggctggcacagcttcctgctaaatatcaccagcgcgccacctgcatgtttgaccgccacggtctgctggcgctgctggctggacgttttcttgcatttgtccgtacgctgctgccaaccatggcgggaatttccggtctgccaaaccgccgcttccagtttttcaactggttaagtggattgctgtgggtcagcgtggtaaccagttttggctatgccttaagtatgattccgttcgttaaacgccatgaagatcaggtaatgacgttcctgatgatcctgccaattgccttgttaaccgctggcttgttaggcacgctgtttgtggtgattaaaaaaaaatactgtaacgcctgacgattttccccgttcccggttgctgtaccgggaacgtatttaattcccctgcatcgcccgcattcttgccgcatcttcccccggcgtcacaccgaagtaacgtttaaactcacggctaaattgcgatgcgctttcatagccgacgcgcatcgctgctgcgctggccttcatgccgtcatggatgatcatcatccgcgccttatgcagacggtaattcttcaaatactgcaacggcgaggtgctggtgacagacttaaaattatggtggaacgccgatacgctcatgttggcttctgccgccagttgctcgacgctcaggttttcggtgtatttattctcaatccgtttcagcacgcggctaatcagactgaagtgagtctggcgactgaccagcgccagtaacgcgccgccgcaaggtccggtcagcacgtagtaaagaatttcgcggatgatctgtttgccgagaatacgcgcatccagcggtcgctccatcacgtcgagtaaccgctccgccgcacataaaatctcttctgataacgtggcggagttaatcccgctggctgccatcgacggctggaaatgctcatcttcgccaatgtccatcaacagttcctgtaactgcaaaatatcgacattgagacgcaaccctgccagcggcacctctgacgtggcataggtttcgcactcaaacggcaacggcaccgtcagcagcaggtattcattggcatcataacgaaacacgcgttcattgatataaccgattttatgtccggaaaagagaattattatgccaggctcgtacatcaccggtgtacgtgcgaaaggcgtctcgccatacaacaaacgcacatcgggcaacagttctgacaaactattttctttatttttcagtttattaactttatccgccagcaagcggcaaatctcttcacgtttcatatcgcgtaatttcttaggaataatgcggcaatttgattgtgcgcaattttgtagcatttctccagcactctggagaaataggcaagacattggcagaaatgagcattgagagccagggcgctggcgatcacaatgaaaaacatcaggcagatcgttctctgccctcatattggcccagcaaagggagcaagtaatgaacaactttaatctgcacaccccaacccgcattctgtttggtaaaggcgcaatcgctggtttacgcgaacaaattcctcacgatgctcgcgtattgattacctacggtggcggcagcgtgaaaaaaaccggcgttctcgatcaagttctggatgccctgaaaggcatggacgtgctggaatttggcggtattgagccaaacccggcttatgaaacgctgatgaacgccgtgaaactggttcgcgaacagaaagtgactttcctgctggcggttggcggcggttctgtactggacggcaccaaatttatcgccgcagcggctaactatccggaaaatatcgatccgtggcacattctgcaaacgggcggtaaagagattaaaagcgccatcccgatgggctgtgtgctgacgctgccagcaaccggttcagaatccaacgccggtgcggtgatctcccgtaaaaccacaggcgataagcaggcgttccattctgcccatgttcagccggtatttgccgtgctcgatccggtttatacctacaccctgccgccgcgtcaggtggctaacggcgtagtggacgcctttgtacacaccgtggaacagtatgttaccaaaccggttgatgccaaaattcaggaccgtttcgcagaaggcattttgctgacgctaatcgaagatggtccgaaagccctgaaagagccagaaaactacgatgtgcgcgccaacgtcatgtgggcggcgactcaggcgctgaacggtttgattggcgctggcgtaccgcaggactgggcaacgcatatgctgggccacgaactgactgcgatgcacggtctggatcacgcgcaaacactggctatcgtcctgcctgcactgtggaatgaaaaacgcgataccaagcgcgctaagctgctgcaatatgctgaacgcgtctggaacatcactgaaggttccgatgatgagcgtattgacgccgcgattgccgcaacccgcaatttctttgagcaattaggcgtgccgacccacctctccgactacggtctggacggcagctccatcccggctttgctgaaaaaactggaagagcacggcatgacccaactgggcgaaaatcatgacattacgttggatgtcagccgccgtatatacgaagccgcccgctaagctttttacgcctcaaactttcgttttcgggcatttcgtccagacttaagttcacaacacctcaccggagcctgctccggtgagttcatataaaggaggaacgtatggctaatccaaccgttattaagctacaggatggcaatgtcatgccccagctgggactgggcgtctggcaagcaagtaatgaggaagtaatcaccgccattcaaaaagcgttagaagtgggttatcgctcgattgataccgctgcggcctacaagaacgaagaaggtgtcggcaaagccctgaaaaatgcctcagtcaacagagaagaactgttcatcaccactaagctgtggaacgacgaccacaagcgcccccgcgaagccctgctcgacagcctgaaaaaactccagcttgattatatcgacctctacttaatgcactggcccgttcccgctatcgaccattatgtcgaagcatggaaaggcatgatcgaattgcaaaaagagggattaatcaaaagcatcggcgtgtgcaacttccagatccatcacctgcaacgcctgattgatgaaactggcgtgacgcctgtgataaaccagatcgaacttcatccgctgatgcaacaacgccagctacacgcctggaacgcgacacacaaaatccagaccgaatcctggagcccattagcgcaaggagggaaaggcgttttcgatcagaaagtcattcgcgatctggcagataaatacggcaaaaccccggcgcagattgttatccgctggcatctggatagcggcctggtggtgatcccgaaatcggtcacaccttcacgtattgccgaaaactttgatgtctgggatttccgtctcgacaaagacgaactcggcgaaattgcaaaactcgatcagggcaagcgtctcggtcccgatcctgaccagttcggcggctaacatgcaaattctcccggtggcggtaatgttccgctaccggacttttcagaaatcatttattcccctcgcgtcccgcccgttgttactcttccttgttcaggaatgccaaatataaggacatcatcatgcagagccggaagctcttaaaagaacaactcatctatatccgggataaacgcaacggagaggtgaaaaacagatgaaaataatacttctgtttttagcagccctggcaagttttaccgtacacgcacagcccccctcacagaccgtagaacaaacagtccggcatatttatcagaactataaatcagatgccactgccccttattttggtgaaaccggagagcgggcgataacttctgcgcgtattcaacaggcgcttaccctgaacgacaatcttacgctgccgggcaatattggctggctggattatgatccggtttgtgattgtcaggattttggcgatctggtgctagaaagcgttgcgataacccaaactgacgccgatcatgccgatgccgttgtgcgctttcgtatctttaaagatgataaagaaaagaccacgcagacactgaaaatggtggcggaaaatggtcgttgggtcattgacgatattgtcagcaatcatggcagcgtcttacaagcagttaatagcgagaatgaaaaaacgctggccgctttagcttcgttgcaaaaagaacagccggaagcctttgttgccgaactctttgaacatattgctgattatagctggccgtggacgtgggtggtttccgactcttaccgccagacggttaatgccttctataaaaccaccttcaagacggccaataatcccgatgaagatatgcaaatagaacggcaatttatttacgacaatccgatctgttttggcgaagagtcgctattttcacgcgttgatgaaattcgagtcctggagaaaaccgccgattccgcccgcattcatgttcgttttacgctgaccaatggcaacaacgaagagcaagaactggttttacagcggcgcgaaggcaagtgggaaatcgctgattttatccgcccgaacagcggcagcctacttaagcagattgaggcaaaaactgccgccagattaaagcaatgagctgaattaaataacaattagccggaacaataaataaaagggaacactatatgaaaacgattttcaccgtgggagctgttgttctggcaacctgcttgctcagtggctgcgtcaatgagcaaaaggtcaatcagctggcgagcaatgtgcaaacattaaatgccaaaatcgcccggcttgagcaggatatgaaagcactacgcccacaaatctatgctgccaaatccgaagctaacagagccaatacgcgtcttgatgctcaggactattttgattgcctgcgctgcttgcgtatgtacgcagaatgataaaaaaatccccggtagcgtgtcagttgccggggatattttttaacgtccaaccgccgctttaggccgtttcttcgcaccagcattcaccggacgagattgcgtagacgacgctttttttgccgtagcaggcgtctgacgctgggtcgccatcggcgtatgtttcgtcaacgccggacgggtattgcggttctggcgacgagcttcacgcatctcttcaatggttggcgcaggcactaagcaatcgcgacggctaccaatcagatgctttttacccatcgcttccagcgcctggcggattaacggccagtttgccggatcgtggtaacgcaacaacgctttatgcaaacgacgctgcttgtcgcccttcggtacgaagacgtcttcactcttataaccaatcttcgccagcgggtttttcccggtgtaatacatggtggttgagttcgccagcggcgatgggtagaagttctgtacctggtcgagacggaaacgatgctttttcagccacagcgccagattcaccatatcttcatcacgcgtaccggggtgcgcggagatgaaataggggatcagatactgctctttacctgcctgttttgagtaagtatcgaacagctctttaaagcggtcatagctgcccatgcccggcttcatcatcttcgataacggcccttcttcggtatgttccggggcaatcttcagataaccgccgacgtgatgggtcgccagttctttgatatagcgcggatcttctacggctatgtcataacgcacaccagaggcaatcaggatctttttaatgcctttcagatcacgcgcacggcgatagaggttgatcgttggttcgtggttcgtgtccatgtgcggacaaatatccggataaacgcacgacaaacggcgacaagtttgttcagcgcgtggcgatttgcagcgcaacatatacatgttggcagttggcccaccaagatcggaaatcacgcccgtaaaacctggaacggtgtcgcggatcgcttcgatctcattaatgatcgaatcttcggaacggctctgaataatgcgcccttcgtgctcggtgatagaacagaaagagcagccgccaaagcagccacgcataatgttgaccgaaaaacggatcatttcgtaagccggaatacgggcattgccataggccggatgtggcacgcgcttgtatggcagcgcaaaaacgctgtccatctcttcggtagaaagcggaatagcaggcgggttgatccacacatagcggtcgccgtgtttttgcatcaatgcgcgggcacagcctgggttggtttcgtggtgcagaatacgcgaagcatgggcgtacagcactttatcgcccttcactttctcgaaagaaggcagcaacacgtaggttttttcccacggtttcgggcgcggtggctgcacggttacggctttggcttcctgctttttcggtgccaccggtttgttatccgcgcacggcaaatcttcaccatacggatgcgggattgggtcgatttttccaggggtatcaagacgggtggaatccacgccgctccagccaggcagcgcctctttcacgataatcgcggtattacgcacatcgcggatttcactaattggctcgcccatcgccagacgatgcgccacttccaccagcggacgctcaccgttaccaaacatcagcatgtcggctttcgaatccaccagcacggaacggcgcacggtatcggaccagtaatcataatgcgcggtacggcgcagactagcctcaataccgccgaggatcaccggtacatctttccacgcctctttacaacgctgggtataaaccagtgtggcgcgatccgggcgcttacccgcgacgttatccggcgtgtaggcatcgtcatgacgtaaacggcgatcggcggtataacggttgatcatcgaatccatgttgccagcagtaacaccgaaaaacagattcggtttacccagacgcataaagtcgtctttgctgctccagtccggctgggcgatgatcccgacgcgaaagccctgcgcttccagcatacgaccgcaaatcgccatcccgaagcttgggtgatcgacatacgcgtcgccagtaaccaaaatgatgtcgcagctatcccagccaagttgatccatctcttcacgagacatcggcaaaaacggtgccggtccaaaacaggcggcccagtactgcggccaggagaacaggtcgcgatccggttggatcagggagatagagctcattttgcttccagaaatgataaaaaaataatcaaaggccggggattataagccggaacgaaagagaaatcgaaaggtattccatactcgccctcctcgggcgagtatgaagattacggtaccggattgaccaacagttgcccaatcgagccacggtccgccatttccagcgtctgactgttgaagtagaacgggaagtgcgcccaggaaggctgaccgaaataaacaagcagctccacttgtccgtcaacccaaacggtatctttccagcctctgtcttccgggaacggcatcgcgccattcacgttacggatctggaacattacgccttcaatatggaacgcttgcggctcgtccgcgcgtaccgtccagcgttcccacgttccttgctgcgcagtgacatcaatacggttgacgtcccacagctgtccattaatacccgggtcatcacccagactgatatcgcgactgcgaattggcgaaccagccatgatttcagttggcagcaagcgcatcggaagactgtctgtgaccagcggcagaaggccggttgggcgcagcgttagcaccagggtagaaaccagaatactggatggctcaaagaagccacgaatacgatcaacaatgctcgccgcttcgccacaggtgatcgacacttcatcgccgttgctcatatccaccagaatctcgcggcgctcgcccggtgccagcgaaagttgcttcaccgatacaggagcaggcaggaatccctgatcgccagaaatcacatgtaacgggcgaccatcgttcatctgtagttgatagcgacgagagttcgacgcgttcagcagtcgcaagcgcacccagccacgcgagacttcaacgtacgggctttgtacaccgttaaccagcagcgtatcaccaacaaagccgccgcttcccggttcgttgtattctggcgtaccaaagttatccagccgtttatcctggataatgaccggaaaatcatccacaccataatggttggggataggcagcgacttgctgacttcatcttccaccagccacattccggcaaggccgttatagacctgctgagccgtgcggttgggagtattggcgtgataccacagagtagctgcgttctggcgaatgggcagtacgggtgcccagtcagcgtttggcgacatcatccgtgccggaccgcccatcagcgggcctggtacctgtagcccggccaccgtcattgagacattttctgtcaggcggttgctgtaaataagcttaacatcgtcgcccttccagacgcggatagtcggccccaggtaacgaccattgattccccagaccgacgcgcgtgtccctggcgtaaatgaccagtgcgcacgttgtacagtcataaacagcggttgcccacggcgagattcaagtagcggcggaacgggtagcggttgctgttgcccggctgcgctggccttcaggggaacagcgcctgcacaaagtgcaatccccgatgcctgaatgaactgacgccgactgagtgacatatttgctccatgtaaaactggctaaagtaataccgtgcaggaaagtgttccccgcaaaaatacagattgccgacttaaacttttccggcggcttcgcgttctgcgacttctttatcgagctcggcgattttttgttccattatcgaacgacaatgggcagccagctcacgaacctgatctttgccatactgactgacgtcaattggcggcagcatttcgacaatcaccagaccgttgtgcagtcgattaagattaatcttattcgaagttgtagagacgcacacgggaataatcgggacgcccgccgcaattgccgcgtgaaatgctccagtcttgaacggtagcaggccgcgaccacggctgcgggttccttccgggaacatccagatggaaatacggcgttttttgaagtgattcactacttccgcaatggtgccgtgagctttagtgcgattgtttctgtcgatcaataagttgccggttaaccagtacaactgcccgaagaaggggatccacagcaagctctttttacctaccgtcaccgtcggcggttgcacgatgttcgatgctgtcaccatgtcatagttgttctggtggttagcgatatagatagcattgccgtagctttcagcatctgcaggtttgcggcactcaactttcaggccgaacagcggcgcaagacggccaaacatatgcccaaaggtggccacatgtttcgggttacgcgggctgaaaaggcagtaaatggagccgaatacacagactaagatgctgtaaatcacggtaataataagacgaaagatatatagcataacaccctctgaaggtctgagagactggcattgtacgtcacctgaaatcaggttagggcattgttaaaagccgctctctggaaaagcgtattgttaatcgcaacgcatgaataaacaacggtttcaagggaatttttatcgtttccgggggttgaatacgctgccggatgacgacttaacgtttcatccggcgttccttgcaagcgggaggaaacagcgccctccccggcatattactcttcgctatcaccgctgctggcacggcgaggagagtcgatctcaacacgatcgatacgctgcaaaccgcgcatcaacgtaccgcggcgtccacgttcgccagtgactttctgtaactcttccgggcgcagtttaattttgcgtttcccaacatgaatggtcagcgtgctttgcggcggcagaacgtacaattgcgccagaccatcttctccacgcgcggcttctgccgatggaatgttgataatcttgttgcctttgcccttcgacagctgcggcagatcacttaccgggaacatcaacatacggcctgcctgagtgattgccagcagcatatcggaagcatcttcaatcaccaccggcggcataacatgggcattttccggtaaggtgatcaaagccttacctgcacggttacgcgccaccagatcgttaaaggtgcagacgaaaccgtaacccgcatcggaagccatcagcagtttctgatcgtcgctttccatcagcatatggtcaacggtcgccccaggcggcaacgttaatttgccggtgagcggctcgccctgaccacgcgctgacggcagcgtaatcgggtcaatggcatagctacgaccggtggaatcaacaaacactaccggttggttgctcttacctttcaccgccgctttgaagctatcacccgctttataattcaggcccggcgcgtcgatatcatggcctttagcgctgcgtacccagcccatctgcgacagcacaatggtgacaggttcagacggcagcatgtcgtgctcgctcatcgctttcgcttcttcgcgttcctgcaacggcgaacgacgatcgtcaccgtaggcttgcgcgtctgcctgcagttctttcttcagcaggttattcattttacgctcggaagccaaaatgccctgcaactggtcgcgctctttttccagttcactctgctcaccgcgaatcttcatctcttccagtttggcaagatgacgcagtttcagttcgaggatcgcttccgcctgggtttccgtaaggccaaaccgcgacatcagcgccggtttcggttcatcttcattacgaatgatctcaatcacttcgtcgatattgagaaacgccaccagcaaaccttcgaggatatgcaggcgcttgaggactttctccagacgatagttcagtcggcggcgcacggtatcgcggcggaacaccagccattcggagaggatttccagcaggtttttcaccgccggacgaccatccagaccgatcatattaaggttaatacgatagctcttttccagatcggtggtagcgaagaggtggttcatcacctgatccatatccacgcggttggaacgcggcacaatcaccaggcgggtcgggttctcgtggtcagattcatcgcgcagatcgtcaaccatcggcagctttttgttgcgcatttgcgcagcaatttgctccagtacgcgcgcacctgaaacctgatgcggcaatgcgctgataaccaccgcgccatcttctttcttccacaccgcgcgcatacgcactgaaccacgtccgttctcgtagattttacggatctcggcgcgcgaagtgataatttccgcttcagtcggataatccggcccctgcacgatatccagcagctgatcgagcgtggttttcggctggtcgattaatgcgattgccgcctgagccacttcacgcaggttatgcggtggaatatcggtcgccatgccgacggcaataccggtggtgccgttaagcaaaatgtttggcagacgggcaggtagcattttcggctcctgcaaagtgccgtcgaagtttggcacccagtcagccgtcccctgccccagctcgctcaatagcagctcggaatatttcgacaaccgggattcggtgtaacgcattgccgcgaacgatttcggatcgtccggcgcgccccagttcccctgaccatcaaccagcggataacggtaagagaacggttgcgccatcaggaccatcgcttcataacaggcgctatcgccgtgcggatggtatttacccagtacgtcaccgacggtacgggccgattttttaaatttggcgctggcattcaggcccagttcagacatcgcatacacaatgcggcgctgaacaggtttcagaccatcaccaataaacggcaacgcacggtccatgatcacgtacatggagtagtttaagtaggcgttttccgtaaattcatgtagcgcaaggcgctctgccatatcgctcattaattctgattcctcaacttattcgccagccttcaaaggggcaatattgccggagatactacattatctgccgcgtcgagtcacaggagatcagcgtgaatagcgccgccggacgtgctccgacggcgataaaggcatcaatgtgccttgatatacaactctttgctgtagacataatcctggggattatgcagcggaaaaccgccaacgtagggtttaagcagtttgattaacggctgatagtagataggaatcagcggtgcctgttggttgatgatcacttctgcctgctgatacaacgcattacgctttgtcgcatcagtgatctgcgtggcctggtttagtaaggcgtcatactgcgcatttttccagtgaccgacgttttcttcactatcgcttttgagcgtgttcaggaagctggaagcatcattgtacgtcgcatcccacgactgccgagacagcatgaaatcaccggctcgtcgggcatcaagataggttttccactccattgtgcgcagcgtcacctgtgcacccagccattttttccattcggaagacaacgctatcgcggtcttttcatgcagatcgtacttgttgtagaacagctcaaagcgtagcggatgagaggcgtcgtatcccgcctgtttcagcaaggcttttgccatcgcgacgcgctcactcattggcttttgcagttcatcgaacgtcgtcgcgctaaagccttttacctctggcggcgtcagcgtggttgcgggcgttctcaaccccagtaccttttgcgcaataagctgtcgatcaaccgtaagatatagcgcccgacgcactcgcacatcgttaaatggcggtttctcaaggttgaagttgtaatattcgctgttcagacgcggaataattcgtagctcgccaggcagtgatttttcaatggcgggaatttgctgcgccggaacccaggtgagatcgacctctcccgcgcgatagcggttatagccggtgaccgaattatctagcgccagatactcaacctgttgcaatactgtatgttgcgcatcgcggtactttggatttttgcgtgcagtaatcttttcgttaactacccactgatcaagcacaaaggcaccgttgtaaaccatgttctctggcttactccagctatcgccatgtttagcgatgacatgatgaggaaccgggaacagcgtcggccaggcgagcatcgtcgtgaaccaaggaaccggctgctcaagcgtaacttcaagagtacgatcatccgtcgctttgacacccagcgatgtaacatctgctttacccgcaacaatagctgcggcattgttaatgtgcgcctgtgccagatagccagcaaaagggcttgccgttttcgggtcaaccgcgcgctgccagccgaggacaaaatcctctgccgtcagaggctgaccgtcggaccactgcaaaccgctacgcagatggaaaatatagcgcttgccgccgtccagtatctcccagcgttcagcctgagcgggctgcacctggccttcaccgtccatccataccagaccttcaaacagatccagcacaatctgcgcggcagtattctcctccaccttttgcgggtcgagcgtacctgggtcgctatgattgttgtaacgaaagacttgttgcggggcgagcggtgtgttggcgggaacgtcagcagcgtagagaggagccgcacttaccaggctgaccagccataataaatttcgcgtatacatggtattccttaccggagaaattataagcccaacaacaatacgcctgtggcattgttcgctcaaacttatcgcgagtgatttggctcacactccggtaaagaaaaaagcgagttgcccccgcttttccattaattaacggatttcattcaatagttctggatgcttatccagaacacgtaaaagtttgattgtggaaggatgaggttgggcattgcctttttcgtaacgcgaaaacgcatttacacctcccccaaaaatttcgcttgcctctttttgggtaagagagagcttttttcgaaccttcactataaattcaggtgccactgtttcggcattcaccgaagcccgaaatgcctttacttgcgccatgaaagcatctgactcttctttattcatgatgctctcttcgcaatggacacaatataaaccgtggatacctttcaatactgtttttcgtccacggaaggtgtatggaatatctttaatgccagaaaccatttctccctggtggcaaaccggacatttcatattacttctccttaaacgagacgatcagtacgtcatgaattaccgtaattttaagataaacctggcctgtaacaagcctgggtctgtaaacatcctgccagatagtatgatcagagtaggtggtcatgcttttataaaagtcgctctctgataatccaatgataacattacacataccatcaaaatccaaacctaactcatctgcatttaacagtgcactacgtgttgtacgaacttgcccggcattgacaagttttttaacctgactcaaacgtgtatgtggtgtgcgtttttccataacccccgcctccctgttactttagttataacctaaaaggttaattacagcaatgaaaaagcacctaaaaggttagttagatgtacggagatagtgaccacacaaaacgtattctttaaggaaagtgattgaccatataagaaagtggcgcattagtagcgccagtttgaagcaggaatttataagggaagctggagtcaggcatcacgccaacggcacataaacatccgtttccagtcgctgctctgtcaccccttcggcaagattggtgtagtgaaacagaatcggtgctttacgcattttctcgccgcttgcaggcagccagtggcgaatgatgccccataccgtgtgtgaaatatcgtccagctcgccaacgtggcgggccacggcataacgtccaccggtaagttcaccattgctcacaccataacgattatcgggaatcggttcgctaacgctgccgcagatatcaaagcgaaacgcttccggtgcggtggtggcagggtcgtcccaggcgacgccaaaagtctggctttggttaacaggagaaagccccgtctctttacgccacatgataaatttcgccacgctgtagttgagcaattcagggctacagcggtgcggcaacatcgccacaggtattgatgggaaatcgataatgtttacatccagtgtcaggtttgtcattttgcctccctgcgaaattattcccgggaacgcgtcccgggagcggtaacaattacggatttactttgcggatctgtttgacgtcaatttcaacagaattccagtctttatcgacttcaccctgaatctcaaccgtatctttcggcgtcaccgtcacgccgttccagcgtttgtggtcgatatcaacattgatagtaccgctggcatctttgaacacgtagagatcgtcagagatgcgttcaacgatattgccgcgcagggttacccaggtgtcgtcacgcagggattttgcgctttctacagtcgttacgctgccgttcggcccctggaatcctccggcctgactttgcgttgccgatgggccagaaaaaccgccctgctctgctgccatcaccggtgcgctgcacagggccattactgcgattactgctgcgaattttttcatgtttattactccctttaatgtctgtttccgagcatttaacaagatagtccttaacaacttcttaagggaaaaaaataaaatttagtgctgtacagagcgcgttacaacacggtttactggcagcaaatacggttatcgcagggatgaaaaaatgcgaattttactgatagaagatgacatgctgattggcgacggcatcaaaacgggccttagtaaaatgggttttagcgtcgactggtttacacaaggtcgtcagggaaaagaggcgctttatagcgcaccttatgatgcggtgatcctggatttaaccttaccaggcatggatggtcgcgatattttgcgcgaatggcgagaaaaaggtcagcgtgagccggtactgatcctgaccgcgcgcgatgcgctggcggaacgtgtagaagggctgcgtctgggagctgacgattatctgtgtaaaccttttgcgttgatagaagtcgccgccaggctggaagctctgatgcgccgaaccaacggccaggccagcaacgagctgcgccacggtaacgtcatgctcgaccccggcaaacgtatcgccacgctggctggcgaacccttaacactgaaaccaaaagaatttgccctgctggaattactgatgcgtaacgctggtcgggtactgccgcgcaaactgattgaagagaaactgtatacctgggacgaagaggtcaccagtaatgccgttgaagtgcatgtgcatcatctgcgacgcaaactcggtagtgattttattcgtaccgtgcatggtattggttacacattaggtgagaaatgaaatttacccaacgtcttagtctgcgcgtcaggctgacgctaatctttttaattctggcctcggtgacctggctgctttccagctttgtcgcctggaaacaaacaacggataacgtcgatgaattgttcgacacccaactgatgctgtttgccaagcggttaagtacgctcgatctcaacgaaatcaacgcggcggatcgcatggcacagacgccaaatagattaaaacacggtcatgttgatgacgatgcgctgacctttgccatctttacccacgacggcagaatggtccttaatgatggcgataacggagaagatattccctatagctatcaacgggaaggttttgctgacgggcaactggtcggtgaagacgatccttggcgttttgtctggatgacctcacctgatggcaaatatcgcatcgttgttggccaggaatgggaataccgtgaagacatggcgctggcgattgttgccgggcaattgatcccgtggctggtcgcactgccgattatgttaatcatcatgatggtactactgggtcgtgaactcgcgccgctgaacaaactggcgctggcactacgtatgcgtgaccctgactcggaaaaaccactaaacgcgactggcgtacccagcgaagtgcggccactggttgagtcgctaaatcaactgttcgcccgcacacatgcgatgatggttcgtgaacgacgctttacctccgacgcagctcacgaacttcgtagcccgttaacggcgctgaaagtgcaaaccgaagttgcgcagctctctgacgatgatccgcaggcgcggaaaaaagcactgctccaattacattccgggatcgatcgcgctactcgtctggttgatcaactgctcacgctatcgcggctggactcactggataaccttcaggacgtcgcggagatcccgcttgaagatctcctgcaatcgtcggtgatggatatttaccacacggcgcagcaggcgaaaattgacgtgcgactgacactcaatgcccacagcatcaaacgcaccgggcaaccgctattgctaagtttgttggtgcgaaatttgctggataacgccgtgcgctacagtccacagggcagcgtggtagacgtcacgctgaatgctgataatttcatcgtgagggataacggccccggtgtgacaccagaggcactggcgcgaattggcgaacgcttctatcgcccacccggacaaaccgctaccggcagcgggcttgggctatcgattgtccagcgaatcgccaaattgcatggcatgaatgttgaatttgggaatgcggaacaaggtggatttgaggcgaaggtaagctggtaacttctctgtctatgagagccgttaaaacgactctcatagattttactaatagcaaaatataaaccgtccccaaaaaagccaccaaccacaaaccagacaaataccgagcgagaatacatatacccaaaactcgaacatttcccgcataaagagttttcttaagataagaataataagtggcgtaagaagaaaaaatgctgcaatcattgcttgcaatatacgatcttcgcctgaaacggaaggtatactgcaaatatttcctcccgactcaagcatccagtcatacttattgaaagcaaaaaaagaatctattaaccaataagtaagcattatatatagcaatgcttcaaatattgttttaattttctgctttaacatatatcagtacgctcataaaaatccatttataattatcaacatgacacgttgatactttcatcttttacttattcaaagccatattttcaatccccaaaaaaaccgaaccaaacgtgtaaattattccggtgcgagtaagaattatgaggaatggctatcagtattgtcattttcagaaaatatttatcctgcatcggtgagtcagagtaagatcagacttttgctaaattcgcaaaagactttgcacattttgctaatttcaccgtaccgctctgtgacgtactatagtcggcaaacgtctcaccttgaggttaaaaaatgagcaacatcctgattatcaacggcgcgaaaaaattcgcccactccaatggtcaactgaacgacaccctgaccgaagtcgcggatggcacactgcgcgaccttgggcatgatgtccgcatcgttcgcgccgacagcgactacgatgtcaaagcggaagtacaaaactttctctgggctgatgtggtgatctggcagatgccaggctggtggatgggcgcgccgtggacagtgaaaaaatatattgatgatgtattcaccgaaggtcatggaacgctgtatgccagcgatggccgtacccgcaaagatccgtcaaaaaaatacggttccggcggcctggtacagggcaaaaaatatatgctttctctgacctggaacgcaccaatggaagccttcaccgaaaaagatcaattcttccacggcgttggcgtcgacggtgtgtatctgccgttccataaagcaaaccaattccttggcatggaaccgctgccgacatttatcgctaatgacgtgataaaaatgcctgatgttccccgctatactgaagaatatcgcaagcatcttgtggaaatttttggttaactagagctcaggctttagaaggagttaaccatgcttaccgtaatcgcagaaatccgtactcgtcctggtcaacatcaccgtcaggcggtattggatcagtttgctaaaatcgttccaaccgtactgaaagaagaaggttgccacggctatgcgccaatggtggattgcgctgctggcgtgagtttccagtctatggcaccggattctatcgtgatgattgagcagtgggaaagcatcgcgcaccttgaagcgcatctgcaaaccccgcacatgaaggcgtacagcgaagccgtaaaaggcgacgtgctggagatgaatatccgcatcctgcaacctgggatttaaacctgccttgtttgcccggccatcctgaccgggcaatgttctttcctttaaacctcaatctccgccatgtcgcctttctcttgcaaccagttgcggcgatcttccgagcgtttcttcgccagcagcatatccatcatcgcgtcagtacgctgatcgtcttcatcatcgatagtcaactgcaccagacggcgagtgttcggatcaagcgtggtttcgcgcaattgcatcgggttcatttccccgagacctttaaaacgctggacgttcggcttgcctttcttgcgttttaattgctcaagtacgccttctttctcttcttccgtcagcgcgtaataaacctctttcccgagatcaatacggtagagcggtggcagtgcgacgtaaacgtgaccgtgtttcaccaacgcgcggaagtgttttacgaacaaagcgcagagcagcgtggcaatgtgcagaccatcagagtccgcatccgcgaggatacagattttgccataacgaagctggctcagatcgtcgctgtcaggatcgataccgatcgctaccgaaatatcatgcacttcctgcgaggccagcacttcgtcggaagaaacttcccaggtgttaaggatcttacctttcagtggcatgatcgcctgatattcgcgatcgcgcgcctgcttggcagatccgcctgcagagtcaccttccacaaggaacagttcggtacggttaagatcctgcgcggtacagtcagccagtttgccaggcagcgccgggccgctggtcagctttttacgcaccactttcttagccgcacgcatacgacgctgggcgctggaaatcgccatctctgccagcaactccgccgcctgaacgttctggttcagccacaggataaaggcatctttcaccacgccagaaacgaatgccgcgcactgacgcgaagagagacgctctttggtctgcccggcaaactgcggatcctgcatttttactgacagcacataggcgcagcgatcccagatatcttccgccgacaactttacaccgcgcggcagaatgttgcggtattcacagaactcacgcatcgcgtccaacaggccctgacgcagaccgttaacgtgcgtaccgccctgcatcgttgggataaggttgacgtagctttcggtcagcagttcaccgccttccggcagccacagtagcgcccagtccacagcttcagtatcaccagcgaaattaccgataaacggtttttctggcagcgtcggtaaaccgtttaccgcttccgccaggtaatcattcagaccgtcctgatagcaccagcgctgttcggtgttgttgatctcatctttaaaggtaatctcaacgccggggcacagtaccgctttggctttcagcacatgcgtcaggcgtgaaacagaaaatcgcgggctgtcaaagaaggtttcatccggccagaagtgcacgctggtaccggtattgcgtttaccgcaagtgccgacaacctgtaaatcctgcaccttttcgccattttcaaaggcgatgttataaacctgaccatcgcggcgcacgttaacttcaacgcgcttcgacagggcgttaaccaccgaaatccccacgccatgcaggccgccagagaactggtaatttttgttagagaatttaccgcccgcgtgcaaacggcaaagaatcagttcaaccgccggtacaccctcttccgggtgaatatccaccggcatcccgcgcccatcgtcaatcacttctaacgactggtcagcatgtaagattacgtccacgcgttttgcgtgacccgccagtgcttcatcgacactgttatcaataacttcttgccccaaatggttagggcgagtggtatcggtatacatccccggacggcggcgaaccggctcaagcccggtgagtacctcaatggcatcagcgttataagtttgcgtcatggtttaagttagcaattcgagttgatcgtcagagatggtgcagaccaagaaaatcgacgatcgggttgaaataatcttcgaagcccgtgaatgcgtggttgccgccttctatgacagtctggcggcaggaagcgtagtacgccaccgcctggcggtaatccagcacttcatctcccgtctgttgcagcagccagatcaaatccggcgcttccagcgggtcaatctgcatgactttgagatcgtaaatatggcgtgactctagcacatattgctgcccggtgtaggggttctcgttctgaccgagatagtccgtcagcagttcaaacgggcgtaccgccgggtttaccaccactgcgggcagcataaaacattgcgacaaccaggtggcgtaatatccccccagtgacgaaccgacaatacccagcgaatcgccgccatgttccaggacaatggattccagcagttctgccgcgtcggaaggatacggcggcaactgcggaatgatcatctcaacgtcagggtgatgttccgccagccagttttttaacaagctcgcttttgcagagcgcggcgagctgttgaaaccgtgtaaataaagaagcgtagacatcagtagccttctgaagcggtatcaggttggaaacgtgtgtccgccaggcgatgcacctcggtggtcagcgtgccatcagcatgtaactcgagagtacgccagccgggcgcgatggtgtccagcgtaaagttggaacagtgcggcttaaactgcacacaggtcgacggcgttgccagcaggcggcgaccgttccagtcgagatccagctcctgatgaatatgaccgcacagcaagtatttgacgtgcggaaacttcgccagcacggtatccagttcgcccgcgttacgcaggctgtgttgatcgagccaactacaacccgcaggtagcggatgatgatgcagcagcagcaacgtatggcgtcctggcgcatcggccagtttacgttccagccactcaagctgaaactcgctcagctcaccgtgcggcacgccaaacacctggctatccagcaacaggatttgccattgctcaccaataaacacgcgcttcgccggggagatacccgcatcctgtaacgcgctgtacatcgcgggctggaaatcgtggttgcccggcagccagacgcagggcgcacgaaaacttgcgatgccttcagcgaaatgctgataggccgcagaggattgatcctgcgctaaatcacctgtcgcgacaatcaggtcgaattcgtgctggtgtggacgaatcgcctccagcaccgcctggtagctttcccaggtgtttacccctaacagggcttcgtgcttttgtgcaaacaggtgagtatcggtaatttgtaaaatcctgactctggcctcaccagccagaggaagggttaacaggctttccaaatggtgtccttaggtttcacgacgctagtaaaccggaatcgccatcgctccatgtgctaaacagtatcgcaaccagtccgctaaaaactggttaatttgatgcttttcgtcgcgttgatgcaactttttattaggataatcataccgcgctttgaagcgaaaaatctgctggcttgaacacacttcagccaccatcgcgtcatgatacagacgcaccgtcattgacggaaggctccagtaactgatcgcgggcgcagtctgttctattgtcaccagggtagtgtatcgggtcgattccacaatcgtcagccgatattgtgcgtttgccacctgatagcttacagtttcgccgggtgcgtcattgcgcggtaacaaacggcgcaattgtgaaaagttcatctcgcacaggcgcatcatttcaggaaagtcaggtgtgtaacgcttcatttatgcccactcattttttaacgcttgatgatgcagctgcagccattgcaaagcgatgaccgacgctgcgttgtcgattttcccctcttctacccactggtatgcctgttcccggcttaccacatgaacgcgaatatcttcgttttcatcagccagaccatgaataccgcttgcggtcgtggcgtccacttcgcccaccataattgacgaacgctcactggtgccccccgggcttgccaggaaacttaacaccggtttggtccgtttgactatcagtcccgcctcttcaatcgcttcgcgacgggcaacatcttccacactttcaccctcttcaatcatcccggcaaccatctccagtagccagggggtttcactggtgtcgtatgcggcaatccgaatctgctcaatcagcacaacttcatcacgcactgggtcaaagggtagcaagactgcggcgtgaccgcgctcaaaaatttcccgccgcacctcatgactcatttgcccgttgaatagacgatgacgaaatctataaagatctaatgaaaaaaagccgcgataaagtgtttctcgtgcaataatttctacatcgtttttgccaaatgtaacgggcaggttgtctggcttaagcattgttaatgtcctggcactaatagtgaattaaatgtgaatttcagcgacgtttgactgccgtttgagcagtcatgtgttaaattgaggcacattaacgccctatggcacgtaacgccaaccttttgcggtagcggcttctgctagaatccgcaataattttacagtttgatcgcgctaaatactgcttcaccacaaggaatgcaaatgaagaaattgctccccattcttatcggcctgagcctttctgggttcagttcgttgagccaggccgagaacctgatgcaagtttatcagcaagcacgccttagtaacccggaattgcgtaagtctgccgccgatcgtgatgctgcctttgaaaaaattaatgaagcgcgcagtccattactgccacagctaggtttaggtgcagattacacctatagcaacggctaccgcgacgcgaacggcatcaactctaacgcgaccagtgcgtccctgcagttaactcaatccatttttgatatgtcgaaatggcgtgcgttaacgctgcaggaaaaagcagcagggattcaggacgtcacgtatcagaccgatcagcaaaccttgatcctcaacaccgcgaccgcttatttcaacgtgttgaatgctattgacgttctttcctatacacaggcacaaaaagaagcgatctaccgtcaattagatcaaaccacccaacgttttaacgtgggcctggtagcgatcaccgacgtgcagaacgcccgcgcacagtacgataccgtgctggcgaacgaagtgaccgcacgtaataaccttgataacgcggtagagcagctgcgccagatcaccggtaactactatccggaactggctgcgctgaatgtcgaaaactttaaaaccgacaaaccacagccggttaacgcgctgctgaaagaagccgaaaaacgcaacctgtcgctgttacaggcacgcttgagccaggacctggcgcgcgagcaaattcgccaggcgcaggatggtcacttaccgactctggatttaacggcttctaccgggatttctgacacctcttatagcggttcgaaaacccgtggtgccgctggtacccagtatgacgatagcaatatgggccagaacaaagttggcctgagcttctcgctgccgatttatcagggcggaatggttaactcgcaggtgaaacaggcacagtacaactttgtcggtgccagcgagcaactggaaagtgcccatcgtagcgtcgtgcagaccgtgcgttcctccttcaacaacattaatgcatctatcagtagcattaacgcctacaaacaagccgtagtttccgctcaaagctcattagacgcgatggaagcgggctactcggtcggtacgcgtaccattgttgatgtgttggatgcgaccaccacgttgtacaacgccaagcaagagctggcgaatgcgcgttataactacctgattaatcagctgaatattaagtcagctctgggtacgttgaacgagcaggatctgctggcactgaacaatgcgctgagcaaaccggtttccactaatccggaaaacgttgcaccgcaaacgccggaacagaatgctattgctgatggttatgcgcctgatagcccggcaccagtcgttcagcaaacatccgcacgcactaccaccagtaacggtcataaccctttccgtaactgatgacgacgacggggcttcggccccgtctgaacgtaaggcaacgtaaagatacgggttatctgccgcattcttcccccttctcgcttcaatttcgaccagccatcctctattctgatgggtatttaccactggtcccggaagacaaaaatgaaacggacaaaatccatacgccacgcatcgttccgcaaaaactggagcgcacgccatctgacaccagtcgctctcgcggttgccactgtttttatgctggctggctgtgaaaagagtgatgaaacagtgtctctctatcaaaatgctgacgactgttcagctgcaaacccaggcaaaagcgccgaatgtaccaccgcgtacaacaatgcgctgaaagaagccgaacgtactgcgccgaaatacgccacccgtgaagactgtgttgctgaatttggtgaaggtcagtgccagcaggcaccagcccaggctggcatggcaccagaaaaccaggcgcaggcccagcaatccagcgggagtttctggatgccgctgatggccggttacatgatggggcgtctgatgggcggcggcgcgggatttgcacagcagccgctgttctcctcgaaaaacccagccagtccggcttacggtaaatataccgacgcgacgggtaaaaactatggcgcagcccagccaggccgcaccatgaccgtaccgaagacggcaatggcaccaaaaccggcgaccaccactaccgttacccgtggcggttttggtgaatctgttgccaaacaaagcactatgcagcgtagtgcaaccggtacctcttctcgttcaatgggtggctgataccgatggaaagagtcagtattaccgagcgcccggactggcgtgagaaagcccacgaatacggtttcaattttcacaccatgtacggcgagccgtactggtgtgaagatgcttactacaagttgaccctcgcccaggttgaaaagctggaagaagtcaccgccgaactgcaccagatgtgcctgaaagtggtggaaaaagtgatcgccagcgatgagctgatgaccaaattccgcattccaaaacacacctggagttttgtgcgccagtcatggctgacgcaccagccatcgctttattcgcgtcttgatctggcgtgggatggcactggtgaacctaaacttctggaaaataacgccgatacgccaacgtcactatacgaggcggcgttctttcagtggatctggctggaagatcagcttaacgccggtaacttgccggagggcagcgaccagtttaacagtctgcaagaaaaactgatcgatcgcttcgttgagctgcgtgaacagtatggcttccagttgctgcatctcacctgctgtcgcgacacggtggaagatcgcggaaccattcagtatttgcaggactgcgcaacggaagctgaaattgctactgagttcctctacatcgatgatatcgggttaggtgaaaaaggtcagttcacggatttacaggatcaggtaatttccaacctgttcaaactgtatccgtgggaatttatgttgcgtgagatgttctcaaccaagctggaggatgcaggcgtacgctggctggaaccggcgtggaagagcattatctccaacaaggcacttctaccgctactgtgggagatgttcccgaatcacccgaacctgctgcccgcttattttgcggaagatgatcatccgcaaatggaaaaatatgtggttaaaccgatcttctcccgtgaaggcgcaaacgtgtcgatcattgagaacggcaaaaccattgaagcagcggaaggtccgtatggcgaagaagggatgattgttcagcaattccacccgttaccgaaattcggcgacagctatatgctgattggtagctggctggtgaacgatcaacccgccggaattggcattcgtgaagaccgtgcattgatcacccaggatatgtctcggttttatccacatatttttgttgaataagccacgataccggatggcactcgccatccggtaattgttagcctatctgcaccgacagcatactcaggctgcccatttctataccctcaaccggaatggtaattggctcctgcccatcccacgcacctaacacatacaacaacggcaaataatgctctggcgttgggttcgataacgtgccaccttcatggtcgaggtaattcaccagaggatgttgttccactggcccttgccacgtcagattcactttcacatactcattaaacgacgtcgcccacggatacggtgaactatcaccgtgccacttcactgtgcgcaggttatgcaccacgttaccgctggcgaccaacattattccttcatctcgcaacgctgccagtttgcgccccatttcgaaatgccaggcggcaggtttgctactgtcgatactcaactgcaccatcgggatatcagcgtcaggatacatcttaatcagcacgccccacgagccgtggtcaaagccccaggcttctttatccagcgtcaccgggatcggcgctaacagctcaaccagacgctgtgccagcgcaggcgaacccggagcaggataatgcgtatcgtacagcgcctgcgggaagccaccaaagtcatgaatcgtgggcggcgtctccatcgcggtcactcctgttccacgggtaaaccagtgagccgaaaccaccacaatcgcttgcgggcgtggcaatgtcatccccaacttctgccagctgcgggtatacaaattatcttccagcacgttcatcggactaccgtgacctaaaaacaatgctggcatacgtgttgaagacatgatgatatccttaactaaaggtgtcattttgatatcctcacaatacgcttgttcggcggagtaagaacccggataacaatgatgatgatcatcagttattttgacgatctgcctgaaggtgaagatttataaggagttgtcgatgtcagtacctctcattctgaccatactggcgggggcagccacgtttattggcgcgtttctcggcgttctcgggcaaaaaccctcgaaccgcttactggcgttttcgctaggttttgcggcggggatcatgttgctcatctcattaatggaaatgcttcctgccgcactagcagctgaaggaatgtcgcctgtgttgggttatggaatgtttatcttcggtctgcttggctattttggcctggaccgcatgttgccacatgctcatccgcaggatttaatgcaaaaatcggtgcagccgttgccaaaatcgatcaagcgcacagccattctgctcactctcggcatcagtctgcataacttcccggaagggattgccacctttgtcacggcgagcagcaacctggagctgggatttggcatcgcactggccgtcgcgttgcacaatatccctgaaggtctggcagtggcaggcccggtttatgcggcaacggggtctaaacgcaccgcgattctgtgggcggggatttctggactagcagaaattcttggtggtgtgctggcgtggttaatcctcggtagcatgatttccccggtggtcatggcggcaatcatggcggcggttgcaggaattatggtggcgctctcggttgatgaattaatgccgctcgccaaagagattgaccctaataataaccccagctatggcgtactatgtggaatgtcagtgatgggattcagtttagtgctgctacaaacggcgggaattggttaaaaacaacatcagaagttgtccagcgcatggacaacttctgccagcttcacgaaagccttattctaccttttcggctgtctcttctctcgtactgtttaagtatttgttccgcgcttcaagcagtgcgtctctgtcctggcgaaacgcccgacaataacgtttcaaatgcaggaaataacccaccacaaccagagcaatcaatacaatccagtaccaggcgataaacatccttttacccttaatatttaacaatactaaacatttagcgtataaatttcacatatcctttttcggatatattcatatggtcgcataataacggaacaattatatgattttgatcataatgaaaaagaatgcctgatattaatgaaattttctcatagaaagagaagcggaattaacatcttgcatagcagggaaaaataaaaaccgaagcctgctacaacttcggtttcttgattaaggcagtaaattaagcagcggttttcagctggctttacgctcatgtgcctgacggtatgccaccaggtcttcaatagtcacgagcgccatattgtgtttattggcaaactcaatacactctggtgcacgcgccatcgtgccatcgtcattagtcagctcacacagtacaccagccggtttaaagcctgccagcgtcatcagatcaatagttgcttcagtatgaccgccacgcgtcagtacaccacctgcctgagcgcgaagtgggaaaacgtggccaggacgattcagatctgacggttttgcgccatcggcaatcgctgcgcgaacggtcgtaatacggtcagcggcagaaacaccggtagtcacaccttcagctgcttcaatggtcacggtaaaaccggtgccataggcgctggtgttattttctaccatcattggcagatcgagttgtttacggcgatcttcagtaatgcacaggcaaacaataccgctaccgtggcgaatggtcagcgccatctgctcaacagtcatggtttctgccgggaagatcatatcaccttcgttttcacggtcttcatcatcaagcaccattacaccgcgtccttcacgcagcgcagccagtgcattttcaacacgttcgaaaggcgtaccaaaagaggaaagtagcgtctgattcatggtaaaaaaacctcactaaaattatggttaccagaatcagggcagtcttaggagtggcggcatatagccaaaataacgtgagcgggtccatgcccgacagaatcgttactctctcccatccggactctaaccgtcggccccggaattacaccggatctgctgtcctttgagttcgcacccaaagcgctcgcgggctttcaactgagttgatttaccgccggtggggaatttcgccccgccctgagaataagcggattcactataacgctaatgattagcggcagcaacgcatagcttcacataattctggtttatgacttacccttatcgcactacaatggcactcaacacctatcagtacagggaaactacaatgattgacccgaaaaaaattgagcaaatcgctcgccaggttcacgaatcaatgcctaaaggaatcagggagttcggggaagatgtggagaaaaaaatccgccaaaccctacaagcgcagctgacgcgcctcgaccttgtaagccgtgaagagttcgacgtccaaacgcaagtcctgttacggactcgtgaaaaactggcgctgcttgaacaaagaatcagcgaactggaaaatcgcagtactgagatcaaaaagcagccagatccagagactctccccccaacgctgtaaacattcgtctttaatgcactgtaaattatgaattaatcctctaatttatagtgctttctattaccttatcgcgtaatcccattcagaaaaccatcacaaaaatgaatgagtacaattgaaagtataattgcaatgtattttttaagttttacttaatcgatatttagataaactaattttataaaaaacacaaaataaaatatcatatttcaatgattagtagtccttaaataacagttactaatcattctcttttctacttatctttatataaaggaatattatgtccgcttttaaaaagtcacttcttgttgctggcgtagcaatgattctttccaataacgtgtttgctgatgaaggtcacggtattgttaaatttaaaggtgaagttatctctgctccatgttctattaaaccaggtgacgaagatgtaactgtaaatctgggtgaagtagcagataccgtactgaaaagcgatcagaaatctttggctgaacctttcactattcacctgcaggactgcatgctgagtcagggtggaactacttattcaaaagcgaaggttactttcactacagcaaataccatgacgggtcagtctgatcttctgaaaaataccaaagaaactgaaatcggcggcgccactggcgttggcgtacgtattctggacagccagagcggcgaagtaactttaggtactccggtagtaattacgttcaacaataccaacagctatcaggaactgaatttcaaagctcgtatggaatccccaagcaaagatgccaccccgggcaacgtttacgctcaggctgactacaagattgcttacgagtaatcgcatttggccgggttcgcccggccacatcattaacggattaatgataagtggatcagatgtataaaaaattaaaattaaccacaataagcgaattgattaaaaatatttattgttcattatccgttatcatcattggttgtgcgtcagcttatgccgttgaattcaacaaagatttaatcgaagccgaagatcgtgaaaacgttaacctttcccaatttgaaactgatggccaattacccgtcggcaaatattcactaagcactctgattaataataagaggacgccaatccaccttgacctccaatgggtattaattaataaccaaactgcagtttgcgtgacaccagagcaattaacattattaggatttactgatgaatttattgaaaaaactcagcaaaacctgatcgatggttgttaccctatcgaaaaagaaaaacaaattacaacttatctcgataaagggaaaatgcaattatccatatctgcacctcaggcatggttaaaatacaaagatgcaaactggacgcctcctgaactttggaatcatggtattgctggggcatttcttgactacaatttatatgcctctcattatgcaccacatcagggcgataattcgcaaaatataagttcctatgggcaggctggggttaatcttggggcctggcgcctgtgtactgattaccagtacgatcagtcatttaacaatggcaaaagccaggcgaccaacctggattttccgcgtatttatttgtttcgcccaatcccagcaatgaatgcaaaactaactataggtcaatacgatactgaatcctctattttcgactctttccatttttctggcatttcgttgaaaagcgatgagaatatgttaccgccagacctacgtggttacgcaccgcaaatcacgggtgtcgcacaaacgaatgcaaaggtcactgtctcacagaacaaccgtattatttatcaagaaaatgttcctccaggcccatttgctattaccaatttattcaatacattacaggggcaacttgacgtcaaggttgaagaagaggacggacgcgttacgcaatggcaagttgcatctaatagtattccttatctgacgcgtaaagggcagattcgctacaccactgctatgggtaaaccgaccagcgttggtggtgattccttacaacaacccttcttctggactggtgaattctcatggggttggctgaacaatgtatccctgtatggtggttcagttttaacaaagcgtgattatcaatctctggctgccggcgttggttttaaccttaactcattaggttcattatcttttgatgtcacacgatctgatgctcagttgcataatcaggataaagaaacgggttatagctaccgcgctaactattcaaaacgttttgaatctaccggtagccagctcactttcgctggttaccgtttctctgataaaaactttgtgacaatgaatgaatatatcaatgacactaaccattacacgaattatcagaatgaaaaagagagttatattgtcacgtttaaccagtatcttgaatcattaaggttaaatacatacgtaagtttggctcgtaatacttactgggacgccagcagtaatgtgaattattcattatcacttagccgcgattttgatatcgggccattaaaaaacgtctccacttctctaacatttagccgaataaactgggaagaagacaaccaggatcaactgtacctaaatatttcgattccctggggaactagtagaacattgagctatggtatgcaacgaaatcaggataatgagatttcgcatactgcttcgtggtatgactcttccgatcgaaataattcctggagcgtttctgcttcaggcgacaatgatgaattcaaagatatgaaagcgtcactacgcgccagttatcagcataataccgagaacggtcgactctacctctccggtacatcacagcgagacagttattattctctgaatgccagttggaatggttcattcactgcgactcgccacggtgccgctttccacgactatagcggtagtgctgactcgcgttttatgatcgacgcagacggcactgaagatattccgttgaacaataaacgcgcggtaactaatcggtatggcatcggagttattccatcagtcagcagttacataacaacatcattaagtgttgatacccgaaatctgccagaaaatgtggatatcgaaaactcggttatcaccaccaccttaaccgagggtgctattggctacgccaaacttgatacccgcaagggctaccaaatcataggggttattcgcctggcagatggtagtcatccaccactggggattagcgtaaaagatgaaaccagccacaaagaattaggactggttgctgatggcggctttgtatacctcaacggcattcaggatgataacaaacttgctttacgctggggtgacaaatcttgttttattcaaccacccaatagcagcaacttaaccaccggaacggctattttaccgtgtattagccaaaattaattcaggatgaaactaatgcgctacttaaatacaaagaatatcattgcagcaggagtattactctcctgtatgagcagcattgcctggggtgccatcatcccggatcgtacccgtatcataatgaatgagtcagataaaggcgaagcattaaaacttactaatcaaagtaaaaacctgccctatctggcccaaacatggatagaagatacgaaaggcaataaatcgcgtgactttattgtcactgttcctccaatggtgcgtttaaatcccagtgagcaaattcaaataagaatgataactcaggaaaaaattgctcaacttcctaaagacagagaaacgctcttctattttaacgtgcgagaaataccgcccaaaacagataaaaaaaatgtgatgcaagtcactatgcagcacgcattgaaactattctggcggccaaaagccattgaattagaagacgatggggtaatgacttacgaaaaagttgaaatcattcgtagaaatgacggttcgatccgctttaacaataagatgccttatcacgttacgctgggttatatcggaacaaatggggtaacgatgttaccacaaacgcaaagcttaatggtaaccccttttagctatgcaaatacgcagtttaaaaatgttccgtcaacttttcaggtgggttatatcaatgactttggtggattaagtttttatgaaataaactgccctgtagtaaataacatttgtaatatttctgtagccaaccgagatcaataatatgcgctacttgttaattgttattactttttttatgggttttagttcattacctgcatgggcaatggactgctatgctgaacatgaaggtggaaataccgttgtcattggttacgtaccaagaatctctatccccagcgatggtaaaaaaggtgataaaatctggcaaagcagtgaatattttatgaatgttttctgtaataatgcactaccaggcccatctccaggagaagaatacccatctgcatgggcaaatataatgatgttgttagcatcaggtcaagacttttataatcaaaactcttatactttcggtgtaacttataatggggttgattatgattctacatctccactacctattgcagcacctgtatgtattgatataaaaggagccggaaccttcgggaatggctacaaaaagcccgcagtctgtagtggcggtcctgaaccgcaattatcagtaacttttccagtacgagtgcagctatatattaagctagctaaaaatgccaataaagtaaataaaaaacttgtattacctgacgaatatatagcacttgaatttaaaggtatgagcggagcaggtgctatagaagtagataaaaatctgaccttcaggattcgcggattaaataacattcatgtccttgactgctttgttaatgttgatctggaaccagctgatggcgttgtcgactttggtaaaataaattcccgaacaattaaaaataccagcgtgagtgagacgtttagcgtagtcatgaccaaagatccgggtgcggcctgtactgagcagtttaatattttagggagttttttcactacggatattttgagtgattatagccatctggatataggtaatggtctgctattgaagatatttcataacgatggaacagcaacggaatttaaccgcttctcacaatttgcttctttttcatcgtctagtgcgccttcggtcaccgcaccattcagggcagaactgagtgcgaacccggcagaaacggttgttgagggaccgtttagtaaagacgtaatcctgaaaatcacctataactagtatctaatacaaacactaaaacgggccatcaggcccgttatatcagtgctctaactccagctctcttgcctgcatcatctgttgacaataccaggcataacgtgcgcaaaaccaggttctatgttcttcatccatgttaccagtaacggccagaatatcgaccgggcgaccttctgcgtgcattctggcaaaactacgcgccaggaaatcgaaattatttaaagaattaagactatgatccataagcacatcctccggttatcgcataccttttaaggccatatgctttttctgatttcagtattccccaatcagtgtagtgcctttaaacataacgtgcgtaaatatattgtccccgatcacactttttagtgaaaaataaaaaaccatattaaaagactttctcttccagaacttctctaacctgtgttattattaacacagataaatgtaagcaaggaaactattgcaaagtaaatattgcgtcactaaatggacattggagtgatatatgattttattcgccgactataacaccccttatcttttcgctatttcctttgtactgttgatcggcctgttagaaatttttgcgcttatctgcggtcacatgctctccggtgctcttgatgcacatcttgaccattatgattctataaccacaggtcatattagccaggcacttcattatctcaatattggaagattgccagctctcgtcgttctctgcttactggctggtttttttggtcttattggcatcctgttgcagcatgcctgcatcatggtctggcaatcaccactgtcgaacctgttcgtggttcctgtcagtttactgtttacgattattgcggtgcattataccggtaaaatagttgcgccctggattccacgcgaccatagttcagctattacagaagaagaatatattggtagcatggcgttaattaccggtcatcaagccacttcaggtaatccctgcgaaggaaaactcaccgatcaatttggccaaatacattatttactactggagcctgaagaaggaaaaattttcactaaaggagacaaagtgttaattatttgccgactttctgcaacgcgatatttggcggaaaataatccctggccccaaatattgtaatttattaatcaaaaggaaatttaataatggatgatattgttaattctgtgccctcctggatgtttaccgcaattattgccgtatgcattctgtttattattggaattattttcgccaggctctatcgtcgcgcttcggcagagcaagcttttgttcgtactggtttaggtgggcaaaaagtggtaatgagcggtggcgcaatcgtgatgccgatctttcatgaaataatccccatcaatatgaatactctgaagctggaagtcagccgctcaaccattgatagcctgattacgaaagatcgtatgcgcgtcgatgtagtagtcgctttctttgtgcgggtaaaaccttcagtagaagggattgccaccgctgcccagacgctggggcaacgcaccctgtcgcctgaagacttacgtatgttggttgaagataaatttgtcgatgccctccgtgcaacagctgcgcaaatgaccatgcatgagttacaggatacccgcgagaactttgtgcagggggtgcaaaatacagtggcagaagacctgtcgaaaaacggtctggaactggagagcgtttcacttaccaactttaaccagacctcgaaagaacatttcaatccgaacaatgcctttgacgccgaaggtttaaccaaactgactcaggaaacagagcgccgtcgccgcgaacgtaacgaagttgaacaggatgtagaagttgcggtgcgtgaaaaaaatcgcgatgcgctatcgcgcaagctggagattgaacagcaagaagcgtttatgacgcttgagcaggagcagcaggttaaaacccgtactgccgaacagaatgcacgtattgcggcttttgaagctgaacgtcgtcgtgaagcagagcagacacgaattctggctgaacgacagattcaggaaacagaaatcgaccgcgaacaggccgtccgctcaagaaaggttgaagctgaacgtgaagttcgcattaaagagatcgaacagcagcaggtcaccgaaatcgctaaccagacgaaatcgatcgctattgccgccaaatcggaacaacagtcccaggcagaagcgcgtgctaatctcgcacttgcagaagcggtaagcgcccaacaaaacgtagaaaccactcgccagactgccgaagccgatcgtgctaaacaagttgccctaatcgctgccgcgcaggatgcagaaaccaaagcggttgaactgaccgtgcgggcgaaagcagaaaaagaagccgcagagatgcaggcggcggctatcgttgagttagccgaagctacacgtaaaaagggtctggcggaagcagaagcacaacgtgcgctgaacgatgctatcaacgtactttctgatgaacaaaccagccttaaattcaaactggccttgttgcaggcgctgcctgcggtaatagagaaatccgttgagccgatgaagtcaatcgacggtatcaagattattcaggtcgatggtctgaatcgtggcggcgctgcgggtgatgcaaacacgggtaatgtggggggcggaaacctggcggaacaagcattatcagccgctctctcttaccgcacacaggcaccgctgattgactccttgctcaatgaaattggcgtttcaggcggctcactggcggcattgacttcacccttaacctcaacaactcccgtcgaagaaaaagcagagtaaaccctcttccaggaataatccctggcccaaaaagccggggattttttatatctgcgttccgctaaaaagtgcaaatgatcaggttgttgcagcattttgcgtgacggctcggggaaggcaaaactgcatcagagaaagcattgcgtggggtctggcgctcatcaacaatcggggagtcagcagggggctgaaacgggaaagcccctcccgaagaaggggccttacagaaggaaagggttatgatgaagctcgtcatcatactgattgtgttgttactcgtaagtttcgcagcttattaacagccaatcagaggggggagaaatcctccctcacccttgttcctttactttaggttgaaaaaaatcagcgtcaagaaggtttcattaacacatatccctggcccaaaaagccggagattttttatatctgcgttccgctaaaaggtgcaaatgctcaggacgttgcagcgttttgcgtgaccgctcggggaaggcaaaattgcctctgggaaagcattgcgcggggtccggcgctcatcaacaatcggggggcagcaaggggctgaaacgggaaagcccctcccgaagaaggggccttgtataaggaaagggttatgatgaagttcgtcatcatactggttgtgttgttactgttaagtttcccgacttactaacaactcatcagaggggggagaaatcctcccttacccttgttcctttactctaggttgaaaaaacaacagcgtcaataggcctgccatgtacgaagcgagatctgtgaaccgctttccggttagccttttttatcctgttggatcttcttgatgatgttggtcgtcgagcaaccgtcttcaaagttgagcaccaacacttcaccaccgttggcccagacttctttactcccggcaatctcttctggtttatagtcgccgcctttcaccagcagatctggcaagatcccggcgatcaagcgctgcggcgtgtcctcttcaaacgacactacccagtcgaccgcttccagtgcgcccagcacaatcatacgctgttcgagtgggtttaccgggcgggaatcccctttcagccgtttggtggaggcatcgctgttgacggcaacaatcaagcggtcacccagcttgcgggcatttgccagataagagacgtgcccggcgtgcaggatgtcaaagacaccgttggtcattaccactttttcaccacgtttacgcgctgccgctacagccagcttcagttcctcttcggtcatcacgccaaagccggtatctgcgcgtccacgtacagcgttttccagctcgatcggcgaaaccgtggacgtccccagtttgccgaccaccacaccagccgccgcattggcaaagaagcaggcttcttccagcgaattacccgctgccagcgttgccgccaggacaccaatcaccgtgtcgcccgcaccggtaacgtcatacacttcctgcgcctgggttggcatatgcagcggcgctttacccggttgcagcagcgacataccctgttcggaacgggtcactaacagagccgagagttcgtaatcggcaatcagtttcatgccgcgctcaacaatctcttcttcggtcttacatttaccgacaacagcttcaaattccgagagattcggcgttaacagcgtagcgccgcggtagcgctcaaaatcggtaccttttggatcaatcagcaccggaacacccgctttacgcgccagttggatcatctgctgtacgcttgccagcgcacctttggcgtagtcagaaagcaccagcgcgccaatcgaactcagcgcctgattaatccgttcgtgcagcggttgcggatcaacaccttcgaaaccttcttcaaaatccaggcggatcagctgttggttgcgggaaagtacccgtaatttggtgatagtcggatgcgttggtacagaaacgaagtcgcatttgacgttgacgtcggccagagatttactcagcgcgcgcgctgcatcgtcaatgcccgtcaacccgaccaggcgtgcattagcaccgagagaagcgatattcatcgccacgttagccgcgccgcccggacgttcttcgatggtattcactttaaccacgggcaccggcgcttccggcgagatacgactggtggggccgtaccagtaacgatccagcatcacatcaccaaccaccatcactcctgcacgttcaaactctggcagcgttactttcattcctgtctcctgagagattcaaaatttgcgcgcgataataccatacttcattcttccaccagccacttctgccagcttgcccgcaccagttcacgctctgcggtgaagcaatcctccgacacatggcccggcaattcctgtaatgccagatgatgaagttcatcgcgaagcgtagtgtaagcacgggtcagcgccatcgcttcctgctcttccataatgtcgttttgcgccagtagttccagaatacgcacgttgtctgaccagcgcgttaacttcggtttttcatgagcgtagctcaacaccagatattgggtaataaattcgatatcggtaattcccccttcatcagctttgatatcaaagcgatcgcgatgtttattgccgagatgagcgcgcattttctcgcgcatttcccgcacttccgtttgcagagttttaccttcacgcggcagcgtcataatctcgcgacgtactgcgtcaaagtgcgcggtgagctgcggatcgccgtacactacacgcgcacgcaccagcgcctgatgctcccacgtccaggcctcgtttttctgataatcggcaaatgcttctgtggaggtaaccagcattcccgccgccccggacgggcgcagccgtgcatccacttcgtacaaaatgccggaagaggttcgcgtgctgaacaggtgcataatgcgttgcgccagacgcagataaaactgtcgtccgtcgatttcccgctcgccgtcagtcatcgcatccattgggcaatcatggaggaagatcaggtcaagatcggaactgtagcctaactcccagccgcccagcttgccgtagccgaccactgcaaaaccacgcccttcgcgttcgttcaggtgattcggcttaccgtagcgggcaaccatttgaacccacgcctgctgaacgacggcatctatcatggcttccgccagccaggttaagtgatcgctcactttcatcaccggtagcgtaccggcgatatccgctgcggcgatgcgtaacagctgcgcctgtttgaactgacgcagcgcctcaagctgttgctcttcgtcatcttccggcacgcgcagcaaatactggcgcaactcatcgcggtaggcatcggtcgccgtcggctggtaaagggtgtttggatcgagcaattcatccagcaataatggataacgcgccagctggctggcaatcatcggcgacgcggcacacagagaaatcaaatgtttaagcgccgcggggaattcactgagcaattctaaataggtggtgcgggtaacaatccccaccagcaaggcggtaatgcgcgacagcgtaacggcagcgtcttcacgcgcacagacatcacttagcagatgcggcatcagatggtcgagcacctgacgtcctcgcggcccgatggtgcgcttatccagctctttgcggaaatcggcaatcagcgttagcacctgtttgcgatcatcctcgctaagatgcgccagcactggcgtggtgtcatcttcctgcaacgcatcctgccacagctcacgccactgttccgacagcgactcttcctgagtttcactttcgtcgtcgccaatcaattcattaaacacccggcgcacattggtcatatgtgcggtcagcgccccggtcagttgcggccagtcagcaaagtccatcgcccacgccagccgcgcacggttaagctcatcagaaggaagcgtctgggtttgttcgtcgttaatgctttgcagcaggttttccagacgccgcaggaacagatacgccactcgcaattgttcagcatcgttttcagaaagcagatgcagcgcggcaatgacgctgagcgttggcagtaaagagcgcgactgcagcgacggttcgcgcccaccgcgaatgagctggaacacctgaacgataaattcaatttcgcgaatgccgcctgcgccgagtttgatattgtcggtcaaaccacgtcgacgcacttcacgggcaatcatccctttcatgttgcgcagcgactgaatcacgctgaaatcgatgtaacgacggaaaacaaacgggcgcagcatcgcacgcaactcgttagcatagacgccttcgctatcgcccataatccgcgccttgaccatcgcgtaacgctcccagtcgcgcccctgctcctggtaataatcttccagcgccgcaaagctcagcaccagcgggccactttcgccaaacggacgcagtcgcatatccacgcgatagacgaagccatcctgcgttggttgatccagcactttaatcagccgctgccccatgcgggtaaaaaactgcgcgttatccagttcccggcgtccgccctgcgtacaaccatgttccggccaggcaaaaatcagatcgatatctgaggagaaattcagttccccaccgcccagcttacccatgcctaaaatcagcagcggttgcgcttcgccctgcgcattgcacggcgttccccactcgcggcagcaggcgtcatacagccagtcacgcgccgcaacaatcagcgtctccgccagatagctgagctgctgcaatatgctctcttcagtaaccagtgccagcgtttgcgcccaggcgatgcgcaccataatgcgccgccggaatagccgcagctcgcgcattaacccggcttcgtcactcacattacagagcgcctcctgcaaccatgccgcgtaatgctgccattcgtcggcctgcggcggttggctttccagttccgtcagccactctggatgcgcaatcacgctgtcctgcacaaaatcactaaaagtaagtactgacttcgcctgtgcgctaagtgattcctcggctaaaggctctggcagccgctcaacaacggtctgccagtactgctgtaacggtgaagagagcggcttcataagcgattttatccttgcctgattaacgttttccgctgtgcaaccagaacggttcctgattgtttgcctcattacggaaatgttcaatttcgatgcgttgcccggtcgcaatagcgtgatgcagcccctgccagttctccagccaggcttgcgcgacgacaggatcatagtaacccgccagcaacagtattgagtcaatatcacgcgtcaggcgtggcaactggtcacggtagcgatcgcctaacggctggcagaaaacgcttttcagttcagcggcatggcgggaaagatggatatcggcaaagcgtttgaaggagtcgctgattttgccctgcgctttggcatctaaaaatggctgccatgctttgcttaccaaccattcggtcaacgccagcttcgccattgccgtttcggtagagtagaccgccgtcacggcagacaccgcagaagcaatggtcgcctcgcattgagtcagcagatcacgtaagtgagtgctcgctttacgcggcacaataccaccgaacagcatcagcgtatgacggaccaggctaatggctgccagcacctgttctttcgccgcatcgttgccgcgtacccacagttcttcatgatactgccattgcgctaacgccagctcgagcgccgcttccagcccctgttccacatcggcttttgccgcaacatgcaaaatggtggtcggtttgatttcacgcgccggattgccctgcgccagatgatagccacgcgccgctttgctcaggctgccctggcgtaatccggtttgcgataccagttggttcgccagtttcagcaccgcgcgcgtgtcgccgctaagcagttccagttccagctcacagataggttcagcaaattcacccgctttcacttccccctggtcgagggcgatttcaatttggctaccatcgaccgccaccagccatttttcgcgataaaaatcggtgctgaacagcggctgcacgcgggaggcgagatcggcgggcaattcgccgttcggccagacttccgtcggtaactgcgccaggtcgagcgtcggttcgctcaacgccacgttatattccgggcgctgatgtaagccgcctgtcactcttcctgcaactttcatggtcatctcatagcgaccgttttcgccacgaatacgtaagcccatatcgtgcccacgcagccagttatccggcgtttcgtagtaaatattcagcaactgcacggggtcatggtgctcgccgcccagcgtattgagatggtcacgcaacgcctcaacggcactgtgattaacaataaactttaattcgatttcctgagccatggcctttacttatcggttatgtcacataagtgacgatgaacggcgaacttaatgcgatcttttttgtcagtagatagtattttgcgccaaattgccatgcaacgggcaatttgacgggcgtaaaagtttgaagcagtggcaagacctgacacagaggattccgattgatgtcgaatgctttgcgtagcgacactgatgccactactatcgttccactttccatgacaataacgacagcctgatgccaaaattacgcctgatcggattaactttactcgcacttagcgcgactgccgtctcacacgctgaagaaacgcgctatgtttccgacgaactgaatacctgggtccgcagcggtccgggagatcattatcgcctcgtgggcacggttaacgccggcgaggaagtgaccttattacaaactgacgccaacaccaattatgcccaggtgaaagacagctctggccgtaccgcctggatcccgttgaaacaacttagcactgagccaagcctgcgctcccgtgtgccagatctggaaaatcaggtcaaaaccctgaccgataaactcaccaatatcgataacacctggaatcagcgcaccgcagaaatgcagcaaaaagtggcgcagagcgacagcgtgatcaacgggttaaaagaagaaaatcagaaactgaaaaacgagctgattgtcgcgcagaaaaaggtcgatgccgccagcgtacagctggatgacaaacagcgcaccatcatcatgcaatggtttatgtatggcggtggcgtgctggggcttggcttgctgctcggtctggtactgccgcacctgatcccaagccgcaaacgcaaagatcgctggatgaactaaatcgccttcttcgttgcactgtcttattattaggaattgtgtatttgacgaagggatgatggcgtgaagatttatctggtcggtggtgctgttcgggatgcattgttagggctaccggtcaaagacagagattgggtggtggtcggcagtacgccacaggagatgctcgacgcgggctaccagcaggtaggccgcgattttcctgtgtttctgcatccgcaaacgcatgaagagtatgcgctggcacgtaccgaacggaaatccggttccggttacaccggttttacttgctatgccgcaccggatgtcacgctggaagatgatcttaagcgtcgcgatctgaccattaatgcgctggcccaggacgataacggcgagattatcgacccgtacaacggtctgggcgatctgcaaaatcgtctgttgcgccatgtttcccccgcttttggcgaagatccgttacgcgtattgcgcgtggcgcgttttgctgcgcgttatgcccacctcggttttcgtattgccgatgaaactctggcgttgatgcgcgagatgacccatgcgggtgaactggaacacctgacgcctgaacgggtatggaaagagacggaaagcgccctcaccacccgcaatccacaggtgttcttccaggtactgcgcgattgcggcgcactgcgcgttttattcccggaaattgacgcactgtttggcgttccggcccctgccaagtggcatccggaaatcgatacgggtattcataccttaatgacgctctcaatggcggcgatgctgagtccgcaggtcgatgtccgtttcgcaactttatgccacgatctcggtaaagggctgacgccgccagaactctggccgcgtcatcatggtcatggcccggcgggtgttaagttagtggaacaactatgccagcgtctgcgcgtgccaaatgaaattcgcgatttagccagactggtggctgagtttcacgatctcatccacaccttcccaatgctgaacccaaaaaccatcgtcaaattatttgattccatcgatgcctggcgtaaaccgcagcgtgtcgagcaactggcgctgaccagcgaggctgacgtgcgcggcagaaccggttttgaatcagcggactacccgcaaggccgctggttgcgcgaagcctgggaagtggcgcagtcagtgccgacaaaagccgtcgttgaagcgggatttaaaggtgtggagattcgcgaggagctgacccgacggcggattgcggcggtagccagctggaaggaacaacgttgcccaaagcctgaatgagtattgggcattttgccggatgcggcgtaaacgccttatccggctacatgtcaacgacagttgtaggcctgataagacgcgcaagcgtcgcatcaggcgttgattgccggatgcggcgtgaacgccttattcggcctacgcaatcgttgacaacgccaagcatccgacactattcctcaattaaaagaacacgacatacaccgcagccgccacaataaagcgataaatggcgaacgggataaacgaaatgcgcttaatcaattgcaggaaggttttaatcgctatcagcgccaccacaaaagcggtgataaacccaacggcaaacatcgggatatcgccgcttgtcaggaagccccagcttttgtagagatcgagcgccgttgcgcccatcatcatcggcaccgccagcaggaacgaaaactcggaagcagcgtaacggctcacccccatcagcatcccacctgaaatggtcgccccggaacgggagaaacccggccacagcgccagacactggaaacagccaatcataaatgcctgacgataggtcatatcatcaagacccggcgcacgcggctctttcggcttcaggcattcggcggcaatcagcaacaaaccgccaacgaccagcgcatacatcacatttatcgggttaaacaatgacttaatcgtgtcgtggaacaacagccccaataccaccgccggaatcatccccagcaaaatgtggatcagcgttaaacgacctttgctttcaccttcgtgctgcaacgggcggccaaagtggatgccaatcaggccaaacagacgccgccagaacatcactactaccgccagaattgatcctaactggatcacaacttcaaaggttttcgccgtgtcgccctcaaaccccaacaagtgaccgacaataatcatatggcccgtgctggataccggcagaaattctgtcaatccttcgaccacacccaatattgccgctatcagcagcgagtgcatatcgctcatcaataaacccctaaattattaaaatgtaccgcttgtccgaactactgcgtatgaccaggttataaccgtttggtttaacagctgtaaaattaattattttctttcagattattgccacgctcaatgattacgccaacattcgccgcccgcgccactgcgcctggcttgctgagtttgatacgcacccacggcgagttgaagcgtgctaacagcagctccgccacctcttcagccacgcgttccaccagcgcaaaacgcgccccctcgacgtggctgaccaccgtttctgcaatgtcagcgtaactgaggcaatccgccacatcatcacttttcgccgctttacggttatcccacgccatttcgatatcgaacactaacttctgttcgatggtctgttcccagtcgtaaacaccaatagtggtgattaccgaaagttgctctataaatacaatatccatcacgtcctgcctgctttttggctaaccggataccacttccggcgaaatgtgcgtattatccacagattcatcgttgaacacgaattttcaaaacggaacagcttatgagtgcaatcgcgcctggaatgatcctcatcgcgtacctctgcggctccatttccagtgccattctggtttgccgcttgtgtgggctgcccgatccgcgaaccagcggctccggcaatccaggcgcaaccaatgtgttacgtatcggtggcaagggagcagccgtagcagtactgattttcgacgttctgaaaggaatgttgcccgtctggggcgcgtatgaattaggtgtcagccccttctggctaggcttaattgccatcgccgcctgtcttggacacatctggcccgttttcttcggatttaaaggaggaaaaggcgttgctaccgcttttggtgccatcgcacccattggctgggatctcaccggagtaatggcgggaacctggttactgaccgtgctattgagcggatactcgtcgctgggagcgattgtcagtgcactgattgctccgttttatgtctggtggtttaagccacaattcaccttcccggtttcgatgctctcttgcctgatcctgctgcgtcatcatgacaacatccaacgtctgtggcgtcgtcaggagacaaaaatctggacgaaattcaaaagaaagcgcgaaaaggatcccgagtgatttctggtggatctacatgacctgatagccttcatcgggcttgcccagccgttgctggcaccatgccgccagaaattccacgcagacacgtaatttcatgctgcgatagagcggctcccggtaaacagcccagatattggcgctttgtgcatactctggcaatacttgcaccagtttgccactctccagaaacggcaacacatcccactcggaacgcagcataatccctttgccctccagcgcccattgcagcacaatctcgccgctattggaggaaagatgcccgcttaccttcaccgattttttctcctgaccgttccccaactcccatattccatgggtcatatcgcgctctttggtcaccagacagtcatgacgacttaattcctgtagggattgtggctgcggatatttttgcagatactcaggtgctgcgcataatattcttttattttttgtcaaaagatgcgcaatataataatcaggaatttcgtcattaatacgaatatccagatcaatattatcctgcactaaatcaatttgccgatcgaacaattcaaaatgcacctgtaactcaggataattgcgcatcagttcggtaatagctggcgcaatatggctgcgcccaaaaccaaaactgcaaccaatacgaatcatcccctccgggcgcgttttgatttgcgtgacgtcatcgaccagtcgctgatattgggtgaggatttccaacgcatgttcgtaacaacgttggccactttcagtcagcgccacgccgcgagcggagcggttcagcagcgttgttgccagcgtattttcaaggatttggatccgcttggtgacaaatgcaggcgtctgcccaagcgtcgccgctgcggcgctaaaactcccgctgtgaacgatttctaccagtacctgcaagtctttggctaaaggccagctattcagcatcgttaattatccgcagttgtgataagcgcagtgtatttcgcaaaacattgccattccctgctctggcgcaatattcattcttattttcgcgttgattcacgaactgttaattacatattcacggtggcaaaaaatataaaaccacatttttagtggtagtttgtggcggtgaatttttccagacaaatacaaaaactggagttgccatgatgagcgaaagtaataagcaacaggcagtgaataagttgacagagattgtcgctaactttaccgccatgatttctacccgaatgcctgatgacgtggtggataaactaaaacagctaaaggatgccgaaacgtcgtcgatggggaaaattatctaccatacgatgttcgacaacatgcaaaaagcgattgacctgaatcgtcctgcctgtcaggacaccggggagattatgttcttcgttaaagtcggttcccgcttcccactgcttggcgagctgcaaagcatactcaaacaagccgtggaagaggcaaccgtcaaagcgccactacgtcacaatgcggtagaaatttttgacgaagtaaacaccggcaaaaataccggtagcggcgtaccgtgggtcacctgggacatcatccccgacaatgacgatgcggaaatcgaagtttacatggcaggcggcggctgcacgctacctggccgctcgaaagtgttaatgccgtcagaaggctacgaaggcgtggtgaaattcgtcttcgaaaatatctccaccctcgccgtaaacgcctgtccaccggtactggtgggcgtgggcatcgccacctcggtggaaaccgccgccgtactctcgcgtaaagccattttgcgcccgattggcagccgccatcccaatccaaaagcggcagaactggagctacgcctggaagaaggactcaaccgtctggggattggtccacaagggctgaccggcaacagttcagtgatgggcgtacatatcgaatctgccgcccgccatccgtcaaccatcggcgttgctgtctctaccggctgctgggcgcatcgtcgcggcacgctgctggttcatgccgatctcacctttgaaaatctgtctcacacccggagcgcgttatgaaaaagatcctgacaaccccgatcaaagctgaagatctgcaagatattcgcgtcggcgatgtgatctacctgaccggtacgctggtgacctgccgcgacgtttgtcaccgccgtttgatcgaactgaaacgtccgatcccttacgatctcaacggcaaagcgattttccacgctggccccatcgtgcgcaaaaacggcgacaaatgggagatggtctccgtcggcccgacaaccagtatgcgtatggaaagttttgaacgtgaatttattgagcagaccggcgtgaaactggtggttggcaaaggtggtatggggccgctgaccgaagaaggctgccagaaattcaaggcgctacatgtgattttcccggcaggctgcgcggtgctggcggcaacccaggtggaagagattgaagaagtgcactggacagagctcggaatgccggagtcactgtgggtctgccgggtcaaagagttcggcccgctgattgtctctattgatacccacggcaacaacctgatagccgaaaacaaaaagctgttcgtcgaacgccgcgatcccatcgtggaagagatctgcgagcacgtccattacatcaaataaccctcccggagaggctcacccctctcctttttcgcaggcataacacgatgaaaccttccactgaatggtggcgatatcttgcgccgctggcggtcatcgccattattgctctacttccggttcccgcagggctggagaaccatacctggctctactttgccgtttttactggcgtgatcgttggactgatcctcgaacccgtgccgggtgccgtggtggcgatggtgggtatatccatcatcgccatactctctccctggctgctgttcagcccggagcagctcgctcagccaggctttaaattcactgcaaaatccctctcgtgggccgtttccggtttttctaattcggttatctggctgattttcgccgcctttatgtttggcacaggctatgaaaaaaccgggcttggacgccgcattgcgctgattctggtgaaaaagatgggacatcgcacgctgtttctcggctatgcggtgatgttctccgagctgatcctcgcacctgtaacaccgtccaactcggcgcgtggtgcggggattatctatcccatcatccgtaacctgccaccgctctatcaatcacaaccaaacgacagcagttcgcgcagcattggctcgtacatcatgtggatggggattgttgccgactgcgtgaccagcgccattttcttgacggcgatggcaccaaacttgctgttaattggactgatgaaaagcgcatctcacgccacgctgagttggggcgactggttcctcgggatgttgccgctcagcattttactggttctgctggttccctggctggcttacgtgctgtacccgccggtactgaagtctggcgatcaggtgccgcgctgggcagagacggaactgcaggcaatgggcccgctctgttcgcgtgaaaaacggatgctggggctgatggtaggcgcgctggtgctgtggattttcggcggtgattatatcgatgccgcgatggtcggttacagcgtggtggcactgatgctgcttctgcgcattatcagttgggacgacattgtcagtaataaagcggcgtggaacgttttcttctggctggcctcgcttatcaccctcgccaccggactcaacaacaccggttttattagctggtttggcaaactgttagcaggcagcttaagcggttattcgccaacgatggtgatggtggcgttgattgtggtgttttatctactgcgctactttttcgccagcgccacggcgtatacctccgctctcgcaccgatgatgattgccgctgcgctggcgatgccggaaatcccgctgccggtgttctgcctgatggttggtgcggcaattggtctggggagcattcttacaccatacgccaccggccccagtccgatttactacggcagtggttatctgccaacggcggattactggcgactgggggcgatttttgggctgatattcctcgtattgctggtgattaccggcttactgtggatgcccgtggtgttgctttaagtgaggacggtgccggaaattgctctccggcacccaatagttttacgcagccggtaactccgccagcggccagcgcggacgcacgctaacgccgagatccgccgtcgcgcctgctttaaaccgcaccattccggcataggcgatcatcgcgccgttatcagtacaaaattccggacgcgcgtagaacacttcgccgcggcgttttttcatcatttcagccagcttcgcccgtaacgtacggttagcactcacgccgcccgccatgaccagtcgcttaaagcccgtctgatccagcgcccgcttgcacttaatcatcagcgtatcgaccaccgcatcttcaaaggcgcgggcgatatcagcacgcgtctggtcgtcggtgccgttgtcacgaatggtatttgccgcgaaggttttcaggccggagaagctgaaatccagccccggacggtcggtcatcggacgcgggaagacaaagcgcccggcagtaccctgagccgccattttcgacagtaacggcccgccaggataatccagccccagcagcttcgcggttttatcaaacgcttccccggcggcatcatcgatagactcgccgagcagctcgtactgaccaatgccagtcacgctgattaactgcgtatgaccgccggaaacaagcagcgcaacaaacggaaattccggcgggttatcttccagcatcggcgctaacagatgcccttccatatggtgtacagggatcgccggaacgtcccaggcaaacgccagagaacgccccacggtcgcgccaaccagtagcgcgccgactaatccagggcctgcggtataggccacagcatcaatgtcttttgccgttaaaccagactcctttagcgccgcctggatcaacggtacggttttacgcacatgatcgcgggaggccagttcaggcacgacgccgccgtagtcagcgtgcaatttcacctgactatacaattggttggctaacaaacctttttcatcgtcgtaaatggcgatgccggtttcatcgcaggaagtttcaatacccagtacacgcatgacttgttttacctcgctttattaccgcgcagtgtaggaccaatgcgggttgatgtaaaactttgttcgcccctggagaaagcctcgtgtatactcctcacccttataaaagtccctttcaaaaaaggccgcggtgctttacaaagcagcagcaattgcagtaaaattccgcaccattttgaaataagctggcgttgatgccagcggcaaaccgaattaatcaaaggtgagaggcacatgccggtaattaaagtacgtgaaaacgagccgttcgacgtagctctgcgtcgcttcaagcgttcctgcgaaaaagcaggtgttctggcggaagttcgtcgtcgtgagttctatgaaaaaccgactaccgaacgtaagcgcgctaaagcttctgcagtgaaacgtcacgcgaagaaactggctcgcgaaaacgcacgccgcactcgtctgtactaattccccgagagcgttgctctccgatcagaccgagttgtagttgtaaggccgtgcttccgaaaggaatgcgcggcttattttcgtttatgaattgctaaaaatcggggcctatggctggacgaatcccacgcgtattcattaatgatctgctggcacgcactgacatcgtcgatctgatcgatgcccgtgtgaagctgaaaaagcagggcaagaatttccacgcgtgttgtccattccacaacgagaaaaccccgtccttcaccgttaacggtgagaaacagttttaccactgctttggatgtggcgcgcacggcaacgcgatcgacttcctgatgaactacgacaagctcgagttcgtcgaaacggtcgaagagctggcagcaatgcacaatcttgaagtgccatttgaagcaggcagcggccccagccagatcgagcgccatcagaggcaaacgctttatcagttgatggacggtctgaatacgttttaccaacaatctttacaacaacctgttgccacgtctgcgcgccagtatctggaaaaacgcggattaagccacgaggttatcgctcgctttgcgattggttttgcgccccccggctgggacaacgtcctgaagcggtttggcggcaatccagaaaatcgccagtcattgattgatgcggggatgttggtcactaacgatcagggacgcagttacgatcgtttccgcgagcgggtgatgttccccattcgcgataaacgcggtcgggtgattggttttggcgggcgcgtgctgggcaacgatacccccaaatacctgaactcgccggaaacagacattttccataaaggccgccagctttacggtctttatgaagcgcagcaggataacgctgaacccaatcgtctgcttgtggtcgaaggctatatggacgtggtggcgctggcgcaatacggcattaattacgccgttgcgtcgttaggtacgtcaaccaccgccgatcacatacaactgttgttccgcgcgaccaacaatgtcatttgctgttatgacggcgaccgtgcaggccgcgatgccgcctggcgagcgctggaaacggcgctgccttacatgacagacggccgtcagctacgctttatgtttttgcctgatggcgaagaccctgacacgctggtacgaaaagaaggtaaagaagcgtttgaagcgcggatggagcaggcgatgccactctccgcatttctgtttaacagtctgatgccgcaagttgatctgagtacccctgacgggcgcgcacgtttgagtacgctggcactaccattgatatcgcaagtgccgggcgaaacgctgcgaatatatcttcgtcaggaattaggcaacaaattaggcatacttgatgacagccagcttgaacgattaatgccaaaagcggcagagagcggcgtttctcgccctgttccgcagctaaaacgcacgaccatgcgtatacttatagggttgctggtgcaaaatccagaattagcgacgttggtcccgccgcttgagaatctggatgaaaataagctccctggacttggcttattcagagaactggtcaacacttgtctctcccagccaggtctgaccaccgggcaacttttagagcactatcgtggtacaaataatgctgccacccttgaaaaactgtcgatgtgggacgatatagcagataagaatattgctgagcaaaccttcaccgactcactcaaccatatgtttgattcgctgcttgaactgcgccaggaagagttaatcgctcgtgagcgcacgcatggtttaagcaacgaagaacgcctggagctctggacattaaaccaggagctggcgaaaaagtgatttaacggcttaagtgccgaagagcgatcgggaagcccccgacagccgcactgagaggcagcggcaaatatataagtacgccctcgtaattatcgttggcggtaaacaaccgttggatttcagcgttaacggctgaaggacatcgggtcaatcgcccaacaccaacctcatgaaataagtgtggataccgtcttatggagcaaaacccgcagtcacagctgaaacttcttgtcacccgtggtaaggagcaaggctatctgacctatgccgaggtcaatgaccatctgccggaagatatcgtcgattcagatcagatcgaagacatcatccaaatgatcaacgacatgggcattcaggtgatggaagaagcaccggatgccgatgatctgatgctggctgaaaacaccgcggacgaagatgctgccgaagccgccgcgcaggtgctttccagcgtggaatctgaaatcgggcgcacgactgacccggtacgcatgtacatgcgtgaaatgggcaccgttgaactgttgacccgcgaaggcgaaattgacatcgctaagcgtattgaagacgggatcaaccaggttcaatgctccgttgctgaatatccggaagcgatcacctatctgctggaacagtacgatcgtgttgaagcagaagaagcgcgtctgtccgatctgatcaccggctttgttgacccgaacgcagaagaagatctggcacctaccgccactcacgtcggttctgagctttcccaggaagatctggacgatgacgaagatgaagacgaagaagatggcgatgacgacagcgccgatgatgacaacagcatcgacccggaactggctcgcgaaaaatttgcggaactacgcgctcagtacgttgtaacgcgtgacaccatcaaagcgaaaggtcgcagtcacgctaccgctcaggaagagatcctgaaactgtctgaagtattcaaacagttccgcctggtgccgaagcagtttgactacctggtcaacagcatgcgcgtcatgatggaccgcgttcgtacgcaagaacgtctgatcatgaagctctgcgttgagcagtgcaaaatgccgaagaaaaacttcattaccctgtttaccggcaacgaaaccagcgatacctggttcaacgcggcaattgcgatgaacaagccgtggtcggaaaaactgcacgatgtctctgaagaagtgcatcgcgccctgcaaaaactgcagcagattgaagaagaaaccggcctgaccatcgagcaggttaaagatatcaaccgtcgtatgtccatcggtgaagcgaaagcccgccgtgcgaagaaagagatggttgaagcgaacttacgtctggttatttctatcgctaagaaatacaccaaccgtggcttgcagttccttgacctgattcaggaaggcaacatcggtctgatgaaagcggttgataaattcgaataccgccgtggttacaagttctccacctacgcaacctggtggatccgtcaggcgatcacccgctctatcgcggatcaggcgcgcaccatccgtattccggtgcatatgattgagaccatcaacaagctcaaccgtatttctcgccagatgctgcaagagatgggccgtgaaccgacgccggaagaactggctgaacgtatgctgatgccggaagacaagatccgcaaagtgctgaagatcgccaaagagccaatctccatggaaacgccgatcggtgatgatgaagattcgcatctgggggatttcatcgaggataccaccctcgagctgccgctggattctgcgaccaccgaaagcctgcgtgcggcaacgcacgacgtgctggctggcctgaccgcgcgtgaagcaaaagttctgcgtatgcgtttcggtatcgatatgaacaccgaccacacgctggaagaagtgggtaaacagttcgacgttacccgcgaacgtatccgtcagatcgaagcgaaggcgctgcgcaaactgcgtcacccgagccgttctgaagtgctgcgtagcttcctggacgattaatcggtaggccggatcaggtgttacgccgcacccggcactaggccctctgcacaaacgccaccttttcggtggcgttttttatcgcccacgcactaccagcgcctggtccagctcgcgatacgcttcaaccagtttctccagtgaaacgcgacttaaaccgctgggatttggcagcacccaaatctgcgtcgaaccaatggtgagcgtttgtttcccccactgtgcaccgcgctggctgaatccctgttcatatgcttgtttgcccagaatcgccaacgcctgcggctgataatcttcaattttttcaatcagcttacgcccgcctgcgtgtagctcctgctttgaaacttcattggcttgcaccgttggacggtctaccagtttggtgacgccacaacgataatccagcagatgctgtgcctcctgcggcttcaactgacggtcggtaaacccggcctgatatatcaccttccagaagcgatttgccggatgagcaaagggaaaaccagtcccggcggatgaaagcccagggttgataccgcaaaacacgacccgtaaccctggagccaaaatatcctcaaccatatttactcctttctaacatcaccaggaaaagtataacggattgaaaatacattgtttataaaaacagcaggcgcgcggtaatggctggattgcgacacggagttactttataatccgctaccatggccccttagctcagtggttagagcaggcgactcataatcgcttggtcgctggttcaagtccagcaggggccaccagatatagcaaaggctgacgagaaatcgtcagcctttttctttttatatatcagttactttgcgtgccagtaagccgctgcacgtacccgctgtgggtcatactgttccgcttcaaagcggcggcttaaattcttaacgactttaccttcgccggttatccagatgaagtaatcatcggcagggatttgcatctgcgccagacgcgcatctaccgcctgctcatcatgtgccagccattcgatattaaaaccatcaaggtgcgcgagataatcctgacaggcgttatcccgcacgctaaccagcgcactaacttgcggtttaacggcaagtttgctcaacgtttccaggcggcggcgcaatgcgggcattccggattcatcgcagacatacagctgatacgcgtaatcttccggcaccaccagcgaaccgcgcggacctgccaccgtaagtttatcgcccggttgcgcctgcatcgcccagccgctggcgaccccaccgtcgtgaataaagaaatcaatcgccagttcatggcgtagttcgtcatacagcggcgtatagtcacgcgacggtgggcgtggtccttccggccagacgatgccctcttccgttaccgttggcggcacaaagtgagcgtcaggttgaggaaagaagagtttgctgtgatcgtcaaagccacgcgatgtaaaaccgtccagcgcctcgccgccgaggacaatgcgctgaaaaccggcgctgatgcgctcaacgcgtaacacagtcagttcacggaagcgcagatcattgcgaacgcgctgcgggtagcggggggtgttattcattgttatcgccttcgtgatggtaatcagatatatctaaataaaactcgcaaatgataatgattgttaatcatgataaatgcaagcgatttgtagaactgatatgtctatagtctgataagacgaaccgcctcttctcaggcatcattactcaacgccggatgcggcgtgaacgccttatccggcctacgtgtgagatgagtccacgtttaaaaatcatttttacacttgcaagaacgctcatatcagatataaattagatatatctaattaagcaaaaggaggctgatatgagccatcatcacgaagggtgttgtaaacatgaaggccagccacgccatgagggctgctgcaaaggtgagaagtcagaacacgagcactgcggacacggtcaccagcatgaacacggtcaatgctgcggtggtcgccacggtcgcggcggcggtcgtcggcaacgtttctttggtcacggtgaattacgtctggtgattctggatattctctcgcgcgatgacagccacggttacgaattgattaaagcgattgagaatctaacccaggggaattacaccccaagcccgggcgtcatctacccaacgctggattttctgcaggagcagtcgctgattaccatccgcgaagaggaaggaggtaagaagcagattgcgctgaccgaacaaggcgcgcagtggctggaagaaaaccgcgaacaggtggagatgattgaagaacgcatcaaagcgcgttgcgttggcgcggcgctgcgccagaacccgcaaatgaagcgggcgctggataattttaaagcggtgctggatttacgcgtcaaccagagcgatatcagtgatgcacaaataaaaaagatcattgcggtgatcgaccgcgccgcttttgatattacgcaactggattaatcgccgcatccgccagtggcgcggtgcaattgccggatgcgacgcttgacgcgccttatccggcctacacccgctacacaccccgcaggcctgataagatgcgccagcatcgcatcaggcattgtgctccaaccgccggatccggcataccgattaatgcagtaccgtcaccgcgtcttccagtcggctggcgcggtgtttcaccatcgccgacacctgcgcactctcttccaccagctcggcatttttctgggtgatcaggttaagctcatccactgcacgggtcaggctggaaagcccatcggcctgttccagcgttgaatggctaatctgggcgatcaactgggtgacgtttttcacctgtgccacaatatcttccatcgtccgtccggcggcgtgtacctgctgcgaaccggattgcaccttatcagcactggcatcaatcagcttgcgaatatcgttggcagcattagcgctgcggctggctaaatgacgcacttcccctgccaccactgcaaaacctttgccctgttcgccggcacgcgccgcttccaccgccgcattcagggccagaatattggtctgaaacgcaatatcgttaatcagcgaagtaatggtgccaatgcgctgggtactgtcggcgatatcgtccattgtcttgatcaccgtggtcatcgcctccccaccctgcactgccgcattactggcagtgattgacagtttatcggcagccgacgccgtggcagagttctgtttcaccgacgccgccatttggttcatggtcgccaccgtttgctgaacgttatcaactgtctgctgggtatgttcgttcagttcatcggtgcctttcgccagcgtctcactgccatttctgacactggacacctggcttgagacatcgttaattagccaacggcacatcaggccaagttgccctaccgcacgtaatgtcagccccagctcatcgctgcgattcagatgctcaacactattacgttctccggtcgccaccttcagtgcctgatgggcaacattttctatcgggcgcacaatctgccattcaaaacaggcgcttgccaacaataccactaacgcacagaggatatacgtcaccaccggggcagcaacaaaccaaagcatggccgccagcaagataaacatcagggtcatcactccacgcgcccgccagcgaagcggtaatgaaggcagtttacccagccagcctttacgcaccaccaggcctttatgaatacgcttactggtacgtccggcgttcaacgctttgtacagcggctccaccgccgcgatctcttcatccgtcgcccgggtacgaatcgacatatagccactgatttttccctcgcgcaccatcggtaccgcattggcccgcacccaataatggtcaccatttttgcggcgatttttcacgatgccgctccagggctccccttttttcagggtgaaccacatatccgcaaacgccgcttttggcatatccgggtgacgcaccatgttgtgcggctgcccttgtaactcttgcaaggtatagccgctcacctgcacaaaagtgtcattagcatgagtgatatagctttgcagatcggtagtggacatcagagtggtatcgtccgccagcggggtattttgctgggtgacatacggatgagaagacatgttcgcgtcctgtgcaggttatatggttgttaacttcttgtcagagtttatgtcggccccgctgcggttatctttaaccgattaatttgatttagatcgcaatttgcgatttaaacacaaatctaattccttgatttaaaatactttcactctgttactatacgaaaacgttaattatcttgcccaaaaatcaggcaattattgccctgaaaacgtgcatttgcgcagcaatcatcaaatccatacccgacaaaaaccgtgcaaaataacaacaaatgttaacagatagcattaaatattgcacaaatgataaccgaatttgtgtttatcccgattttcgcgatcgcagccggagtggcgcaatccctgcaatacttaaatcggtatcatgtgatacgcgagcctccggagcatattttgaacaggttaccttcgagcgcatcggctttagcgtgcagcgcccacgccctgaatctcattgagaagcgaacgctggatcatgaggagatgaaagcacttaaccgagaggtgattgaatacttcaaagagcatgtcaatccggggtttttagagtatcgcaaatctgttaccgccggcggggattacggagccgtagagtggcaagcgggaagtttaaatacgcttgtcgacacccagggccaggagtttatcgactgcctgggaggttttggaattttcaacgtggggcaccgtaatccagttgtggtttccgccgtacagaatcaacttgcgaaacaaccgctgcacagccaggagctgctcgatccgttacgggcgatgttggcgaaaacccttgctgcgctaacgcccggtaaactgaaatacagcttcttctgtaatagcggcaccgagtccgttgaagcagcgctgaagctggcgaaagcttaccagtcaccgcgcggcaagtttacttttattgccaccagcggcgcgttccacggtaaatcacttggcgcgctgtcggccacggcgaaatcgaccttccgcaaaccgtttatgccgttactgccgggcttccgtcatgtgccgtttggcaatatcgaagccatgcgcacggctcttaacgagtgcaaaaaaaccggtgatgatgtggctgcggtgatcctcgaaccgattcagggtgaaggtggcgtaattctgccgccgccgggctatctcaccgccgtacgtaagctatgcgatgagttcggcgcactgatgatcctcgatgaagtacaaacgggcatggggcgcacgggcaagatgttcgcctgcgagcatgagaacgtacagccggatatcctctgccttgccaaagcgctcggcggcggcgtgatgccgattggcgcgaccatcgccactgaagaggtgttttcagttctgttcgacaacccattcctgcataccaccacctttggcggcaacccgctggcctgtgcggcggcgctggcgaccatcaatgtgttgctggagcagaacttaccggctcaggctgagcaaaaaggcgatatgttgctggacggtttccgtcaactggcgcgggaatatcccgatctggtacaggaagcgcgtggtaaagggatgttgatggcgattgagtttgttgataacgaaatcggctataactttgccagcgagatgttccgccagcgcgtactggtggccggaacgctcaataacgccaaaacgatccgcattgaaccgccactgacactgaccattgaacagtgtgaactggtgatcaaagcggcgcgtaaggcgctggcggccatgcgagtaagtgtcgaagaagcgtaatatcaaatcggatggcgatacgacgtcgccatccgatctttttatacgacgcgtacgcccgcaggcatcatccgctccggcgttaacagcacgctttcactgccgtcatcggtttccgcacacaacagcatgcattccgacgtttcaccacgcattttcgctttttgcagattgcataagaccaccaccgttttccccatcagctcttcttcgctgtagtacggcaccaggctggtcacggtttgcagcgttttttgccccacatcaacctgtacgatgtacagcttgtcggcgttttcatggcgtttcacttccacaatctttccgacgcgcatttccagacgtgcaaaatcagcgtaagccacggtttccattgcttcctcccttagggtaaaattttactaaactatagcaaaagtttttctcaatcctgtaggctaaaaatggagaatgcaggcgtgatcacattcgtgagccgctgtgttaccgttacagcgtcaaagaaacgcgctttatttactgaaaacaggtgacccgataagcacttcctctacaatgggggcgcacatcagggaaagtaaaaaaggtaaacatggcaacactaaaagacatcgcaatcgaagctggcgtatccctggcgacagtatccagggtcttaaatgacgatccgacattgaatgtgaaagaagagacgaaacatcgcattctcgagatcgccgaaaagctggagtacaagaccagtagtgcccgtaaactccagacaggtgcagtcaaccaacaccatattctggctatctacagctaccagcaggagctggagatcaacgatccttactatctggcgatccgccacggcattgaaacccagtgcgaaaagctgggcatcgagctcaccaactgttatgaacacagcggcttaccagacattaaaaacgtcaccggtattttaattgtcggcaaacccacgcccgccctgcgcgccgctgccagcgcgttgaccgacaatatctgttttatcgactttcacgaacccggcagcggttacgatgcggtggatatcgatctggcacgcatcagtaaagaaatcatcgacttctatatcaaccagggcgttaatcgtattggttttattggcggtgaagatgagcctggcaaggcggatattcgtgaggtcgcctttgcggaatatggccgactgaaacaagtggtacgcgaagaggatatctggcgcggcggtttttccagttcgtcgggttatgaactggcaaaacaaatgctggcgcgggaagactatccgaaggcactgtttgttgcttccgattccattgctatcggcgtactgcgggcaattcatgaacgaggcctgaacatcccacaggatatttcgcttatcagcgttaacgatatccccaccgcgcgatttacctttccgccgctctccaccgtgcgcatccattccgagatgatgggaagtcagggcgttaacctggtgtatgaaaaagcccgcgatggtcgcgcgctgccgctgttagtcttcgttcccagcaaattaaaactgcgcggcacgacccgttaaatccccttacacactgtccggcaatcgtttttgccggacagtgctgccgtttattttcgtgatccagttaaagtaaatgcatttacctgctactttttagtaaaaattttactaaactccccagcaattacacaaactaccatcaccatgaatggttccgatttctctctaccgggaggccctatgaatcgctgggaaaacattcagctcacccacgaaaaccgacttgcgccgcgtgcgtactttttttcatatgattctgttgcgcaagcgcgtacctttgcccgcgaaaccagcagcctgtttctgcccttaagcggtcagtggaatttccacttttttgaccatccgctgcaagtaccagaagccttcacctctgagttaatggctgactgggggcatattaccgtccccgccatgtggcaaatggaaggtcacggcaaactgcaatataccgacgaaggttttccgttccccatcgatgtgccgtttgtccccagcgataacccaaccggtgcctatcaacgtattttcaccctcagcgacggctggcagggtaaacagacgctgattaaatttgacggcgtcgaaacctattttgaagtctatgttaacggtcagtatgtgggtttcagcaagggcagtcgcctgaccgcagagtttgacatcagcgcgatggttaaaaccggcgacaacctgttgtgtgtgcgcgtgatgcagtgggcggactctacctacgtggaagaccaggatatgtggtggtcagcggggatcttccgcgatgtttatctggtcggaaaacaactaacgcatattaacgatttctccgtgcgtaccgactttgacgaagcctattgcgatgccacgctttcctgcgaagtggtgctggaaaatctcgccgcctcccctgtcgtaacgacgctggaatataccctgtttgatggcgaacgcgtggtgcacagcagcgccattgatcatttggcaattgaaaaactgaccagcgccagctttgcttttactgtcgaacagccgcagcaatggtcagcagaatccccttatctttaccatctggtcatgacgctgaaagacgccgacggcaacgttctggaagtggtaccacaacgcgttggcttccgtgatatcaaagtgcgcgacggtctgttctggatcaataaccgttatgtgatgctgcacggcgtcaaccgtcacgacaacgatcatcgcaaaggccgcgccgttggaatggatcgcgtcgagaaagatctccagttgatgaagcagcacaacatcaactccgtgcgtaccgctcactacccgaacgatccgcgtttttacgaactgtgtgatatctacggcttgtttgtgatggcggaaaccgacgtcgaatcgcacggctttgctaatgtcggcgatatcagccgtattaccgacgatccgcagtgggaaaaagtctacgtcgagcgcattgttcgccatatccacgcgcagaaaaaccatccgtcgatcatcatctggtcgctgggcaatgaatccggctatggctgtaacatccgcgcgatgtaccatgcggcgaaagcgctggatgacacgcgactggtgcattacgaagaagatcgcgatgctgaagtggtcgatattatttccaccatgtacacccgcgtgccgctgatgaatgagtttggtgaatacccgcatccgaagccgcgcatcatctgtgaatatgctcatgcgatggggaacggaccgggcgggctgacggagtaccagaacgtcttctataagcacgattgtattcagggacattatgtttgggagtggtgcgaccacggaatccaggcgcaggatgacaacggcaatgtctggtataaattcggcggcgactacggcgactatcccaacaactataacttctgtcttgatggtttgatctattccgatcagacgccgggaccaggcctgaaagagtacaaacaggttatcgcgccggtaaaaatccacgcgctggatctgactcgcggcgagctgaaagtcgaaaataaactgtggtttaccacgcttgatgactacaccctgcacgcagaggtgcgcgccgaaggtgaaacgctcgcaacgcagcagattaaactgcgcgacgttgcgccgaacagcgaagcccccttgcagatcacgctgccgcagctggacgcccgcgaagcgttcctcaacattacggtgaccaaagattcccgcacccgctacagcgaagccgggcattctatcgccacttatcagttcccgctgaaggaaaacaccgcgcagccagtgcctttcgcaccaaataatgcgcgtccgctgacgctggaagacgatcgtttgagctgcaccgttcgcggctacaacttcgcgatcaccttctcaaaaatgagtggcaaaccgacatcctggcaggtaaatggcgagtcgctgctgacccgcgagccaaagatcaacttcttcaagccgatgatcgacaaccacaagcaggagtacgaagggctgtggcaaccgaatcatttgcagatcatgcaggaacatctgcgcgactttgccgtagaacagagcgatggtgaagtgttgatcatcagccgcacggttatagcaccgccggtgtttgacttcgggatgcgctgcacctacatctggcgcatcgctgcagatggccaggttaacgtggcgctttccggcgagcgttacggcgactatccgcatatcattccgtgcatcggtttcaccatggggattaacggcgaatacgatcaggtggcgtattacggtcgtggaccgggcgaaaactacgccgacagccagcaggctaacatcatcgatatctggcgcagcaccgtcgatgccatgttcgagaactatcccttcccgcagaacaacggcaaccgtcagcatgtccgctggacggcactgactaaccgccacggcaacggtctgctggtggttccgcagcgcccaattaacttcagcgcctggcactatacccaggaaaacatccacgcttcccagcactgtaacgagctgcagcgcagtgatgacatcaccctgaatctcgaccaccagctgcttggcctcggctccaactcctggggcagcgaggtgctggactcctggcgcgtctggttccgtgacttcagctacggctttacgttgctgccggtttctggcggagaagctaccgcgcaaagcctggcgtcgtatgagttcggcgcagggttcttttccacgaatttgcacagcgagaataagcaatgaggatcatcgataacttagaacagttccgccagatttacgcctctggcaagaagtggcaacgctgcgttgaagcgattgaaaatatcgacaacattcagcctggcgtcgcccactccatcggtgactcattgacttaccgcgtggagacagactccgcgaccgatgcgctatttaccgggcatcgacgctattttgaagtgcattactacctgcaagggcagcaaaaaattgaatatgcgccgaaagagacattacaggtagtggaatattatcgtgatgaaactgaccgtgaatatttaaaaggctgcggagaaaccgttgaggtccacgaagggcaaatcgttatttgcgatatccatgaagcgtatcggtttatctgcaataacgcggtcaaaaaagtggttctcaaagtcaccatcgaagatggttatttccataacaaataacaactacggcggcaaaaggagtttgccgccaccgctaccctacacattttcggagatgtgttatgtctgataccaaacgtaatacaatcggcaaattcggcttgctctcgctgacttttgccgccgtttacagctttaacaacgttatcaataataatattgagcttggactggcctcggcaccgatgtttttcctcgcgacgattttttattttattcccttctgtctgatcatcgcagaatttgtttcgttaaataaaaactcagaagccggtgtctacgcgtgggtaaaaagttcgctgggcggacgttgggcatttattactgcctatacctactggttcgtaaacctgttctttttcacctcactgttgccgcgcgttattgcttatgcttcgtatgccttcctcggatacgaatatattatgacgccggttgccaccaccattatcagtatggtgctgttcgccttctccacctgggtttccaccaacggggcgaaaatgttggggccaattacctccgtcacttcaacgctgatgctgctgttaacgctctcctacattttactggcaggtacggcgctggttggcggcgtacagcctgctgaccccatcaccgttgacgcgatgatcccgaacttcaactgggcgttcctcggcgttaccacctggatctttatggccgcaggtggcgcggagtccgtcgctgtgtacgttaacgacgtcaaaggcggttcgaaatcgttcgttaaagtgatcatcctcgccgggatttttatcggcgtactgtattccgtctcctcggtgctgattaacgtcttcgtcagcagcaaagagttgaaatttactggcggatcggtgcaggtattccacggcatggcggcgtattttggtctaccggaagcgttgatgaatcgctttgtcggtctggtgtcctttaccgcgatgttcggttccctgctgatgtggaccgcaacgccggtgaaaattttcttctccgaaatcccggaaggcatctttggtaagaaaaccgtcgaacttaacgaaaacggcgttccggcgcgcgcagcgtggatccagttcctgatcgtcatcccgctgatgattatcccgatgctcggttccaataccgtgcaggatctgatgaataccattattaatatgaccgccgcagcgtccatgcttccgccgttattcatcatgctggcttacctgaatttacgcgccaaattagatcacctgccacgcgatttccgtatgggctcccgccgcaccggtattatcgttgtttcaatgctgattgcgatatttgccgtagggtttgtcgcttcgacattcccgactggcgcgaatattctgaccatcattttttataacgtcggcggtattgttatcttcctcggctttgcgtggtggaaatacagtaaatatataaagggattaacggctgaagagcgccatattgaagcgacgccagccagcaatgttgattaagcagactaataaaaaatgagcaggcattttccctcttcctggatggggagagggaaaatagtttctgcctttatatttttataattacaacgataaaaggctgtactttttctttagctcatggattaacacaatgaaattaatcactgcaccatgcagagcattacttgctctgccgttttgctacgccttttctgcggcaggagaagaagcacgtccggcagaacatgacgacacaaaaacacccgcaattacctcgacatcttctccttcatttcgtttttacggcgaattaggggttggtggatatatggatttagagggtgagaataaacataaatacagcgacggtacctatattgaaggtggcctggagatgaagtacggctcctggttcggcctgatttacggcgaaggctggaccgtgcaggccgaccacgacggcaatgcctgggtgccagaccatagctggggtggtttcgagggcggaattaaccgtttctatggcggttatcgtaccaatgatggcaccgaaatcatgctcagtctgcgtcaggattcctcgctggatgacctgcaatggtggggcgatttcacccccgatctgggctacgtcattcccaatacccgcgacattatgactgcgctgaaggtacagaacttaagcggcaactttcgttatagcgtcaccgcgactcctgccggacatcatgatgaaagcaaagcctggctacattttggcaaatacgatcgctatgacgacaaatacacctatccggcaatgatgaacggttacatccagtatgaccttgccgaaggcatcacctggatgaacggtctggaaatcaccgacggcacaggacagctctatctcacgggcctgctaactcctaactttgccgctcgcgcctggcaccataccggacgcgccgacgggctggacgtaccgggaagtgaaagtgggatgatggtgagcgccatgtatgaagcgttaaagggcgtttatctctccaccgcttacacctacgccaaacatcgccctgaccacgctgacgatgaaaccacctctttcatgcagtttggtatctggtacgaatacggcggcggacgtttcgccacggcttttgatagccgcttctacatgaaaaatgcctctcacgatcccagcgaccaaatcttcctgatgcaatatttctactggtaataaggactgtaatttcatgaaaataaaaactattttaacgccagtaacctgcgctctgctgataagtttttccgcccatgccgctaacgccgacaattataaaaacgtgattaaccgtactggcgcgccgcagtacatgaaggattacgattacgacgatcaccagcgttttaatccgtttttcgatctcggagcctggcatggtcatctgttgccagacggccctaacaccatgggcggctttccgggcgttgcgctgctgacggaagagtacatcaactttatggccagcaatttcgaccgcctgaccgtctggcaggacggcaagaaagtcgactttacgctggaggcatacagtattcccggtgcgctggtgcaaaaactgacagcaaaagatgtgcaagtcgaaatgactctgcgcttcgccacgccgcgcacgtcactactggaaaccaaaatcaccagcaataaaccgctggatctggtgtgggacggcgaactgctggaaaaactggaagcgaaagaagggaaaccgctttccgataaaaccattgctggcgaataccctgactatcagcgcaaaatcagcgccacccgtgatggcctgaaagtcacctttggcaaagtgcgcgccacctgggatctgctgacctccggcgaatcggaatatcaggtgcataaatccctgccggtgcagactgaaatcaacggtaatcgctttaccagtaaggcgcatatcaacggttcgaccacgctctacaccacctattcccatctgctgaccgctcaggaagttagcaaagagcaaatgcagatccgcgatattctggcgcgtccggcgttttatctcaccgcctcgcagcaacgctgggaagaatacctgaagaaagggttaaccaatccggatgcgacgccggaacagacgcgcgtcgcggtgaaagcgatcgaaacgctcaacggtaactggcgctcaccgggcggtgcggtgaaatttaacaccgttacaccgtcggtgaccgggcgctggttctccggcaatcagacctggccgtgggatacctggaagcaggcgtttgcgatggcgcatttcaatccggacatcgccaaagagaatatccgcgcggtcttctcctggcagatccagcctggcgatagcgtgcgtccgcaggatgtgggctttgtccccgacctgatagcgtggaaccttagccccgagcgtggtggcgatggcggcaactggaacgaacgtaataccaaacccagccttgccgcctggtcggtgatggaagtgtataacgtcacccaagataaaacctgggtggcagagatgtacccgaaactggtggcctatcacgactggtggttacgtaaccgcgatcacaacggcaacggcgtgccggaatatggcgcgacccgcgacaaagcccacaacactgagagcggcgagatgctgtttacggtgaaaaaaggcgataaagaagagacgcagtctgggctgaacaactacgcccgcgtggtggagaaaggccagtacgacagtctggaaattccggcacaggttgctgcatcgtgggaatcggggcgtgatgatgccgccgtctttgggtttatcgacaaagaacagttggataaatatgtcgctaatggcggcaaacgtagcgactggacggtgaaattcgccgaaaaccgcagtcaggacggaacgttgctgggctactcgctattgcaggagtcggtggatcaggccagctatatgtacagcgataaccattatctggcggagatggcaaccatcctcggtaagccagaagaggccaaacgctatcgccagttggcacagcagctcgcggactacatcaacacctgtatgttcgacccgactacccagttctactatgacgtgcgtattgaagataaaccgctggcgaacggctgcgcgggcaaaccgattgttgagcgcggtaaagggccggaaggctggtcgccgctgtttaacggtgcggcaacgcaggccaatgccaacgcggtggtgaaggtgatgctcgatcctaaagagttcaacacctttgtcccgctgggaacggcggcgttaaccaacccggcttttggcgcggatatctactggcgcgggcgcgtatgggtggatcagttctggtttggtctgaaagggatggagcgttacggttatcgcgatgatgccctgaagctggcggatacgttcttccggcacgccaaagggttaaccgccgatggaccaattcaggagaattacaacccgctcactggcgcgcagcaaggggcaccgaatttctcctggagtgccgcgcatttgtttatgttgtataacgattttttccgtaagcaataatttgcaactgctggcggatgcggcgtaaacgccttatccaccctacatgtgcaatcctcctggccggataaaacgcggcaagcgttgcatccggcaactgcaccgcgccactggcggatgcggcgtgaacgccttatccgccctacatgtgcgttcccgtaggtcggataagacgcgacaagcgtcgcatccggcatctgcaccgcgccactggcggatgcggcgtgaacgccttatccgccctacatgtgcaatcccccaggccggataaaacacggcaagcgtcgcatccggcgttaccaccgggcgtattctttttgaatcccatcacaaaccccgcacttcccttttcccttttctccggcgacggctaaattagaactcatccgaccacataacaattattttacatactggacaattttatgagctacccgtcgctgttcgccccgctggatttaggttttaccacgttaaaaaaccgcgtgttgatgggctcaatgcacaccgggctggaggaatacccggacggtgccgagcggctggcagcgttttatgccgaacgcgcccgtcacggcgtggcgttgattgtcagcggcggcattgcaccagatttaacaggcgttggcatggaaggcggtgcaatgctcaatgacgccagccagatcccacaccatcgcaccattaccgaagccgtacatcaggaaggcggcaaaatagccctgcaaattttgcataccgggcgctacagctaccaaccgcatctggtcgccccgtccgcattgcaggcccccatcaaccgtttcgtgccccatgagttaagccatgaagagatcctgcaactgatcgacaatttcgcccgctgcgcgcaactggcgcgggaggcaggatacgacggtgtagaggtgatgggttccgaagggtatttgatcaacgaatttctgacgctgcgcaccaatcagcgtagtgaccagtggggcggcgattaccgcaaccggatgcgatttgccgtagaagtagtgcgtgcggtgcgcgaacgcgtcggcaacgacttcattattatctaccgactgtcgatgctcgacctggtcgaagacggcgggacttttgccgaaacggtagagctggcgcaggccattgaagcggcgggcgcgaccattatcaacaccggcattggctggcatgaagcacgtattccgaccattgccacgcccgtgccgcgcggcgcatttagctgggtcacgcgcaaactgaaaggccacgtctcgctgccgctggtaaccaccaaccggattaacgatccgcaggttgccgacgatattctctcgcgcggcgatgccgatatggtatcgatggcgcgaccgtttcttgctgatgcggagctgctgtcaaaagcgcaatcgggacgagccgatgagatcaacacttgtattggctgcaatcaggcctgtctcgatcaaatcttcgttggcaaagtcacctcgtgcctggtgaatcctcgcgcctgccacgaaaccaaaatgccaatccttcccgccgtgcagaaaaaaaatctggcggtggtcggtgcgggacctgctgggctggcgtttgccattaacgcggcggcgcgtgggcatcaggtaacattgtttgacgctcatagcgagattggcgggcagtttaatatcgccaaacagatccccggcaaagaggagttttacgaaacgctgcgctattaccgccggatgatcgaagtgacgggcgtgacgctaaaactcaatcacaccgtgacggcggatcagttacaggctttcgatgaaacgatcctcgccagtgggatcgtgccgcgcactccgcccatcgacgggatcgatcatccgaaggtattgagttatctcgatgtactgcgcgacaaagcgccggttggcaacaaagttgccatcatcggttgtggcgggattggttttgatacggcgatgtatttaagtcagccgggcgaatccaccagccagaatatcgccgggttctgtaatgaatgggggatcgacagtagcctacaacaggctggtggcttaagcccgcagggaatgcagatcccccgtagcccacggcagattgtgatgctccagcgcaaagccagcaaaccaggacaggggttaggcaaaaccaccggctggatccatcgcaccaccctgctctcgcggggtgtgaaaatgatcccaggcgtaagttatcagaagattgacgatgacgggctgcatgtggtgatcaacggcgaaacgcaggtattagcagtggacaatgtggtgatctgcgcagggcaagagccaaaccgcgcgctggcgcaaccgctgattgatagcgggaaaacggtgcatttaattggcggctgcgatgtggctatggagctggacgcacgacgggcaattgcccagggaacacggctggcgctggagatttaaatcgttatttgaagcgccggatgcaacgcatccggcacgtcgcgttaatcaataaacaaggcgggagaaatgccgaatcgcgttgccaattttttagcgtgttccagcgttaatttcctcttcccgctcaaaacgcgtgacaccatagatttactgccaatttccggcagatcggaaagggttaaaccatattgatccataagggtacgaatcacggctataccgccaggcatggcttgagccatggcattaaattccgcaaattcgggcgctgattcttcccacgcggttattttggcacacaccagatccagcaaggggttttcaggatcgttgagcagcagatgatctaccagttccagcgcctgggtgtattgttcctcgttctgaatacccgccagaaaaggtgccacagcagttagcttttctcctgcttgcaagatgtcggcaatcgcaatcattttttccccttagtacgatgaacagcggtaaagaaatcgtattctttatgcgtcataacttcacgtatgtagcacttttgcgattcaaaaaagaccattgctacaacacgtaattcattgcccccaacattgaaaacataatgcttatccagatatttgaagttatccagagatgggaatactgcttttaatgactcaggttttttgaaatatcccttagcaatcgtgttccccagagccaccaactccgttttatgttgcgggtatttttccgcagcatctttcaatgctttttgagttatcaggtgcattcttcatcacgtccgttgacaaattggcaatatgataacatccgttgccagattggcaacggatgaatttatctgtgtgacggaagaataaacgtagaaaaacgctaaacaagagaatgtagacgatggtgacagggattttttgttttatggaagcgcgattccagaactgggcagacattgccggatgcgacgcttgccgcgtcttatccggcctggagtaacgtgctgaacgtaggccggataaggcgtttacgccgcatccggcaggtaactcccaatcttaccgacgacgtcccagcttcaccgctttcagtaccacaaatttattattcgtcgcaatagtggtgcagttgccgaaaatcttcttcagtttatggaagtaatccaggtgacggttggcaacgatatacagctcgccgttgattttcaggcagcggcgggcgtggtggaacatctcccaggcgacgttatcggtcagcgcatgttgttggtgaaacggcgggttgcagagcacagcattaaagcggaaaggctccacgccggagagcgcgttgttgatcataaactcgcagcgatccaacgcctctggcatgttggtttcaacgttcaaacggctggaagcaaccgccatcggcgattcatcgacaaacaccactttcgcctgcgggtttttatcaagcagcgtcagaccaataacgccattaccgcaaccgagatcgacaatctccccttcgagattctctggcagatgttgcataaagaagcgcgcgccgatatcaagcccggtgcgggagaagacattcgcatggttgtggatagtccagtcagtaccttccagcttccagctaacggtctgcggcgcatcggccagctgcggttcattgaaagtgcaattaatcaggcgcgcttttttccatgccagcgtggtggtggttgggccgagcactttttcgaacagttccagcgtggaagtgtgaatgtcacgggccttggcaccggcaataatacgtgtatccgacgtgaccactttgcgcagcgcacgcagttgctgttccagcaatgccagtgttttcggcactttgatcagcaccacacccggctgttgcgggtagtcggcggtgctgtcgagaaacttcacgctcgactcatcaatcccgttgaggcgtaaattctcgcgcgtcgccagttcactgatgtatgagtcgccaatgctgtacggcttatgttccgccagcgcgcagcttaacgcaccaaaggcatcattcaggatcaacaccgggccgcggatttctgtgtcgtccaactgttgcagcaaatattcatccgccgcttcccacgcctgtagcgggttaacgtcatccgtcgccggaaaacgttgtagtgtcagtgaacggaaaccgttgtctaagtggctcatcggccctcctgaatgataaaatttcgacattgcccctgaaaagggtgcgtgagtataccctttttctctttttcgtgggcggttatgagcaatcttacttatcttcagggttatcccgagcagctactttcccaggtgcgaacactgattaacgaacagcgtctgggcgatgtgctggcaaaacgctatccgggaacacacgactacgccaccgataaagccctctggcaatatactcaggatctgaaaaatcagtttctgcgtaatgccccgccgatcaataaagtgatgtatgacaataagatccatgtgctaaaaaacgcgctcgggttacataccgctgtttctcgtgtgcagggcggcaagctgaaagcaaaggtggagatccgcgtcgctaccgtgtttcgcaacgcgccggaaccgtttttgcgcatgatcgtggtgcacgagctggcgcacctgaaggagaaagagcataacaaagcgttttaccagttgtgttgtcatatggaaccccagtaccaccagcttgagttcgacacccgactgtggctaacgcagttgtcgcttgggcaggacaaaatctgaaaatgatgtcaggcgttatcttttctttctttagcgcctaaaatcgacctcccccctttcgttaaggataacgaccatgctgcgcgcatttgcccgccttcttctccgtatttgtttttctcgccggactctaaagattgcctgcttactgttacttgtggcaggagcgaccatccttatcgccgatcgcgtaatggtcaacgccagcaaacagctgacctggagcgatgtcaacgccgttccggcgcgtaacgtgggtttattgctgggggcgaggccgggtaatcgctactttacccgacgtattgataccgcagcagcgttgtaccacgccggaaaagtgaaatggctgctggtaagtggcgataacggacgtaaaaattacgatgaagcatcaggtatgcagcaggctttgatcgctaaaggcgtaccagcaaaagtgatcttctgcgactatgccggattctcaacgctggattcggtagtgcgtgccaaaaaggtttttggtgaaaaccatatcaccattatctcgcaagaatttcataatcaacgcgccatctggctggcaaaacagtacggcatcgacgctatcggttttaacgcgccagacctcaatatgaagcacggtttttatactcaactgcgggagaaactcgctcgtgtcagcgccgtgattgacgccaaaatcctccatcgccagccgaaatatctcgggccttcggtcatgattgggccgtttagtgagcatggctgtccggcgcagaaataatgcgtatctgcgcacgtcgaagatgaaaaaggcgtgctacattgacgacagaatccctttatggagtatccacgcgttatgatacgtttcgctgtgattggtacgaactggatcactcgccagttcgtcgaggccgcccatgagagcggtaaatacaagttaaccgccgtatattcccgcagccttgaacaggcccagcacttcgccaatgatttttctgtcgagcatctgtttacctcgctggaagcgatggcggaaagcgatgccattgacgcggtgtatattgccagcccgaattccctgcatttttcccagacacaacttttccttagccataaaattaatgtgatttgcgagaaaccgctggcgtcgaatctggcggaagtggatgccgccattgcctgtgcgcgggaaaatcaggtggtgctgtttgaggcatttaaaaccgcctgcctgccgaactttcatttgttgcgccaggcgctgccgaaagtcggcaaactgcggaaagtctttttcaactattgccagtattcctcgcggtatcaacgttacctggatggtgagaatcccaacacctttaatccggcattctctaacggttcaattatggatatcggtttttactgtctggcgtcggcggtggcgttatttggtgagccgaaaagcgtgcaggcaaccgccagtttactggcaagcggcgttgacgcccagggcgtggtggtgatggattacggtgatttcagcgtcaccttgcagcactcaaaagtcagtgattctgtcctggcgagcgagattcagggcgaagcaggatcgctggtgattgaaaaactgtctgaatgccagaaagtgtgcttcgtgccgcgtggcagccagatgcaggatctcacccagccgcagcatattaataccatgctctacgaagcagagctgtttgctaccctggtggatgagcatctggtggatcatccagggctggcggtcagtcgcatcaccgccaaactgctgactgagatccgccgccagactggggtgatttttccggcagatagcgtaaaactataattgccaaagtaaaacagtgtaaaaggtatgtaacagaccattgactggctgaatggtctgtcatactttgttacctgcaaaggggagtaacttcattgccggtcgatcgtcattacgatgtgtgaaaaaccacatccggtcaccgggcaacccgaaaggaatacgcagacgtattccttttttgttgtaagtgagaccttgccggaaggcgaggtctatgcataaaaagcagcggctgacgtcttccgacgttggccgtttttttatgtgtaaggaacttctatgaatactgtcggcacgccgttgctatggggcggattcgctgttgttgtcgccattatgctggctatcgacctgttgttgcaggggcgtcgtggggcacatgccatgaccatgaaacaggctgcggcctggtcgctggtctgggtgacgctgtcgttactgtttaacgccgctttctggtggtatctggtgcaaaccgaaggtcgcgccgttgccgatccacaggcactggcctttctcacgggttatctgattgagaaatcgctggcggtcgataacgtctttgtctggctgatgttgttcagctatttctccgttccggcggcattacaacgtcgcgtgctggtgtatggcgtgctcggggcgattgttctgcgtaccatcatgatcttcacaggcagctggctgatttcgcagttcgactggatcctgtatatcttcggtgccttcctgctgtttaccggcgtgaagatggcgctcgcccatgaagatgaatcaggcattggcgacaagccgctggtgcgctggctacgcggtcatttgcgcatgaccgacaccatcgacaacgagcatttctttgtgcgtaagaatggattgctgtacgccacaccgctgatgctggtactgattctggtggaattgagcgacgtgatttttgccgtggatagcattccggctatcttcgccgtgaccactgacccgttcattgtgctgacctcaaacctgtttgcgatcctcggcctgcgtgcgatgtatttcctgctggcgggcgtagcagagcgtttctcgatgctcaaatatggcctggcggtgatcctggtgtttatcggtatcaagatgctgattgtcgacttctaccatattccaatcgccgtctcgctgggcgtggtgtttggcattctggtgatgacgtttattatcaacgcctgggtgaattatcggcatgataagcagcggggagaatgattcgctgtatattaagccattcctagagataactcattccagacaaaggtgagctattaattatgtaatcggcttgtagctctttacaaaaagaccgcacgggtgttggtggcgtcaaaatcgccgaagcgttccctggaggccggggcgacgcgcatggatgcgcggcgagggcgcatcttacagggacgttcccttgcgcccgacccggtagccgcaagggataagctgagggaatcgcgcagcggcgattttgttcgccagagcctgggggtgcagggggcggcggcgattggccgccccctgcgcgctccctgcgccagtgactttatatggcatagcacattaaaggagcgcaaccgttctcatattccaaatagttttgcccatatgttatctaatcagccttagtagccagtccttccctctgtttatgtcaaacaaatgtaacaattaagttgcaaaacatgacctctctttaaaatccagcatttttcgcttcccgaagctgtaactttccttatactcgaccttgcaaacactttgttacatcctgaaagatgcgtcgacagaacgcaccagggatgtgcgacaacacaatgaaaggatcgaaaaatgactacgcaacgttcaccggggctattccggcgtctggctcatggcagcctggtaaaacaaatcctggtcggccttgttctggggattcttctggcatggatctcaaaacccgcggcggaagctgttggtctgttaggtactttgttcgtcggcgcactgaaagccgttgcccccatcctggtgttgatgctggtgatggcatctattgctaaccaccagcacgggcagaaaaccaatatccgccctattttgttcctctatctgctgggtaccttctctgctgctctggccgcagtcgttttcagcttcgccttcccttctaccctgcacttatccagtagcgcgggtgatatttcgccaccgtcaggcattgtagaagtgatgcgcgggctggtaatgagcatggtttccaaccccatcgacgcgctgctgaaaggtaactacatcgggatcctggtgtgggcaattggcctcggtttcgcactgcgtcacggtaacgagaccaccaaaaacctggtcaacgatatgtcgaatgccgtcacctttatggtgaaactggtcattcgcttcgcaccgattggtatttttggtctggtttcttctaccctggcaaccaccggtttctccacactgtggggctacgcgcaactgctggtcgtgctggttggctgtatgttactggtggcgctggtggttaacccattgctggtgtggtggaaaattcgtcgtaacccgttcccgctggtgctgctgtgcctgcgcgaaagcggcgtgtatgccttcttcacccgcagctctgcggcgaacattccggtgaatatggcactgtgtgaaaagctgaatctggatcgcgatacctattccgtttctattccgctgggtgccaccatcaatatggcgggcgcagcaatcaccattaccgtgttgacgctggctgcggttaatacgctgggtatcccggtcgatctgcccacggcgctgctgttgagcgtggtggcttctctgtgtgcctgtggcgcatccggcgtggcggggggttctctgctgctgatcccgctggcctgtaatatgttcggtatttcgaacgatatcgccatgcaggtggttgccgtcggctttatcatcggcgtattgcaggactcttgcgaaaccgcgctgaactcttcaactgacgtgctgttcactgcggcagcttgccaggcggaagacgatcgtctggcaaatagcgccctgcgtaattaattgtttaacccctttcgtctacggcgggaggggttttctctactttaaacggatcaattccccttttctgcatccgccagaaacgaatgatattcaggccattcataagcagaaaactaccctcaatcattgtgccgcctatcgaccccgcccagaagttgtgaatcacccagcaacacgttgaaaaccacatcacgcagcgcatggtgagccctttacagcggaacagcgcccaggtactgacaatcgtaccgataaccggcaatagttcgacaggatgatggaacttcgcgaggccaattccgccagtcagcacaataaaaatcgccattacccataagctgcgcgtgcgtaaggtaatcaatgtacgaatggcattaaggatggcactggcaccagcgggataggtgcccagaagaaaaaaatgtacgccaataacggcgctatagaccgaaagctgctttttgaagcgacgttcgtcacgattgaaaaatgttgtgataccaatcagaaaggcgatgacacccacgccctgggccagccaatacgcggtcatgataaatccttagcaggtatggaaaagcaaacggcgcttcacattatgaaacgccgttttttattaacaactcatttcgactttatagcgttacgccgcttttgaagatcgccagttcgcggaagtcgttacgctcgttacaggtttgcttaccgttggcaaactcaacgatggtgtcgataaattcttccagcaactgcggcatcgctttaccgtggatcaactgacccgcgtcaaagtcgatccagtgttttttcttcgccgccagttcactgttggtggcgattttcaccgtcggcacaaatccaccatacggcgtgccacgaccagtactgaacagcaccatatggcagcccgcacccgccagggcgctggtcgctacggcatcgttacccggcgcacttaacaagttcagccctggcgttttcagacgctcgccgtaacgcagcacgtcaaccacgacgctggaacccgctttctgggtacagccaagtgatttgtcttccagcgtggtgataccacccgctttgttccccggcgatgggttttcgtagatcggctggtcatgggcaataaagtactgcttgaaatcattgaccatggtgaccagtttttcaaacgttgcttcgtcacggcaatggtccatcagcaactgctctgcgccaaacatctccggcacttcggtcagtacggtagtaccgccgttagcaatcacgtagtcagagaaacgccccagcatcgggttagcagtaataccagaaagaccgtcagaaccaccgcactccagaccaaacttcagttcgctgagtttgcctggctcgcgtttatcgttgcgcatcacgttatacagctgatgcaaatgctcgatcccggcttcgatctcatcatcctgctgttggcagatcatgaagtgaacgcgttcaggatcgatatcgcccagcgtttcacggaatgcggcaacctggttgttttcacaacccagaccaatcaccagcactgcgcccgcgttcgggtggcgcaccatgttttgcagcatggtgcgggtattgatgtgatcgtcgcccagttgtgagcagccgtaggtgtggctgaagaggaacacgccgtcagtaccttcggcgttgttggtctctttcagaaaacggttctggatctgccgcgcgatgccgttgacacagcccacggttggcaggatccacagctcattacgcaccccgacatcgccgttagcgcgacgatagatctgcacttcacgatctgccgcttgcgcaggcagatcctgaaaatcaggttgatagcgatactgatccagatcgctcagattcgtgcgcgtattgtgggcgtgaacgtgaacacctgccgcaatatccgccaatgcataaccaatcggcaggccatatttgatgacattggccccttttgcgatatccgttaacgcaaatttatgtccacgagcaacatcctggcgcagcgtaacagtctggttatcgacactgacttctgtgccttcagccaaatctgctaaagcgaccgcgacgttatccagcgcatggatcttgatgtattgcatatcaaccccagaccttagttcagttcaatggcgaagtagtcacgcgcattgttaaagcaaatatttttcaccatctcgcccagcaggttgatgtccgccggtgcttcgcccgcttccacccagcgaccgatcatctggcacagaatgcggcggaagtattcgtgacgggtgtatgacaggaagctacggctgtcagtcagcataccgacaaagcggctcagcagaccgagctgcgccagttgggtcatctgacgttccataccgtctttctgatcgttaaaccaccagccggaaccgaactgcattttgcccggcataccttcgccctggaagttaccgatcatggtgcccagcacttcgttatcgcgcgggttcaggcagtacagaatggttttcggcagcaggttttcttcgttctgcttgctcagcagcttagacaactcttctgccatcggacggtcgttgatggagtcaaagcctacatccggccccagcagtttgaactgacgcaggttgttattacgcagcgcgccaatgtggtactgctgtacccagccgcgacgtgcatattcggcaccaaggaacaccagtaccgcagttttgaactgtgccacttcgtgctcgctcagggtttcgccagccagacggcgcgccagaatgctgtccagttccgcttcgttcgcttcagcaaacatcaccacgtccagcgcatggtcagacactttacagccgtgagcggcgaagtgatccagacgtttggtcaaggcagtttgcaggtcagcaaagcggcgaatgtcggtatcggaaacttcgcccagcttcgccatgtagtcgttaaaggtcgcctgttcgatgttgaaggctttgtccggacgccagctcggcagcactttgatggtgaaagagccgtctttggcgatctctgcgtgatgctccagagaatcgatcgggtcatcggtggtgccgaccattttcacgttcatctgctgcatgatgccgcgcgcggagaagttatcctgcgccagcagttcgttacattcgttccagatttcatcggcagttgacggagaaagcaatttgccagtgataccaaacggacgacgcagttcgaggtgcgtccagtggtataacgggttgccgatagtgtgcggaacagtcgccgcccaggcgtcaaatttttcacggtcagacgcatcaccggtacacagacgctcggccacaccgttggtacgcatagcgcgccatttgtagtgatcgcctttcagccagatgtcatacaggtttttaaaacgatagtcttccgcaatctgctgcggcggcaaatggcaatggtaatcgaaaatcggctggtcttttgcgtagtcgtgatacagacggcgggcaaattcggtatctaacaggaaatcttcagtcataaacggagtcattttcgtcttcctctcaacgagtgagctagcttgcttatggtgcgatgctgacaaagttatcacaccaatttccagagtccgaagatattttcgtgagttagatcaataaacgtagttaaaaaaattactctcaaagtggtaaatctcgctgcaggccgcgccagtactggcctcgctgtcgtcaggtaatgtccctacaaatattcgcacatttgtgatggctctcaccttttaaagttgtatgacaagttatctttctgccgtcgcaaatcataagtcgacggaatgcaaattgccgattcattcatttgttagatgaatcgggttaaccggtacggaagccgaattagcacgaaactttcatggcaacgttcggggcgtgccggttttttttcggttacccggtcgtaactaacatcttcagcctctggcgggatgatggccgcgcttcctgcggatataacaaaacgatgaggttttacatgcgtaaaattaaagggttacgttggtatatgatcgcactggtgacgctcggcaccgtgcttggttacctgacgcgtaacactgtggcggcagctgcgccaactctgatggaagagttaaacatctccacccaacagtattcctatatcatcgcagcctattctgctgcttatacggtcatgcaaccggtagcaggttatgtactggatgtgctgggtacgaaaatcggttatgcaatgtttgctgtgctgtgggccgtgttctgtggtgcaaccgcgctggcaggtagctggggtggcctggctgttgctcgtggtgcggtcggtgccgcggaagcagcgatgatcccggcgggtctgaaagccagctccgaatggttcccggcgaaagagcgttccatcgcagtaggctactttaacgtaggttcttcgattggtgcgatgattgcgccgccgctggtggtatgggcaatcgtaatgcacagctggcagatggcatttatcatctccggtgcattgagctttatctgggcgatggcatggctgattttctataaacatccgcgcgaccagaagcatctgaccgatgaagaacgcgactatattattaatggtcaggaagcccagcaccaggtgagcacggcgaagaaaatgtccgttggtcagatcctgcgtaaccgtcagttctggggtatcgcgctgccgcgtttcctggcagaaccggcctggggtacttttaacgcgtggatcccgctgttcatgtttaaagtttacggctttaacctgaaagagatcgcgatgttcgcctggatgccgatgctgtttgctgacctcggttgtatcctcggtggttacctgccgccgctgttccagcgttggtttggtgtgaacctgatcgtttcccgtaagatggtcgtaacgctgggtgctgtgctgatgattggcccgggtatgatcggtctgttcaccaacccgtatgtcgcaattatgctgctgtgtatcggtggttttgcccaccaggcactgtctggcgcgctgattacgctctcttctgacgtgtttggtcgtaacgaagtggcaacggcaaacggtttaaccgggatgtccgcatggctggcaagtacgctgtttgcgctggttgtcggtgcactggctgacaccatcggcttcagcccgctgttcgcagttctggcagtgttcgacctgttaggtgcgctggttatctggaccgtgttgcagaacaaaccggcgattgaggtggcgcaggaaacacataacgatcccgcaccgcaacattaacgtttcgtgtaagttttagtttcccttcaaagccgccttctcaggcggctttttcatcactgcgagtagagctaaactcgcaaaagtggtataacaaatatagtctgccgtatcatgcctggagcgcatatggaaatcactgaaccacgccgtttgtatcaacaacttgccgctgacctgaaagagcgcatcgaacagggcgtctatctggtgggtgataaactgcctgcagaacgctttattgccgatgaaaagaacgtcagccgtacggtagttcgtgaagccatcatcatgctggaagttgaaggctatgtcgaagtgcgtaaaggttcaggtattcatgtagtttccaaccagccgcgccatcagcaggcggctgacactaatatggaattcgctaattacggtccgtttgagttacttcaggctcgccagctcatcgaaagtaatattgccgagttcgcagcaactcaggtaacgaaacaggacatcatgaaactgatggccattcaggaacaggcgcgcggcgaacaatgcttccgtgattccgagtgggatttgcagttccacattcaggtcgctctggcgacgcagaactccgccctggcggctatcgtggaaaaaatgtggacccagcgtagtcataacccgtactggaaaaaactgcacgaacacattgattcccgtaccgtcgataactggtgtgatgaccacgatcaaatcctcaaggcgctgattcgcaaagatcctcatgctgctaagctggcaatgtggcagcatctggaaaacaccaagatcatgttatttaacgaaaccagcgacgacttcgagttcaatgccgaccgctatctattcgccgaaaacccggtggtgcatctcgatacagccaccagcggcagtaaatgaaattcctgtccgacaggcgctgcaatgcgcctgtttgtctcgtcggtaagcgaaaagtataaagtgtcagcctgtgtaaatcctctcgccaccctcccctgcattcagcaaaatcagactccacggacatgtaattttgataacgaacaacgttgacctttgttacaattagattcaatttgaatttatgtttttgaatgctttcttatctcacgatttaacagggaatagttcaggctgtgttgatgtatcaaacccgcagaacataccaaaacagcaataacattgcggtagtgcatcttttaaaaccagcgtggcgttaaccgattcaccaggaataatgaatggaacttttgacccaattgctgcaagccctgtgggcgcaggattttgaaaccctggccaatccatcgatgattggcatgttgtattttgtcttgtttgtaattttgttccttgaaaacggcttgcttccggcggcctttttaccgggcgacagtttactggtattggtcggcgtgttgattgcgaaaggcgcgatgggctatccgcaaacgattctgctgctgaccgttgccgccagcctcggctgctgggtcagctatattcaggggcgatggctgggcaatacccgcaccgtacaaaactggctatctcatttacccgcgcattatcatcaacgcgcacaccatctttttcataaacacggtttatcggcgctgttaattggtcgctttattgcgtttgtcagaacactgctgccgacgattgccgggttatcagggctgaataacgcgcgctttcagtttttcaactggatgagcggtctgctgtgggtattgatcctgacaactctgggttacatgctcggcaaaacgccggtatttttaaagtacgaggaccagctgatgtcatgcctgatgctgctcccggtggtgctgctggtgtttggcctggcaggttctctggtcgtgttatggaaaaagaaatatggaaatcgggggtaagggatgcaaatacctcgcatgtcgcttcgccagctagcctggtccggcgctgttttacttctggtcggcacgctgttgctggcctggtccgcggttcgccagcaagagtctacgctggcgattcgtgccgttcatcaaggcacaacgatgccagacggtttttcaatctggcatcaccttgacgctcatggcattcctttcaaaagtatcacccccaaaaacgacactctgttaattacatttgactccagcgaccagagcgccgccgcaaaagcggtcctcgacagaacattgccccatggctacatcattgcgcagcaggacaataacagtcaggctatgcagtggctgacccggttacgggataactctcatcgcttcggataacttcctgttatccgaaacatatcactcactttggtgatttcaccgtaactgtctatgattaatgaggcggtggttaacactaccgcttcgttgtctggacaatcgttcctttgtaataggtccgaatcacaatggaaggttcaagaatgaaataccgcatcgctttagctgtttctctctttgctcttagtgccggtagttatgccactaccctgtgtcaggaaaaggagcaaaatatccttaaggagatcagctatgccgaaaaacaccaaaaccagaatcgtattgacggtctgaataaagccctgagtgaagtccgggccaactgttcagatagccagctgcgtgccgatcatcagaagaaaatcgcaaagcagaaagatgaggtggcggaacgccagcaagatttagccgaggcgaagcaaaaaggcgatgccgataagattgccaaacgcgaacggaaactggcagaagcgcaggaagagctgaaaaagctggaagcgcgcgactactaactcacaatagtcactacttactcacctggagaaaactatgtcgaaagaacacactacggaacatctgcgtgctgagttgaaatccctttccgatacgctggaagaggtgcttagctcatctggcgagaagtcgaaagaagagttgagtaagattcgtagcaaagcggagcaggcactgaaacagagccgttatcgcctgggtgaaaccggtgatgccattgccaaacaaacccgtgtcgcggcggcgcgtgccgatgagtatgtgcgcgaaaatccgtggacgggcgtgggcattggcgctgcaatcggtgtagtgctcggcgttctgctgtcgcgtcgttaattatggcggacactcatcacgcacaagggcccggtaaaagcgttctgggcatcgggcagcgaattgtttctatcatggttgaaatggtagagacacgtctgcggctggcggtggtggagctggaagaggaaaaagcgaatctctttcaacttttactgatgctgggcctgacgatgcttttcgctgcatttggtcttatgagcctgatggtgctaattatttgggcggttgacccgcaatatcgcctgaatgcgatgattgccaccaccgtggtgttgctgctactggcactgattggcggtatctggacgctacgtaaatcgcgtaagtctacgttgctgcgccatacacgccatgagttagcaaacgatcggcagctgctcgaggaggagtcccgtgagcagtaaagtcgaacgtgaacgacgtaaggcgcaactgcttagccagatccagcaacaacggctggatctttccgccagtcgtcgtgaatggctggagacaacaggcgcttacgatcgtcgctggaatatgctgctaagtctgcgctcctgggcgctggttggcagtagcgtgatggcgatctggacgattcgccatcctaatatgctggtccgctgggccagacgcggttttggcgtatggagcgcctggcgtctggttaaaacgaccctcaagcagcaacagcttcgcggttaacttccctctggccggagccattccggccttatccctcaaattttttgaagatttttgacagttttccttgctaacaatcatcattcaccacgtttatgattctctccatcgacagcaacgacgctaataccgcgccattgcacaaaaaaacaatcagcagcctgagtggcgcagtggagagtatgatgaaaaaattagaagatgttggtgtactggtagcgcgcattttaatgccgattctgtttattaccgctggctggggaaaaattactggctacgcgggtacccaacaatatatggaagcaatgggcgtcccgggttttatgctgccgctggtgattctgcttgagtttggtggtggtctggcaatcctgttcggtttcctgactcgcaccacagccctgtttactgcgggctttacgctgctgacggcatttttatttcacagcaactttgctgaaggcgtcaactcgctgatgttcatgaaaaacctgacaatttctggcggattcctgctgctggcaattaccggtccgggcgcgtatagcatcgaccgcctgctgaataaaaagtggtaagcacgcgctatacttaacgataaaaaacgaggaggaagctcctcgtttttgctattggaggagagaaaaatgggtcaactgattgacggcgtctggcatgacacctggtacgataccaaatctaccggcggtaaatttcaacgttcagcttccgcatttcgtaactggctcactgccgatggcgctcctggccccactggcacaggcggttttatcgcagagaaagatcgttatcatctctatgtttcactcgcctgcccgtgggcgcaccgcacgctgatcatgcgcaaactcaaaggactggaaccgtttatttccgtttccgtagtgaacccgctgatgctggaaaacggttggacctttgatgacagttttccgggagcaaccggagacacgctctatcaaaatgaatttctgtatcagctttatctccacgccgatccacactacagcggacgagttactgttcccgtgctgtgggacaaaaagaaccacaccatcgtcagcaacgaatcagcagaaatcatccgcatgttcaataccgcgtttgatgcgctgggcgcgaaagcgggtgattactaccctccagccctgcaaacaaaaattgacgaacttaacggctggatttatgacaccgttaacaacggcgtgtataaagctggttttgccaccagccaggaagcttacgacgaggcggtggcgaaagtgtttgaatcgctggcacgactggagcagattttaggccagcatcgttacctgaccggcaaccagctaaccgaagccgatattcgcctgtggactacgctggtgcgttttgatccggtgtatgtgacccacttcaagtgtgataagcaccgcatcagcgattacctgaatctgtacggttttctgcgcgatatctaccagatgccggggatcgccgaaacagtcaatttcgatcatatccgtaatcattacttccgcagccataagaccatcaaccctacggggattatttcaattggtccgtggcaggatctcgatgaaccgcatggacgagatgttcgcttcggttaaaaaaaggcaccttacgaggtgcctctgataattagctaagtgcatgttgttcatgtcggatgtggcatgaacgccttatctgacatacaaaacattgtacattcaatagattgcataacccgcgcagaccagataagcgtagcgcatctggcgattttgcgcttgtcatcagtcttagcgcgccttcacggcactttattaattccttgaacgaatatttactgccatttcattcacgtctattcttaatttgctgctttaaaaacaagtgattgagcaaaattgaggcaaaaatggactggtatctgaaagtactaaaaaattatgtcggtttccggggtcgtgcgcggcgcaaagagtactggatgtttattctggtcaacatcatctttacgttcgtgctggggctgctggataaaatgttaggctggcaacgcgctggtggcgaaggcatcctgacgacaatctacggtattctggtgtttttaccgtggtgggcggttcagttccgccgcctgcacgacaccgaccgctcggcgtggtgggcactgctattcttaatcccgtttatcggctggcttattatcatcgtctttaactgccaggcgggtacgccaggcgagaaccgctttggaccagatccaaaactggaaccttaaaacaaatctgctcgccggatgtctgactcatccggcttttatcatcatgttaatgaatgaataatttactaatgtttatttaaaatatttcaatgtcgttatataaattacctataaaaaataaccatgtatttatcttaaatatcaaaacctttataacatccgaaaaagaaagatacgaatagcatttacacaatacccggaatagactttcatcacttttaattaaagggatgtttttatgcagtggtatttgtccgtattaaaaaattatgttggtttctctggtcgcgcacgtcgtaaagagtactggatgtttactctgattaacgccatcgtcggcgctattatcaatgtcattcaattgattttaggtctggagcttccatatctgtctatgctttatttgctggcaaccttccttcccgtccttgcgcttgctatccgtcgcttacacgataccgaccgttcaggtgcctgggccttgctcttttttgttccgtttattggctggctcgtgcttctggtttttttctgcacagaaggtacttctggcagcaatcgttacggaaacgatccgaagtttggttcaaattaatcttagaattggggcgatatttcgcccctttttattaacaataataaatattattttccgttaaaaagtttgggaatttcccgcagacaccaggatttcgcttcccccatactgtcacgacgccaggccataataatatcgatctcgctggtcgattccgggctgacgacacgcaaccgcccttccgcaatatctttttcgaccataggatacggcatcgtcgccacgccaagccccgccagtaatgcctgacgtttatcttcaatcgtgctcaccgttaagcgcggctgtttgtccagcagctgtacggtcaacaccgggcgctcacgagcggtatccgccaccgcaattccacgatatttcacacgcgtcacttcagataacggttccggctcctgatgaatcgggtgatcaggcgcggcaacgtagacgttcattaacgtatagagcttgcgcgagttgatctccgacgaggaacgaaaatgcatatccggcgcgataacaatatccgcccgcccctgctccagccgttcccacgcccccgccagcacttctgtgatgattgccagttgggtattggcttttgccgccagtttgtcgattaacgggaaaaaggcaggtgtcggtaccagcgcttcggtcacaatggtgagatgcgtttcccaaccgcgcgcgagagcttccgcatcagtagtcagtttatctgcggcttccagcaaaacgcgccctcgctccaacaacatcctcccgacattggtgaatttggtacgatggcccgagcggtcaaacagcaccacatccagctcttcttccagtttttgcatggtgtagctaagtgcggaaggcacgcgtcccagctcatccgccgccgccgcaaaactgccccggcgatcgatcgcatccataacccgtagtgcttccagcgttaatgccctttctttggccatttcgttctcattcaggaaatttgaacataccgggcagaatatctggctaacaatgtagcgtccagccccttaccataaaaggaagtaaagagaggtcaagaattatgattactacccgaactgccaggcagtgtggacaagcagactacggatggttgcaggcccggtatactttttcctttggacactacttcgacccgaaattgttaggctatgcctccctgcgtgtgcttaaccaggaagtgctggccccaggtgccgcctttcagccgcgaacctatcccaaagtcgatattttaaatgtgattctggatggagaagcagagtatcgcgatagcgaaggcaatcatgttcaggccagcgccggagaggcgttgctgctctctacccagccgggtgtcagctatagcgaacacaatctcagcaaagacaaaccgttaacgcgaatgcagctttggctggacgcctgcccgcagcgagagaatccgctgattcaaaagctggcgcttaatatgggcaagcagcaattaatcgcctcgccagagggtgcgatgggaagcctgcaattacgccagcaagtgtggctgcaccatatcgtgctcgacaaaggcgaaagtgcgaatttccagttgcatgggccacgcgcgtatttgcaatcgattcacgggaaatttcatgcgcttacgcatcatgaagagaaagcggcgctgacctgcggtgatggggcgtttattcgtgacgaggctaacattacgctggttgccgattccccactgcgcgctttgctgatagatttgcctgtctagttgtttttacagggagatgatgatgagtaaaaaattggccaaaaagcgccagccggtgaagcccgtggtggcgaaagaacctgctcgcaccgccaaaaattttggctatgaagagatgttgagcgagctggaagctatcgtcgcggatgctgaaacgcgtttagccgaggatgaagctaccgcgtaaagacaggttgccggatgcggcgaaaacgccttatccggcctacaaaatccaacaacattaacgaattaaacaacccgtaggccggacaagatgcgccagcatcgcatccggcacgatccccaaaacctggcgtttatctggccttgctcgccataatctcgataatctgccgatccgtttgctgcatcgaatggcttgctaacgcacacaggttggcaatcgactgctcaacatcatgcgccacaatcccttcattgccggtcacggcggtatcatccagcgccattaacaccgctttccacgcagccgaagcactggtcgaaaccttcatcgcgcagctgttcgacgcaccatcgcaaatcatgccgctgacatcgccgatcatactgctgatcgccatcgagatggtttcataacgcccatccaccagccatgccatcccggcggcggcccccattgctgcggtcgttgcggcacacagcgcagacaaacgcggtaactggttatggatgtaaattgcgctcaaatgcgaaagcatcagcgcacgcgccagccgttcatcatccgctccgaagtgttctgctaccaccaccacaggcattgttgcggtaatcccctggttacccgagccggagttactcatagccggaagcgtagcgccgcccatacgcgcatcggatgccgcgctggtacgaatcacaatggatgaagagagatctttcgccagcaaaccgcgctcgcactgtttttccagcgtcgcgccaatatgcagcccccacttaccgctcaaaccttcctgcgataacgcacaatttagcttcgcggaatcgagaataaagcggatcgccgcaaacgggacttcattgacgaacttcaggatctcagccagcgtcgttctggaaagcaccgtcagcggagactcttgctcgccctctgccacacacgcctgctgggtaaacaccacaccatcgtgcgtctcgatatgcacaatgttggtatgcccgccgacgatggtgacacacgcccacttctcaccgttccagactttggcgcgtgagaagaggatttcatcgcaaggttcctggatcttaacggagactttccccgccgccagcagtgctttggcatcggcaattgcctgcgctgttgcgtctttcagcacttccagcccggcgttggcatttccacctaacgcccccagcgccgccgcaatcggcagccccaccattcccgtgccgggaacggtgacgcccagaccgttcttcatcagatttggcgaaacccaggcttctacacgttcaaccggaccttccagttctgccgcagcaaccgccgccgccagcgccagtgaaatcggttcagtacatcccagcgccggttttacttcctcctgaacggcgaggatgtaacgctgccataacggatttaaagtcgaatcaaacatattaaaaaccttaaaatttcaggtaaatcaagaaaatgccaggaacggagaaacacacagcaacaaaccagtgacgataatcaggtacagagacatccctttgtatttgtgcaatgctggtactttgtaaaccagccacgccgggatcaggcaccctaccatgccgaaaatcgggctacagatagaggtgaagctcaacaccggtgcgttcagtacgatggcgctccaggccagcaaaatggcgaaaatcatgatgccgcgctgaacgagattttcgttaatcttctcggcaggcatcttgcgacgcaggatgttcattacgatcccttgcgttgcttcgcgaaagcctaaatagacgccaaagaatgcagtcatgacagcaaagatattgagaatgacgctgaccactttcacccacgctgcgccgtcaccgctaataaactgtgcggcaatcgccagcgcggaaatattctgctcgtaggcttttaccgcttcgtcatgtcccatcgccagcgtgaacgacacggcgtagaaaaagacggtgacaaacaaaatgccaaacgcgatattcattgcccgcaatgctttatgccgcgccacttcaatggatttttcccgcgagcgataagagatcaccatcgggcttaacgtctgaataaacagaatcgacgtcagggtaaacggcagcgtaataatggcgtttttcaccagcagccccagcggtggtagcgaaccgacgttatacagatgccacattcccaccatcgacacgcccagcgccgcgaccaccagcagcttggtcagcaccatgccggtcgaaattttgaataacaatttctcgccgcgtgaggagatcgccaccagaatgcaaatcagtaccagaccataaaagggactgtctgacagcaacccttccgtcacgccgaaggtatgcaggtaggaagcactatcgttggtgatggcggtggaatagacgaacatccaaatcaccagcattacgaaatagagcgcacctaacaggatgccccagtttttacctaaataaccgctaatgacactcgggtaatctttacattctggtgattctgccagcgtattaataaacaaccgctgaaacagatacattgccgggtaaccaatcaccgatgagagcaaaaatacccacaatcccatcaaaccgacctgcaccgggagaaaaacaatccccgcgccaatcgccatcccgatactcataatcacccagccggtgtcagtactgtcgaatttgatcgcttctcgccactcgctctcactcattccagcacgacccgccggggtcgaagcgtctgcaatgacgcctttattcgatgcaatttccataatttctcgctcaaaattttgtagggcttattatttttttccgagccgcatcaaggcgatatgcggtctacgtttttgcaggcgagttattagaataaagaaatgatacgcgcgaggtcagagaaaatcttcacaatcaagactttgaaataacggagatggataagaattttctactaaattaatcgcaagagaatattcattctctatttgcggcagatcacaaaaaaaaggtgcacatttgtgcacccaaggatgaaagctgacagcaatgtcagccgcagaccactttaatggccagtcctccgcgtgatgtttcgcggtatttatcgttcatatctttgccggtttcatacatcgtctcgatcactttatcgagtgaaacacgcggtgccgaggtgcggcgcatcgccatccgcgcggcgtttactgctttcacggcattaatggcattacgttcaatgcacgggatttgtacctgtccggcaaccggatcgcaggtcagcccaaggttatgctccatcgcgatttccgccgcattgcatacctgcgccggactgccgcccagtagttcagttaaccctgccgccgccattgaacaggccacgccaatctccccctgacagccgacttccgcgccagagatggaggcgttcattttatacagcgcgccaatagcccccgcggccagaaaatagcgggcaattgaccgctcgtttaccggacgacggaacttatcgtaataagccagtactgccggaataatgccgcacgcaccgttagtcggtgccgttaccacgcgcccgccagctgcgttttcttcactaaccgccagcgcgtacatgttgatccagtcgatgacattcatcggatcgttagagatgttatcgctggaaaccagctgacgacgcagcgctacggcacggcgcggcacattgagcggaccaggcagcacgccttcagtgttcatcccacgttcaataccgtcatgcatcacttgccagatacgggcaaaaccggcgtcaatttccgctttgctgcgcagcgctagctcgttgtgcatcatcagaccagatatagacaggccgttgtaatcacacattttcagcagttcacctgctgagtggaaatcgtaaggtacggacgtttcgacatcgtgcgacaggccgaagtgttcttcttcgacaataaacccgccgccgacagagtaataggttttacttaatagctcttcctgtcccttccaggcagtgatccgcattccgttctcatggcgaggcaacatttcgggatggaagataatgttctttgctacaggaaaatcaacaatatgcgcaccagatgccactggcagccgcccgctgcgcgttactaactctataaatgcagggatctcatcaatgacaacatcctgcggactgtttcctgccagtcccatgatgatggcgacatccgtggcatggcctttgcccgtcagtgacaacgacccgtacagatcgaccacaatatggctcgtcgcggttaataagccgctactttccagccgatcaataaaactttttccggcattcattggccccacggtatgcgaactggagggaccaatcccaattttgaaaatatcgaatgcactaatcatatccacaccctcggattgccgttcagtgaagtggagcggaacgaccttacgaccgtcccgctcacgaggctttacgcactacgtactgcgatggcttcaatttccagcttcacatctttcggcaaacgcgcgacctgcacacagctccgggtcggataggtcgcctgatgctcatcgaagaactgcttatagacttcgttgatggtggcaaaatcattcagatcggtgataaacacggtcatcttgatgatatcgcccacgctcagcccggcagcaaccacgatcgctttgacgttttcgaggcttaaacgcgcctgatcttgcacatcagccgggatctcaccggtctgtgggcaaaccggtatttgcccggaggtgaagaccatgctgcctaaatcaacgccctgaacataagggccgattgcgcctggggcacgttgcgtttcgataatctttttcatacatcctccggcgtcagagcgcctgggtaaaggtacgtgaaataacatcctgttgctgttcacgggtcagtgcgttgaagcgcacggcgtagccagagacacggattgtcaggttaggatatttttccgggtgctcgatggcatccagcagcatttcccgattcattacgttgacgttgaggtgttgaccgccttcgacatccgcttcgtggtggaaatacccatccagcaggccgacaaggttggttttacgtactggatcttctttgcccagcgccgcaggaacgattgagaaggtgtacgagatcccatctttggcgtaggtgaacggcagtttcgccaccgacgtcaatgaggccacggcacctttgcggtcacgaccatgcatcgggttagcgcccggcgcgaacggtgttccggcgcgacgaccgtccggcgtattaccggttttctggccgtacaccacgttagaagtgatagtcagaatcgactgggtagggacggcgttgcgataggttggcagcgctttaattttcttcataaagcgttcaaccaggtcgcaggcaatgctgtctacgcgctcgtcgttgttgccgtactgcggatattcaccgtcgatttcaaagtccaccgccaggccgttttcgtcacggattggtttcacgcgggcatatttgatggcagacagggagtccgtcgccaccgacaggcccgcgatgccgcatgccatagtgcgatagacatcacgatcgtgcagcgccatcagcgaagcttcgtagctgtacttgtcgtgcatgtagtgaatgatattcagcgcgctgatgtactgcaccgccagccagtccatgaagtgatcgaggctgtccatcactttgtcgtaatccagcacgtcgtccatcagcggtgctgttttcggcccgacctgaatcttcagcttctcgtccaccccgccgttaattgcgtagagcagcgttttcgccaggttagcgcgtgcaccaaagaactgcatttgcttaccaatcaccattgggctgacgcagcaggcaatcgcgtaatcgtcgctgttgaagtcagtacgcatcagatcgtcattttcatactgcaaggaagaggtgacgatcgacacctgcgcggcatattttttgaaggcaatcggtaattcttccgaccaaagaatggtcaggttaggttccggtgccggccccatagtgtgcagggtgtgcaaatagcggaaggagtttttggtcaccagcgtacgaccgtccagccccatcccgccgatcacttccgtcgcccagattgggtcgccggagaacagcgaatcaaattccggtgtacgcaggaagcgtaccatacggatcttcatgatgaagtgatcgatcagttcctgtgcctgctgctcattgagtacgccagctttaaagtcgcgctcaatgtagatatcgaggaacgatgccgtgcggcccagcgacatcgcgccgccattttgcgatttcactgccgccagataagcgaagtagagccactgcaccgcttcctgcgcattctgcgccgggcgagagatatcaaagccatatttcgccgccatttcctgaatctgcaacagcgcatgacgatgctctgccagctcctcacgcagacggatggtggcttccagatcctcgcctttttccagacgagactggagatcggcaaattgcagttcgcgttcacgcaccagataacgaatgccatacagcgctacgcggcgatagtcaccgataatgcgcccacggccatagccatctggtaaaccggtcagtacgccagatttacggcagcgcagcatatccggtgagtaaacatcaaatacgccctggttatgggttttacgcagatcggtaaacagatattcaaattcactgtccatttctcggccataggcgtggaatgaacttttaatcatattaatgccaccgaacgggtgtagcgcacgtttcaacggcgcatccgtttgcaggccaacaattttttccagcggctggttaatatatcccgcatcatgagcggtaattgtggtggcaatattggtatcgaaatcaaccggcgcgtgggttgcattttcgatacggatgccttccattactttttcccacaattccgtggtggcaggcgtcgcttcggcgaggaaagattcatcgccttcatacggtgtatagttatgttgaataaaatcgcggacattaatttcgtttttccagtccgtacctttaaagccaagccatgcgtcggcgtacagcttatcgctggtatcaatatctaccttcatgaaaaataatctctctacaatacttcaactaaattatgcaaattctgcgggcgcgttaactttgcctaaatgaatggcatccaaagcaatcattttttcttcgttagtcggaataacggcacaaatgacacgcgcattttcactggaaacaattcgctcaccacaggagttagagcgattattcatttctgtatcaatctctaagcctaatacagccaaatgttccatgaccagacgacgaattaagcttgaattctctcctattccgccggtgaatataattccatccaggcgacgtaatgaagctgcgtgtccggcaatatgacgggcaattcggtgaacaaaggttttaattgccagttgcgcgcgttcgtgaccttcatgccaggctttttccagaacacgtaaatccgaagaaagaccggaaatacctaataatcccgactctttattcactacgcgttccaggtcacccaggctctggttggtttggctggcgacccaggacatcgcaccaaagtcgacatcgccactgcgggtacccatcatcaagccttccagcggcgtcattcccattgaggtatcaacactctgaccgttgcgaaccgcgcagattgacgcgccattgccaagatgcgccacaaccaggccggagtcatcttccgccagattcagcagcgaatgtgcgcgctgggaaacatagcggtgcgacgtgccgtggaaaccataacggcgtacacctaactcttcataatatttccacggcaggccgtataaataagcttccggagccatcgtctggtggaaactggtatcaaataccgccacctgagttacgcccggaaataattgctgcgccgattcaataccacttaaattggcgtaattatgcaggggtgccagtggagaaacgcgacggatattatcaatgacttcatcggtaataatggcggactcggtaaaaatactgccgccgtgagcgatgcggtggccaattaaggccacactgtcatttaaattccgtttttccagttcaaatgcaattgccttcaatgcaccttcgtagctgtggtgagccagcggtgctggctctcccccatttacgaataagaatgcattttccgagttaataccgtcggcaatacctgacattaatacttcacagtcgctggcatcgagcacggaaaacttaatcgaagacgaaccacagttaataaccaaaacaaccggaaattcattcatctcttttctcatcctgagttacggattaaaacagtttgtatacgatgttcaggatggtcagcagaccaatcacggtaacaaacacgttatccagacgaccacggtatttcgccagagacggcgctttacggatggcatacatcggcaacaggcacagcagggatgcgataatcggtgcgcccatggcttcaatcaggtcaaggatgttcgggttggcgtaggcaacaacccaggtggagcccatgatgaagatcatgctgatagtgttcagtttacccagcgacactttagttttgtcgcctttataaccaaacttcaggaccaggccattcagaccttccagcgttcccagatagtgaccgaagaaagatttgaagatagccacgagtgcgatgatggaagccgcatattccagtgtaatcgcgaacgttgttttggtaccggtcatggacgcaaagtggttagccagataagaaagcactggaatattctgcgctttggcttccgccatgttggccggagacagagtaaacaggcagctaaaggcaaagaacatcaccactgcaaccatcagcatgctggcacgagaaatgatttgggaacatttacgttcggtgaagtcgcgaccgaagtctttctcatactcttcacgcttagaaaccacgaaggaagagacgattggcgagaagttaaaggagaaaaccatgatggaaatccccagccagacagtgatcaggataccgtcatgaccggttaacgacagcgaaccgaggtcaacctggtcgataactgcagagttccagtaagggatcagcgacaaagaaatcagcaccaggctggcgataaacggccataccaggtagctcatcactttaaccatcagatccttaccaaaccagatgacgaaagccatcagcagcaacaggaacagcgccacaaagccgcgattcagcggtgcaaagccgagctggttttcccagaacgtcataaaggtattggtaatagtaacgccataaatccacagcagtgggcaaatcgcgaagaagtacaggaacgtgataaccacgccgccagttttaccaaaatgctcttccaccgtttccgtaatgttgccggaagggttagagccagaaagacacagacgcgccagcgcccggtggcaataaaacgcgatggggtatgccaataccaacatcagaagaatcgggatcagtccgccaaaacctgcgcggatagggaagaacagcaccccggcgccgattgccgtaccaaacaagcctaacgtccatgtggtatctgatttacgccaggacgattgttttgtctggctggatacaatgctatctgaagtactcatatcctatcctcaacgaattaattaagcgtcaacgaaaccggtgatttgagagacgcgagaaagatcgatattgccgccggaaataatactgacggtttttctgttttgaatatattggtctaatttaccgcttaataatgcagcacatgccagagcgcctgcgccttcggtgacgactttattgcgctgaattaaggcaatcatactgtttctgatttcgtcttcgctgaccagcacgatgtcatcgactaattcacgaacgatttcgtaagttaaattacccgggcgggagacatcacaaccatccgccagggtgccggtagttcggtgcgtggttatttctccggagtggaaagaagccgccatgccgtgaacgttttcagactgtacgccaataacacgaatggtcgggttaatagatttaattgccaccgcaataccagcaattaaaccgccaccaccaattggcacaatcacgttatcgacatcatagagatcttccataatttccagaccaatcgttccctggccagcaatcactttcggatcatcgtaaggtgggataaaaatacggccttccatttcgacaatttcgctcactttagcgatagtgtcgttgaagttatcaccatgcagaacgacttctgcggagtagtcgcacgttgccgctactttggattttggcgcaccttttggcatcaccactttaccgtcgatacccagcatcgcgcaggagagggaaaccccttgcgcatggttgcccgcagaacaggccaccacgcctttgcgtttttccgcatcggtcagtgaacttaatttattaaatgcgccacgaattttaaatgaacccgtacgctgcatattttcaaacttcaggaatatttcacctttgcaacgttcactaaaatagttggagcgaggcatgcctgttttataaattcgcccagccagtcgttgtttcgcttcaataatgtcatcaatagcaaccggcagatcgtatgtaatatgcattataaaacctcttcgcctgaattaaatatgtaggtaaccgtaaccgacacctgcaagacagacaggtggattatttatgtttaaataaaaacaaataactaaccaacttctattaattgccttcgtctacacccattataagatgaatactctttggctaattccaccaaaaccgatgctgcttttttaatacgataatttttcgaccataccgcggcatattgtgccacaggtaatgtttcttcaaccggaatagtaataaattgattagaaccaaaaggtgacgtcatatcacaaggaattacagttaagaaatcagcattgagaacaagattataaattgtcacgactgagtcggttttaacgatgttttcaatactgatgccatttctttgtaacgtagtaagcagttcgctgtagtaccccatattagtttgtggcaacacccactgttcgttcttcaacgactccagcgtggtggtgccggtgcatgttcgggacttactggctaccagcacaaactcggactcgaacagcggctcaacatgtaaatcctgaagcttcatttctgcacttaacgtaccaatcgcaaaatccagtcgaccgtcgcggattgccggtaagaacgaagacagttgcgcttcatacatagaaacctgcgctttcgggaacacctctttgaacttgttgatcatccctgacataaaagtaaaaccaatcaatgaaggaaaaccaaatgagacttccaccaccgcctcagaagacataccgcttatctcattaaccatatttttcatttcacgggtaatggattcggaacgggagagtaacaattgaccggcaggtgttaatgttacaccggtatttttccgcaccactaattccacaccaaaataatcttcaatatcgttaatgattttactgacggccggttgagttaaccctaattcttttgcagccgagccgatagaaccacttctaatgacttcctgaaagactaccaggtgctgcgttttcggaagaagaatagtgctcataacgacctacgttaattacctcattgacggcatgaagtgtatcaaaatgaaatgaacaggatatgtgcgaccactcacaaattaactttcaatactttccagagtatcgttattacaattaaatacctttaaatatcaacaagttaaagtataaaaatcagcataaaccctgatttttgtcaaaaaaaatgacggggataaccatattttatggcgataacatcattcgttatgtggttaatacaaaaaaggggctgagaccatatttcaagcaattaccggataattaccaggcaaaatttgagttaaatttaatgagcaagttctcaaattttactataaataaaccattttcagtgataaataatgcggcatgtcacattttttcacgctatttgttggagaacaaacatttattttatcaatattttaaaatttcgaatacatgtattgatcatctcgaacaattgattaacgtcaactttttctcttctgacaggacgtcattttgtgaatgcaatcgttttccataaattcttctcccctcataggcgacgaatagcattttgtgttgaggatcacaaaacgaataattgctgatcgccgcgataaggtcagacaaagacaacaagggaaattttcacagagcttttgatcggcgtaggccacagaatgttgcttcgtttactgtaacgccgggtaaatgagcgttttttgatagtgcgaaagaaccctgcgaggaaaataagcatctattattgtttgtcatgatgacaaggcaggcatcaatgaaaggcttcccaattgcgcatatttttcacccttcaatcccgccaatgcacgcagtggttaacaatcacaatagaaatattgattattggacggtaaaaagaaagtttgcagaaattgtctccaccaatgacgttaataaaatttacagtataagtaatgaactgcggagagtattatctgcaataactgcattgaatttctatcatggcgatgttccttctgtcatgatccgaatccaaccggaaaatatgagtccattcattatagatatttctacaggagaacatgatgattatatcatacaaacattagatgtaggcacttttgcaccttttggtgaacaatgtacttgctcagccgtcaataaaaaagagctggaatgtattaaggagacgatttctaagtattgtgcaaaattcacccgaaaagaagccatcttaacaccccttgtgcactttaataaaacctccattacttcagattattggcaaattctctttttttcacccgatcattttaataatgatttttattgattatttataaaggataaaataatgttccctgtttcatcaattggtaatgatattagtagtgatttagtccgtcgaaaaatgaatgaccttcctgaaagcccaacaggaaataacctcgaagcactagcaccaggtatagaaaaactaaaacagacctctattgaaatggtcactttacttaacacgttacaacctggtggaaaatgcattatcactggtgattttcaaaaagaattagcgtacttacaaaatgtaattctttataatgtctcgtctcttcgtctggattttttaggttataacgcccaaattattcaacgatcggacaatacttgtgaacttaccattaatgaaccgttaaaaaaaccaggaaatatccacaggtaatatcaatattaattgcccattaaaagatatttacaatgaaatcaggaggttaaacgtaatttttagttgtgggactggagatatcgttgatctatcctctctggacttacgtaatgtcgatttagattattatgatttcacagataaacatatggctaatactattttaaatccttttaaattgaattcaacaaattttactaatgccaacatctttcaggttaattttgttagttcaacacaaaacgccacaatctcctgggattatttactaaaaataacgcctgttttaataagcattagcgatatgtattctgaagaaaaaatcaagtttgtcgaaagttgtttaaatgagcctggagacattaccgaagaacaattaaaaattatgagatttgcaattataaaatctataccaagggcaactcttacagataaattagaaaatgaattaacaaaagaaatatataaaagctcatcgaaaatcatcaattgcttgaacagaattaaattaccagagatgaaagaattctcatcagaaaaaatatatgattacatcgatataatcattgaagattatgaaaatatcaaagaaaatgcttatctggtcgtcccccaaattaattatactatggatttaaacatagaagactctagctcagaagagttactttcagataataccctcgagaaagacgaaaattctccggacaatggctttgaggtcggggaatataacacatatgaagcatataactcagagaagcaatattttaccagagaggactatacgtatgattacgaccttttaaatgcaatatagacttaataacttcttacaaagtctattattaataccgtagatatttattcatcttaccctgtgcaccaaaagcaaaaactcactgacgcgggtttgaaactgatggcaaccgcaaaaatgcctgatgcgctacgcttatcaggcctacgccatctctgcaatatattgaatttgcgtgcttttgtaggcaggataaggcgttcacgccgcatccggcatgaataaagcgcactcaacaatctgaaacccgccggaacggtttattacgtacatcaggtaaaactgaccgataagccgctttcttttgggtatagtgtcgtggacagtcattcatctttctgcccctccaaaagtaaaaacccgccgaagcgggtttttacgtaaaacaggtgaaactgaccgataagccgctttcttttgggtatagcgtcgtggacagtcattcatctttctgcccctccaaaagcaaaaacccgccgaagcgggtttttacgtaaatcaggtgaaactgaccgataagccgggttctgtcgtggacagtcattcatctaggccagcaatcgctcactggctcaagcagcctacccgggttcagtacgggccgtaccttatgaacccctatttggccttgctccgggtggagtttaccgtgccacggactgttaccagccgcgcggtgcgctcttaccgcaccctttcacccttacctgatcccgcttgcgcgggccatcggcggtttgctctctgttgcactggtcgtgggtttcccccccaggcgttacctggcaccctgccctatggagcccggactttcctcccctccgcccgtctcccccgaagaggacgacgacgaagcggcgactgtctggtcagcttcggcgcgcagtatagagggtttgcgcgcccttgtcaccccgcgttgcgcattccaatcgccagtgtcgcggcgatattacgtgaagcacggcagatattgtcataagccccgcggaatgcttcgtccaacgtacctatgctggtcaatacgctgaagaccgcatcaatgccatgctgatgtacaacgccaacatcatcggtcaggctacccgcaatgccaatcaccggtttatggtacttcttcgccacgtttgcgacaccaatcggtaccttcccgtgaatactctggctgtcaatacgcccttcaccggtgatcaccagcgtacaatcgtgaatatgttcctccagattcagcgccgtagtgacgatttcaataccacttttcagttccgcaccaagaaacgccattagcgccgcgcccataccacccgcagctcctgcaccggggacatctttcacatcaacatgcagcgcttttttaatgacctcggcatagtgagagaggttattgtccagctcaacaatcatcgcttcactggctcccttttgtgggccaaagatgcgcgatgcgccgttatcgcccaccagcggattggtgacatcacaagcgacgcgaatgacgcaatcttttaagcgcggatcgaggccggaaatatcaatatcattcagagtattaagactaccgccgccaaaaccaatttcattgccgttggcgtcgcataatttcgcccccagcgcctgtaccatgcctgcgccgccatcatttgtagcgctgccgccaatgccgataataatgtttgtcgcaccgctctccagcgcctgcaggattaactcgcctgtgccgcgtgaagtggtcacgagtggatcgcgtttttccgcaggtaccagctccagcccactggccgccgccatttcaataaacgcggttttgccatcgccggagatcccccaactggcattcactttctcgcccagcggccctgtaacccaagcgtgacgttcagaaccctgggtggctgcaatcatcgcttccaccgttccttcgccaccgtcggcaaccggaatagaaacgtactgtgcatcaggaaaaatttcccgaaatcctttttctatcgcctgcgcaacctcgctggcagataaactttctttataagagtctggggcgattacgattttcatacctatgcctgttaccacatgacgccggagggcgtttctcttattcggcctggattccaggcccggattgcaatacgccatccgggcacgacgtcattaacgagtaacttcgactttcgccagtttttcgtagtagcacgccagggcgctatgatccgccgttcctaaaccatctgctcgcagtgcctgcatcatctccataaccgcagctgtgagcggcagttgtgcgccgacgccgtgagaagtatccagcgcattcgccagatccttaatatgcagatcaatacggaagcccggcttgaagttgcggtccatcaccatcggcgctttggcatccagcacggtactgcccgccagtccaccgcgaattgcctgataaaccaggtccgggttaacgcccgctttagttgccagcgttaacgcttctgacatcgcggcaatattcagcgccacaatgacctgatttgccagtttggtgacgttacctgcaccgatttccccggtatgcaccacggaacccgccatcgctttcatcaaatcatagtatttgtcgaaaatagccttgtcgccgcccaccatcactgacagcgtaccgtcgatggctttcggttcaccgccgctcaccggagcatccagcatatcaatgcctttcgctttcagcgcttcgctgatttcacggcttgccagcggtgcgatagaactcatatcgatcaataccgtacctggcttcgcgccttcaataatgccattctcacccagcgccacctctttcacatgaggggagtttggcagcatggttatgatgacgtcgcactgttcagcgatcgctttagccgtagacgctgtttctgcacctgcagcaatcacgtcagcaatagcttctgggttacggtcagcaaccaccagcgagtaacctgctttcagaaggtttttactcattggtttacccataatccccaggccaataaaaccaactttcatagtcatatcaatcatctctcttgttgcggtggtggttattttttaaaggtatcagccagtttctgagtggcagagcggaagacgccgagatcgctgccgacagccacaaacgtcgcgccccattccagataacgacgcgcatcggcttcgaccggcgcgaggataccgctgggtttgccgtgcgcgctggcacggttaaaaatgtgctgaattgctttttgtacatccgggtgtgatgcattgccgagatggcctaatgccgcggccagatcgctggggccgacgaagatgccgtctacgccttcggtagcggcaatggcatcgacgttatctacgccctgctgactttctatctggaccagaatagtgatgttcttgttcgactgagcgaaataatccgccacggtgccaaacatattggcgcggtgagaaacggagacgccgcgaatgccttccggtgggtaacgggttgatgccaccgccagctctgcttcctcttttgtttctacaaaaggaatcaggaagttatagaaaccgatatccagaagacgcttaataattaccggctcgttggtcggcactcgcactactggcgcgctggcgctgcctttcaaggccattaactgcggaataaacgtggagatatcgtttggcgcatgttcgccatccagcaccagccagtcaaacccagccaaaccaagaacttcagtgctaatcgggttagagagtgctgaccagcaaccaatttgtacctgtttcgcagccagtgcggctttgaatttattcgggaaaacatcgttattcatcgcttatacctttgcttatttctgcaattccatacgtttaatgtcgccaactacgaagaggtagcagaccatcgccatcagcgctgaacatcccacgaaaaccagtgctgcattgaaggagtgcagttcacttaccaggtagccaatcaccagtggagtgacaatggaggcaacattgccaaagacgttaaagacgccgccgcagaggccaacaatctctttcggcgcggtgtcagaaatcaccggccagcccagcgcaccaaatcctttgccaaagaaagccagcgccatcagcatgaccaccagcgtggtgttgttggtgtagttacataagatgatggtggaagccagcaacattcccagcacaatcggtagcttacgtgccagggtcagggataaaccgcgtttgatcagataatccgagaagacacctcccagcacgccgcccgcaaaaccacacagtgctggaatcgaggcgaccagacccactttcagaatcgacatgcctttttcctgcaccagataaatcgggaaccaggtgaggaagaaccaggtgatggtgttgataaaatattgtccgaaaaatacgcccagcatcatgcggttagagagcaattgcttgatgtaatgcagtttgggtccgcttgctgccgcactgcccggctttttgtggtccatatcgaccaccgcgccattttcagagataaacttcagctcttccgcagacatacgtgggtgatctgtcgggttatgaatcaacttgatccacagcgccgtcagcacaaaaccaatcacccccataacggtaaagacgtgctcccagccccaggcgaaagtcagccagccaagcagcggcgaaaagagcgccagcgagaaatattgcgccgagttaaagatggcggaggcagtaccacgttctttcgtcgggaaccaggcggcgacaattcgggcgttcgccgggaatgatggcgcttccgagaagccgagcataaagcgcataaagaacatggagatccctgcccaggccagcgggaacatatcaacaaagccttgcaggaaggtgaatagcgaccagaaaaagaggctgtaggtgtaaacttttttcgagccaaacttatcaagcagccagccgccggggatttgcatcagcaagtaggcccagccaaaagcggagaagatgtaacccatcgaaaccgcacttaactgcaactcttttgccacttcggtaccagcaatagacagcgttgcacgatcggcgtagttaacggcggtaacaataaaaataatcagtaatattaaatagcgggtatgcacgcctttctttttttcgtcaacggtgtccagaatcattttatttacctcgggtacttatgctgatttttattattatggggaaggtgttatttatgagtttcatttatgccgtaacgacaatgaactcgggaattagtataagcagcgcgagaataataatcattgtgcaaatgctaatttaattaatactatttaaatattattttgagcatatgcacataaggttgcgcgctaaagcacagatttgcgctttaccttaccgggcggcactgcaatccctgaaatgattgacattgatcacatttctgcgtttaaactcctgacattcttatttcacccaatgaagtcatttatttttaaatgagaccaggtcctcattttaataacccctggctggagaatattgcacaatggccaacatcgaaatcagacaagaaacgccaactgcgttttatataaaagttcacgacacagataatgtggcaattattgttaatgataatggcctgaaagcaggaacgcgttttccggatgggctggaattaattgaacatattccccaggggcataaagtcgcattgctggacattccggctaatggtgaaattattcgttatggcgaagtgattggttacgccgtgcgtgcaatcccacgcggaagctggatcgacgaatcaatggttgtactaccggaagcgccgccgttacacacgctgccactggcaaccaaagtcccggaacccttaccgccgctggaaggatacacctttgagggctatcgcaatgccgatggcagcgtgggcaccaaaaacctgctcggtatcaccaccagcgtccactgtgtggcaggcgtggtggactatgtagtaaaaatcattgaacgcgatctgctaccgaaatacccgaacgtcgatggcgtggtggggctgaatcatttgtacggttgtggcgtggcgattaacgcaccggcggcagttgtacctatccgtaccattcacaatatttcgctgaatcctaactttggcggcgaagtaatggtgattggcctgggttgtgaaaagttgcagcctgagcgcctgctgactggaacggatgatgtgcaagctattccagtagaaagcgccagcattgtcagtttgcaggatgaaaagcatgtcggttttcagtccatggtcgaggatattttgcagatcgccgaacgccatctacaaaaactgaatcaacggcagcgagaaacctgcccggcttcagaactggtcgttggtatgcagtgcggtggcagcgatgcgttttctggtgtaacggcaaacccggcggttggctatgcgtctgatctactggtgcgctgcggcgcaacggtgatgttttcagaagtaacggaagtgcgtgacgcgacccatctgctgacaccacgcgcagtgaacgaagaggtcggcaaacggctgctggaggagatggagtggtacgataactatctcaatatgggaaaaaccgaccgcagcgccaacccttcgccgggcaacaagaaaggcggtctggcaaacgtggtagagaaggcactcggctccattgctaaatcgggtaaaagcgcaattgttgaagtgctgtcgcccggtcaacgcccgactaaacgcggattaatttacgccgcgacgccagccagcgattttgtctgtggcacgcaacaggtggcttcgggtatcacagtgcaagtgtttacgaccggtcgtggtacgccgtacggcctgatggcggtacccgtcattaaaatggcaacccgcaccgagctggcgaaccgctggtttgatttaatggatattaatgcgggcaccatcgctaccggcgaagaaactattgaagaggtgggctggaagttgttccactttattctcgacgtcgccagcgggaagaagaaaaccttctcggatcaatgggggctgcataaccagctggcggtgtttaacccggcaccggtgacctgatttcttttggaacgtccctcgcaaaacatggccttagtgccatgtttttattgtttaaagcccccacgtccattaataatgcatttgcattaccttagttcaagcttataatttgagcagaaaacaggctgtaaaaggacagtgaatcatgcccgctaatgctcgctctcacgctgtactgaccactgaatcaaaggtcacgatacgcggacaaacaactatccccgcgccagtgcgtgaggccttaaaactgaagccaggccaggacagcattcattacgaaattctgcctggtgggcaagtatttatgtgccgactgggagatgaacaggaggatcatactatgaatgcatttttgcgttttctggatgcagatatccagaacaacccgcaaaaaactcgtccattcaacattcaacaaggaaagaaacttgtcgctggcatggacgtcaacattgatgatgagattggcgacgacgaataatggattttccacaaagggttaatggttgggcgctatatgctcatccctgttttcaggaaacctacgacgctttagttgccgaagtcgagacattaaagggaaaagatcctgaaaattatcagagaaaagccgccacaaagttattggcggtagtccataaagtgattgaggagcatatcacggtcaatccatcatcaccggcattccgtcatggcaagtcgttaggctctgggaaaaataaagactggtcacgggtaaaatttggtgctggtcgttatcgtctcttctttcgttatagtgaaaaagagaaagtcatcattctgggatggatgaacgatgaaaacactctgcgcacctacggtaaaaaaacagatgcctataccgtattcagcaaaatgttaaaaagaggacatcctcctgccgactgggaaaccctcacccgagaaacagaagaaacccattgatggtgttcacaatgcccgccgaacgcattcgtgttgaccagcgggcatcctttctcactccccgaccagaatcacttcaaccccagcctttcgcagtccttccaggctatccgcaggaatgccttcatcaacaatgatcatgtcgatacgttgagtatcaatgatcttatgtaaactggaacgattgaacttactggaatcggtgaccacgatgatccgttccgcaacttcgcacatccgacggtttaaacgagcttcatcttcattatgtgtgctgacgccgcgctccagatcgatcgcatctacaccaagaaacagcatatcgaagtggtaattttgcagcgattgctcagcctgatcgccgtaaaaagattgcgactgacggcgcaaatgcccgccggtcatcagcagctcaacgccttccgcttccagcaacgcattagccacgttcataccgttggtcatcgcaattacgtcagtgtgcttgcgcatcagacgagcaatctcaaaagtggtggtcccggaatcgaggataacccgatgacctggctgaatcaactcaacggcagctttcgcaacgctgcgtttcatcgcggtgttcagtgcgcttttatcttccactgatggctcgactgacggcgtcgtgctatcgcagatcaacgcgccaccataggcacgcacagcgatcccctgcttttccagaaacgccagatcgttgcggatcgtcacagtagatacgccatacaatgccgacagatcgttaacctgcacactcccttgctgtcgcagacgctgaatgatctgttctcgtcgctcgctggtgccagtcactcgcttctcacctgaagcgtcggtattactcatagtaagtcctttcgtaaaactttcgtttcatttcgttttgcctattaacgcctttctattaagcaaatgcaagcccaccttgcccattgacgcaagctactctcgtttcagtgactttcattatgtttcttttgtgaatcagatcagaaaactattatctttcgttttatttttatctcaccatgacgcagtatcaactgaaacaaaacgaaagattaatatcgcagtaatctgaactggagaggaaagtgaaacatctgacagaaatggtgagacagcacaaagcgggcaaaacaaatggaatttatgccgtttgttccgcacatccgctggtgctggaggctgcaatccgctacgccagtgcaaaccaaacgccgttactgattgaagcaacctccaatcaggtagaccagttcggcggttataccggaatgacgcccgccgattttcgcggctttgtttgtcagctcgccgactcgttgaatttcccgcaggatgcgttgattctgggtggtgaccatctggggccaaaccgctggcaaaacctgccggccgctcaggcaatggccaatgccgatgatttgattaaaagctacgttgcggcaggattcaaaaaaatccaccttgattgcagcatgtcctgtcaggacgatccgattcccttaactgatgacatcgtggctgaacgcgccgcccgtctggcgaaagtggcggaagaaacctgtcttgaacactttggcgaagccgatctggagtatgtcattggtaccgaagtgccggtacctggcggcgcgcatgaaaccttaagcgagctggcggtcaccacgccggatgccgcccgcgccacgctggaagcccatcgtcacgcctttgaaaagcaaggtttgaatgccatctggccacgcatcattgccctggtggttcaacccggcgtcgaattcgatcacaccaacgttattgattatcagcccgccaaagcgagcgccttaagccagatggtcgaaaactacgaaacgctgattttcgaagcgcactctaccgattatcaaacgccgcaatcgctgcgccagctggtgattgaccactttgccattctgaaagttggcccagcgctgaccttcgccctgcgtgaagctctgttctctctggcggcgattgaagaagaactggtgccagcgaaagcctgttctggtctgcgtcaggtgctggaagacgtgatgctcgaccgcccggaatactggcaaagccactaccacggtgacggcaacgcgcgtcgtctggcgcgtggttatagctactcggatcgcgtgcgctattactggccggacagccagattgatgacgctttcgctcatctggtacgtaatctggcggattcaccaattccgctgccgctgatcagccagtatctgccgctgcagtacgtgaaagttcgctccggcgagctgcagccaacgccacgggaactcattatcaaccatattcaggacatcctggcgcagtaccacacagcctgtgaaggccaataagcaaaacaaagaggaacacgctatgccaaatattgttttaagccggattgatgaacgcttgattcacggtcaggtcggcgttcaatgggtcggatttgcgggggcaaatctggtgctggtagccaacgatgaggttgccgaagatccggtacaacaaaacctgatggaaatggtactggcagaagggatcgccgtacgtttctggacgctgcaaaaagttatcgacaacattcatcgcgccgccgatcgacagaaaatcctgctggtttgtaaaacacccgccgatttcctgacgctggtgaaaggtggcgttccggtgaatcgcattaacgttggcaatatgcactacgccaatggcaaacaacaaatcgccaaaacggtttctgtggatgcgggcgatatcgcagcatttaacgacctgaaagccgctggggtggaatgcttcgttcagggcgtcccgacagagcctgctgtggacctctttaaattactttgagggattcatcatggaaatcagcctgttgcaggcatttgcgttgggcattatcgcctttatcgctggcctggatatgtttaacggcctaacccatatgcaccgcccggtggtcctcggcccgttggtcgggctggtacttggcgatctgcataccggaattttaaccggcggtacgctggaactggtgtggatggggctggccccactggcgggcgcacagccgcctaacgtgattatcggtactatcgtcggcacggcgtttgccattactactggcgtgaaacccgatgtcgcagtcggtgtcgccgtacctttcgctgtcgcagtacagatggggattaccttcctgttctcggtgatgtccggcgtgatgtctcgctgcgaccggatggcggagaacgccgatactcgcggcattgaacgcgtgaactatctggcactgctggcactcggcactttctattttctctgcgctttcctgcctatctacttcggcgcggaacatgcaaaaaccatcattgatgtcctgccgcaacgattaatcgacggcctcggcgtcgcgggcggcatcatgccagcaatcggttttgccgtgctgctgaaaatcatgatgaaaaacgtctacatcccctacttcatcctgggctttgttgccgccgcctggctcaagttaccagtgctggctattgctgccgctgcgctggcgatggcgctgatcgacttgctgcgtaaatctcctgaaccgactcaacctgcggcacagaaagaggaatttgaagatggcatctaatcaaaccaccctgccgaacgtcagtgaaaacgaagaaacattgctgactggcgtcaatgaaaacgtgtatgaagatcagagcattggcgcggagctgacgaaaaaagatatcaaccgcgtcgcctggcgttccatgctgttacaagcgtcttttaactacgaacgtatgcaggcttctggctggttgtacggtctgctgcctgctctgaaaaagatccacactaataaacgcgacctggcgcgcgccatgaaggggcatatgggtttcttcaatacccatccgtttctggtgacgtttgttatcggcattatccttgcgatggagcgttctaagcaggacgttaacagtattcagagcaccaaaattgccgtcggtgcgccgctcggcgggattggtgatgcgatgttctggctgacgctactgccgatttgtggcgggataggcgcaagccttgcgctacaaggctctattcttggcgcagtcgtctttattgtgctgttcaacgtggtacacctggggctgcgttttggtctggcgcattatgcttaccgcatgggcgtggcggcgattccactcattaaagcgaataccaaaaaagtcggccatgctgcgtctatcgttgggatgacggtaatcggcgcgctggtggcaacctatgttcgtttaagcaccacgctggaaatcacagcgggcgacgcagtggttaagttacaggctgatgttatcgacaaactgatgcctgccttcttaccgctggtctacaccctgaccatgttctggctggtacgccgcggctggagtccgctgcgcctgattgcagttaccgtggttctcggcatcgtcggtaaattctgccatttcctttaaatacaatgaggtattagatgttaagtattattttgacagggcatggcgggtttgccagtggcatggaaaaagcaatgaagcaaatcctcggcgatcaatcgcagtttattgccatcgattttcccgaaacctcaagcaccgcgctgcttacatcgcagcttgaagaggccatcgcccaactggattgtgaagacggcattgtttttctgacggatttgctgggcggcacgccgtttcgcgtagcttcaacgctggcgatgcaaaaaccgggctgtgaagtgatcaccggcaccaatttgcaactgctactggagatggtgctggagcgcgaagggttaagcggtgaagagttccgtgtgcaggcgctggagtgtggacatcgtgggctgaccagtctggtagacgagttaggccgctgccatgaagaatgtccggtcgaggaaggaatatgacacccgttctgcgcgccagaaggctgctgactgaagagggatggctcgatgaccatcagttgcgtattgctgacggtgtcatcgcagcaatcgaaccgattccagtgggcgtgactgaacgcgatgcggaactgctctgccccgcttacatcgacacccatgtacatggtggtgcgggcgttgatgtaatggatgacgcgccggatgtactcgacaagctggcaatgcacaaggcacgcgaaggtgtcggcagttggttgccgactaccgtaaccgcgccgcttaataccattcatgcggcgctgaaacgtattgctcaacgttgccaacgcggcggacctggtgcgcaagtgctggggagttatctcgaaggaccgtacttcacgccgcagaataaaggcgcgcatccgccggagttgtttcgcgagcttgaaattgccgagctggatcaattgattgccgtttctcagcacaccttacgcgtggtagcgctggcaccggaaaaagaaggggcattgcaggccatccgccatcttaaacagcaaaacgtaagggtgatgctggggcatagcgcggcgacctggcaacaaacccgcgccgcgtttgatgctggtgccgacggcctggtgcattgctataacgggatgacaggtttacatcaccgcgaaccgggaatggttggcgcgggattaacggacaagcgcgcctggctggaactgatagccgatggtcatcatgtgcatccggcggcgatgtcgctgtgttgttgctgtgcgaaagagagaatcgtactgatcaccgacgcgatgcaggcagctgggatgccggatggtcgctatacgttatgtggcgaagaagtgcagatgcatggtggcgttgtccgtaccgcgtccggtgggctggcgggcagtacgctatctgtcgatgcagcagtgcgcaacatggtcgagttaacgggcgtaacgcctgcggaagccatccatatggcatcgctgcatccggcgcgaatgctgggtgttgatggtgttctgggatcgcttaaaccgggcaaacgcgccagcgtcgttgcgctggatagcgggctacatgtgcaacaaatctggattcagggtcaattagctttgttttgatggtttgctccattattgggccttcacttccctcgtaaggcctttctttttctttctttttgatctgtgcagcggtgtcggatgcgacgctaacgcgtctgatccgacctacggtacgccgcatccggcaatcggtgaacatagcgacgtcattacgcaattctttaatcttcccttgtcttttctttcaacgatcacagatttcgttttatttcctttttctccattgaactttcggtttcttttctatagattataatcaacgaaagacatcaccaagtgaaatgaaacgaaaggcaagtgaaagcgacaacgcccgacgtcaagttcatcagactaaggattgagttatgccagaaaattacacccctgctgccgccgcaaccggtacatggactgaagaagagatccgccatcagcctcgcgcatggatccgttcactcaccaacatcgacgcgctacgttccgcgctcaataacttccttgaaccgttactgcgcaaagagaatcttcggatcatcctgaccggagccggaacgtcggcatttatcggtgacatcatcgcgccgtggctcgccagccataccggtaaaaacttcagcgccgtaccgaccaccgatctggtcaccaatccgatggactacctgaatccagctcatccgctgctgttgatctccttcggtcgatccggcaacagcccggaaagcgtcgccgccgtggaactggcaaatcaatttgtacccgagtgctatcacctgccgatcacctgcaacgaagcgggcgctctttaccaaaacgcgatcaacagcgacaacgcgtttgccctgctgatgcccgcagaaacgcacgatcgcggctttgcgatgaccagcagcattaccaccatgatggccagctgcctcgcggttttcgcacctgagacgatcaacagccaaaccttccgcgacgtggcggatcgttgccaggcgatcctgacctcattgggcgatttcagcgaaggtgtgtttggttacgcaccgtggaaacggatcgtttatctcggcagcggtggcttacagggcgcagcacgcgagtcggcgctgaaagtgctggaactgactgcgggtaaactggcggccttttatgattccccgaccggattccgtcatggcccgaaatcactggtcgataacgaaacgctggtggtggtatttgtctcaagccacccttacacccgtcagtatgatcttgatctgctggctgaactccgccgtgacaaccaggcaatgcgcgtaatcgccatcgccgcggaaagcacagacatcgttgctgccggtccacatattatcctgccgccgtcacgtcactttatcgacgttgagcaggcattttgcttcctgatgtacgcccagacgtttgcactgatgcagtcgctgcacatgggcaatacgccggataccccatcagccagtggcaccgttaaccgcgtggtgcaaggcgtaatcattcatccgtggcaggcataagaggatcgcattatgagcattatctccaccaaatatctgttacaggacgcccaggccaatggctacgcggtgcctgcctttaacattcataacgccgagacgatccaggcgatcctcgaagtgtgcagtgaaatgcgatcgccggtgatcctcgccggaacgccggggacctttaaacacatagcgctggaagagatctacgccctgtgtagcgcctattccacaacctacaacatgccactggcgctgcatctcgaccaccacgaatcgctggatgatattcgccgtaaagtccacgcaggcgtgcgcagtgcgatgatcgacggcagccacttcccgtttgccgagaacgtaaagctggtgaaatcggttgtcgacttctgtcactcccaggattgcagcgtggaagcagaactgggccgcctgggcggtgttgaagatgacatgagcgttgacgccgaaagtgcattcctgaccgatccacaagaagctaaacgctttgtcgagctgactggcgtcgacagcctggcggtagcgattggtacggcgcacggcttatacagcaaaacgccgaagattgatttccagcggctggcggaaattcgtgaagtggtggatgttcctctggtgctgcatggtgccagcgatgttccggatgaatttgtccgtcgtactattgaacttggcgtcacaaaagtgaacgttgccacagaattaaaaatagccttcgctggcgcggttaaagcctggtttgcggaaaatccgcagggtaatgatcctcgttattatatgcgcgtcggaatggatgcgatgaaagaagttgtcagaaataaaattaatgtctgtggttcagcgaatcgaatttcagcataatcattagttttttatgatttatcccaatgtacttcccgattaatatcggggagtgccttaatggaaaaggagataactaaaccttaataaatacatcagtacaatatcgcaacaataatatatttaaaaaaattatattattcaactttatggtgaggattacacaatgagcagtccaaatattctcttaacccgtattgataaccgtctggttcacggtcaggttggcgtgacctggacatccaccatcggtgcaaatctgctggtagtcgtggatgatgttgtcgctaacgatgatattcaacagaaattaatgggtattacagcggaaacctacggctttggcattcgtttctttactatcgaaaaaaccattaacgtcatcggcaaagctgcaccacatcagaagatcttcctgatttgccgtacgccacaaacggtacgtaaattggtagaaggtggtattgacctgaaagatgtcaacgtcggcaatatgcatttctcggaagggaaaaagcaaatcagcagtaaagtttatgtcgatgaccaggatctcgcggacttacgttttattaaacaacgtggcgtgaatgttttcattcaggacgtccctggcgatcaaaaagaacaaatccctgactaaatctaaaatcgccttaatattggtttgaggtaataaaaatgcatgaaataaccctacttcagggattatccctggcggcgttagtttttgttctggggattgatttttggctggaagccttatttttattccgcccgataatcgtttgtaccctaactggcgctattctcggtgatattcagactggcttaattaccggtggtctgacagagttggctttcgccggattaacccctgcaggtggtgttcagccgcccaacccgattatggcgggtctgatgaccaccgtcattgcatggtctacgggcgttgatgccaaaacagcaattggtcttggcctgccgtttagtttgttaatgcagtacgtcattctgttcttctattccgctttctcattatttatgaccaaagccgataaatgcgcgaaagaggcggatacggcagcgttttcccggcttaactggacaacgatgctcatcgtcgcttcagcgtatgcggtgattgctttcctctgtacttacctggcacagggggcgatgcaggcgctggtgaaagcgatgcccgcctggctgacccacggctttgaagtggctggcggtattctgcctgccgttggttttggcttgctgctgcgcgtaatgttcaaagcgcaatatatcccttacctgatcgccggtttcctgtttgtttgctacatccaggtcagcaacctgttgccggttgccgtactgggcgcaggctttgcggtgtatgagtttttcaatgcgaaatcccggcagcaagcgcaaccgcagcccgttaccagtaaaaatgaagaagaggactacagcaatgggatctgaaatcagtaaaaaagatatcacccgtctgggctttcgttcgtcgctgctgcaagcgagctttaactacgaaaggatgcaggcgggcggttttacctgggcgatgttgccgatcctgaaaaagatttataaggacgacaaaccgggcttaagcgcggcgatgaaagataacctcgaatttattaatacccacccgaatctggtcggattcctgatggggttattaatttcgatggaagaaaaaggagaaaaccgcgacaccattaaaggcctcaaagtggcactgtttggcccaatcgccgggattggcgatgcgattttctggtttactttgttgccgattatggcgggaatttgctcatcatttgccagccagggaaacctgctggggccgattctatttttcgccgtttacctgcttatctttttcctgcgcgtcggctggacccacgtcggttattcagtcggcgtgaaggcgatcgataaagtgcgagagaactcgcagatgattgcccgttcggcaaccatcctcgggatcacggtaatcggcgggctgatcgcttcgtatgtgcatattaacgtggtgacatcgtttgccatcgacaatacccacagcgttgcgctgcagcaggatttcttcgataaagtcttcccgaacattttaccgatggcctacaccctgctgatgtattacttcctgcgggtgaaaaaagcgcatccggtgctgttaatcggcgtgacttttgtgctctctattgtttgttccgcattcggcattttgtaaatggaacgaggcactgcgtctggtggtgcctctttacttaaggaatttcatcctgtgcaaacccttcagcaagttgaaaactatacggcgttaagtgaacgtgccagcgaatatttattggccgtgatccgtagcaaaccgaatgccgtgatttgcctggcgaccggagccacgccattactgacgtatcattatctggtagaaaaaatccaccagcagcaggttgatgtcagccagttcaccttcgtgaagctcgacgaatgggtggatctgccattaacgatgccaggcacctgcgaaactttcctgcaacagcatatcgtgcagccgctggggctacgtgaagaccagctcatcagctttcgctccgaagagataaatgagacagactgcgaacgggtaacgaacctgattgcgcgcaaaggcggtctggatttatgcgttctcggattggggaaaaacggtcatcttgggctgaacgaaccgggagaaagcctgcaaccggcctgccatatcagtcaacttgatgccagaacacagcaacatgagatgttaaaaaccgcgggtcgccccgtgactcgtgggatcaccttaggcctgaaggatattctcaatgcccgcgaagttttgttactggtgactggcgaaggaaagcaggatgcgacagatcgttttctcacggctaaagtctctaccgctatcccggcttcatttttatggctgcacagtaactttatttgtttaattaacacctaaccagatgaaaaatttgctcaaaatgtttaaattaacttatgtaacagtcacgcattatattaaataacatttgactgggttgaacataacgccgatagcaaaaggagttatgttcaacaatttaattttagatatacatataacttgttctattaataaatcacctcgtattctgactcgccccctggcgcagcaaagtcaggcatttatactcttttgaatacatagaaaattgatatcaatataatgaaaatatcaaatatttgcatataaatataatcttaaagttcagtctatttaatgttcaatgaaatatttctgcctgtataatctttaaagatgttgaacatatattcacattaaatatgattatgtacttgttacaaggataaggttatatatgaataaagttacaaaaacagctattgcgggcttacttgcgcttttcgcaggtaatgccgctgcaaccgatggtgaaatagtttttgatggcgagattttaaaatccgcttgtgaaatcaatgactctgataagaaaattgaagttgctcttggtcactataatgccgaacagtttcgtaatattggcgagcgtagcccaaaaattccattcactattcctttagttaactgcccaatgactgggtgggagcacgataacggcaacgttgaagcgtctttccgtctatggctggaaacgcgagataatggcaccgtccctaacttccctaatctggcaaaagtaggctcttttgctggcatagcggcaacaggtgtgggtatccgtattgacgatgcggaaagcggaaacattatgccactgaatgctatgggcaatgataacacggtttatcagatcccggcggaatccaatggtattgtcaatgttgacctcatcgcttactacgtatcaaccgtagttccatcagaaatcaccccaggggaagcagacgctatcgttaacgtaacgctggattaccgttaatacgttagggcgttatctgacctgtcagataacgcccttttccttcctctttctcgttgtatcaggttgaaaaataactatgtcaaaacgaacattcgcggtgatattaaccttgttgtgtagcttctgtattggccaggcgcttgcaggaggaatcgttttacagcgaacgcgagtgatctatgatgccagccgcaaagaggctgcgttacctgtcgcaaacaaaggcgcagaaacgccttatttactgcaatcatgggtagataatatagatggtaaaagccgtgccccatttattataaccccaccgctatttcgtcttgaggctggcgatgactcatcactgcgaattattaaaacagctgataacctgcctgaaaataaagagtcgctgttctacattaatgttcgtgccattccagcaaagaaaaaatcagatgatgttaatgctaacgagttgacgctggtatttaaaacacggatcaaaatgttttatcgccccgcacacctgaagggacgggtaaacgatgcgtggaaatcactggaatttaaacgtagtgaccattcactcaatatatataacccaactgaatattacgtcgtatttgccggactggcagtcgataaaaccgatctcacaagcaaaattgaatatatcgcgcccggagaacataaacagttaccacttcctgcatctggcggaaagaacgtgaaatgggctgcgatcaatgattatggcggcagttccgggacagaaactcgtccactgcaataaaaaatataaaaacacaggtcatcagggaatgccacaacgacaccaccagggacataaacgcacaccgaaacagttggcgctcatcatcaaacgttgtttgccgatggtgctcactggcagcggcatgctttgcactaccgctaacgccgaagagtattatttcgaccccattatgctggaaaccacaaaaagtggtatgcaaacaaccgatctgtcgcgtttttcaaaaaaatatgcacaactaccaggaacttatcaggttgatatctggctgaataaaaagaaggtttcacagaaaaaaattacatttaccgccaatgcagagcaacttctgcagccacagtttacggtagaacaactacgtgagctgggtattaaagtggatgaaatcccggcgctggctgaaaaagatgacgatagcgtgatcaactcgcttgaacaaatcattcccggtacagctgctgaatttgatttcaatcatcagcaacttaatttgagcattccccaaattgcactgtaccgtgatgcaagaggttacgtctccccttctcgttgggacgatggtataccaacgctgtttaccaactactcgtttacaggttctgataaccgttaccgccagggcaatcgtagccaacgacagtacctgaatatgcaaaatggtgctaattttggcccctggcgattacgcaactattccacatggacacgcaacgatcagacatcaagctggaataccatcagtagttatttacaacgtgatatcaaggcattgaagtctcagttgcttctgggagaaagcgccaccagcggcagtattttttccagctacacctttactggcgtgcaactcgcttccgacgataatatgctgccaaacagccagcgcggatttgccccaacggtacgcggtatcgcaaacagtagtgcaatcgtgactatcaggcaaaatggttatgtgatctatcaaagcaacgtgccagcgggtgcctttgaaattaacgatctctacccctcttccaacagcggcgatttagaagtcactattgaagaaagtgacggtacacaacgtcgctttatccagccttattcttcattacccatgatgcagcgacctgggcatctaaagtatagcgcgaccgctggacgctatcgcgctgatgcaaacagtgatagcaaggaacccgaatttgctgaagccacggcaatatatggtttgaataatacttttacgctgtatggcggcctgctcggttctgaagattattatgcgctgggaatcggtatcggcggcacacttggcgcactgggcgcgttgtcgatggatatcaacagagctgacacccaattcgataaccagcactcttttcatggctatcaatggcgtacgcagtacatcaaagatatcccggaaaccaacaccaatatcgctgtcagctactatcgctataccaacgatggctattttagttttaatgaagccaatacccgcaattgggactataacagtcgccaaaaaagtgaaattcaattcaacatcagccagacaatatttgatggggtaagtctgtatgcctccggttcgcagcaagactattggggcaataacgataaaaacaggaatatctctgttggggtttccggccagcaatggggagttggttacagcctgaattatcaatacagccgctacactgatcaaaataatgaccgcgcactctctttgaatctcagtattccgttagaacgctggttaccgcgtagccgggtttcctatcagatgaccagccagaaagatcgcccaacccaacatgaaatgcgtcttgatggctcactgctggatgatggtcgcctgagctatagcctggaacaaagtctggatgacgataacaaccataacagtagcctgaacgccagttaccgttcaccttatggcaccttcagtgccggatacagctacggtaatgacagcagccaatacaattacggcgttaccggcggcgtggttatccatcctcatggcgtgacgctctcgcaatatctgggcaacgcttttgcgcttatcgatgctaacggagcatctggcgtgaggatacaaaactatccggggattgctaccgatccttttggctatgcagtggttccttatctcacaacttatcaggaaaaccgtctctcggtagatactacgcagctgcccgataacgtcgatcttgaataaacaacacagtttgtggtgcccaacagaggtgcaatggtagcggcgcgtttcaacgccaatatcggttatcgcgtacttgttacagtcagcgatcgcaacggtaaaccgttgccctttggcgctcttgccagcaacgatgatacggggcaacaaagtatcgtcgatgagggcggcatactatatctctctgggatatcgagtaaatcacaaagctggactgtacgctggggaaatcaggcagatcaacaatgtcagtttgcttttagtacaccggattcagaacccacaacctctgtattacaaggcacggcgcagtgccattaaggataaaaaaatgaaaagagcgcctcttataacaggacttttgttgatatccacatcctgcgcttatgcctcctcaggagggtgtggagccgatagcactagcggtgcgacaaattacagcagtgtggttgatgatgttacggtgaaccagacagataacgtgacaggacgggagtttacctctgcaacgctaagtagcactaactggcaatacgcctgttcctgctctgcgggtaaggcagttaaacttgtctatatggtcagccccgtacttaccaccactggacatcagacaggatattacaaactcaatgacagcctggatattaaaaccacattacaggcaaacgacattccaggactcacaaccgaccaggttgtctctgttaacacccgattcacacagataaaaaacaacacggtatattctgctgcaacccaaacgggtgtttgccagggtgatacgtctcgttatggacccgttaatattggtgcgaacaccacctttaccctgtatgtcaccaagccatttctcggctcgatgaccattccgaaaacggatattgccgtcattaaaggcgcgtgggtcgatggaatgggaagcccgtctacaggtgacttccatgatttagtcaagttatcgattcagggaaatctcaccgccccacagtcgtgcaaaattaatcagggcgatgttattaaggttaattttggattcatcaatggtcagaagtttaccacccgcaatgccatgccagacggttttactccagtagactttgatatcacttatgactgtggtgatacttcaaagattaaaaactcgttgcaaatgcgcatcgacggtacaactggggtagtagaccagtacaacctggtcgccaggcgaagaagttcagacaatgtgcccgatgtcggtattcgtattgaaaatctcggcggcggagttgcaaatattccttttcagaacggtatccttcccgttgatccttccgggcatggcaccgtcaatatgcgcgcctggccagttaatctggtcggtggtgagctggaaacaggaaaatttcagggcacagccaccattaccgtcatcgtgcggtaaaagaagacgttgcgttttgattaacgcaacgcttcggcactgttacccctgctgctccagcgcatacttatacagcgcatttttcttcacgccgtgaatttctgcggccagcgccgccgcttttttcagcggcagttctgcctgtagcagcgccagcgtgcgcagggcatcggcgggtaagtcttcttcctgtgctttatgaccttcgacaatcagcaccatttcgcctttgcgacggttttcatcttcctttacccacgccagcagctcgccaacgggcgcgccgtgaatggtttcccaggttttggtcagctcacgcgccagaaccacgtagcgggattcgcctaataccgcaacgatatcttccaggctatctaacagacggtgggtagattcataaaaaatcagcgtgcgcggctccgcttcaatggcttttagcgcatcacggcggccttttgatttggcaggtaaaaagccttcgtaacagaaacggtcagagggtaaacccgctgcgcttaacgcagtgatagcagcacacggcccgggtagcggcaccacgcggatccccgattcacggcaggtacgcaccagatggtagccaggatcgttaattagcggcgttccggcatcggaaaccagcgcaatgttttgcccctcttgcagcttcgccagcagcgtttcagctttttgttgttcgttatggtcgtgcagcgcaaacaaccgggcattaatcccaaaatgttgcagcaataaaccggtgtgacgagtatcctcggcggcaatcagatcaacggcctgtaatacctctaacgcacgctgggtgatatccgccagattgccgattggcgtcggtacaatgtaaagctggccctgagaattatccgccgattggtgttgtttcattgtgtcgtccgtattgccgatttaatattgagcattgcgtaaaaaaaatatcactggatacattatggtaccctcaacattttctcgtttgaaagccgcgcgttgtctgcctgttgttctggcagccctgattttcgccggttgtggcacccatactcccgatcagtccactgcttatatgcagggtacggcgcaggctgattctgccttttatcttcagcagatgcagcaaagctctgatgataccaggatcaactggcaattactcgccattcgtgcactggtgaaagaaggtaaaaccgggcaggcggtggagttgtttaaccaactaccgcaagaactgaacgatgctcagcgccgcgagaaaacactgctggcggtagagattaaactggcgcagaaagattttgctagcgcgcaaaacttgctggcgaaaatcacacctgccgatttagaacaaaaccagcaagcccgttactggcaggcaaaaatcgatgccagccaggggcgtccttccattgatttactgcgcgcgttaattgctcaggaaccgctgctcggcgcgaaagaaaagcagcagaatattgacgccacctggcaggcgctctcctccatgactcaggaacaggcgaatacgctggtgatcaacgccgacgaaaatattctgcaaggctggctggatctgcagcgcgtctggtttgataaccgtaacgatcccgacatgatgaaagccgggatcgccgactggcagaaacgttatccgaacaacccgggcgcgaaaatgctgccaacgcagttggttaacgtaaaagcgtttaaaccagcctcgaccaacaaaatcgccctgctgttgccactgaatggccaggcagcggtatttggtcgcactattcagcaaggctttgaagcggcgaaaaatatcggcactcagccagtggcagctcaggtagctgccgcacctgccgcagacgtagctgaacaacctcagccgcaaaccgtggatggcgttgccagcccggcacaagcctcggttagcgatctgaccggtgaacagcctgcagcccagccggtgcctgtaagcgccccggcgacaagcaccgcagcggtaagcgcacccgcaaatccatccgcagagctgaaaatctacgatacctcatcacaaccacttagccagatcttaagccaggttcagcaggatggcgcgagtattgtggtcggtccgttgctgaaaaataacgttgaagagttgctgaagagcaacactccgctgaacgtactggcactgaaccagccggagaatatcgaaaatcgcgtcaatatttgttacttcgcgctttcaccggaagacgaagcgcgcgatgcagcgcgtcatattcgtgaccagggtaaacaagcgccgctggtgctgatcccacgcagttcattgggcgatcgcgtagccaatgcgtttgcgcaagagtggcagaaactgggcggcggcaccgttctgcaacaaaaatttggttccaccagcgaattacgcgcgggtgttaacggcggttctggtattgctttaacgggtagcccgattactctcagagcgacaaccgactccggcatgacgaccaacaatccaacgctgcaaaccacgccaaccgatgaccagttcaccaataatggcggtcgtgtcgatgcggtgtacattgtggcaacgccgggtgaaatcgcttttatcaaaccgatgatcgccatgcgtaacggtagccagagcggtgcaacgctgtacgccagctcccgcagtgcgcaagggaccgctggcccggatttccgactggagatggaaggcttgcagtacagcgaaatcccgatgctggcaggcggtaatctaccgttaatgcagcaggcactcagcgcggtgaataacgattattcactggctcgcatgtatgcgatgggcgtcgatgcctggtcgctggcaaatcatttctcacaaatgcgccaggttcagggttttgaaatcaacggtaataccggaagcctgacggctaacccggattgcgtgattaacaggaagttatcatggctacagtaccaacaaggtcaggtagtccccgtcagttaaccaccaaacagaccggcgatgcgtgggaagcacaagcgcgtcgctggctggaaggcaaaggactgcggtttatcgccgctaacgtgaacgagcgtggcggcgagatcgatctgataatgcgtgaaggccggaccaccatttttgtcgaggtacgctatcgccgctctgcgctttatggcggcgcggcagccagtgtgacccgcagcaaacaacacaaattattacagactgcccgcttgtggctcgcgcgtcataatgggagttttgatactgtggattgccggttcgatgtggtagccttcaccgggaatgaggttgagtggattaaggatgcctttaatgaccactcataattaaggtttaaggattagcgtgcaagaaagaattaaagcttgcttcactgaaagcattcaaactcaaattgcggcggcagaggcgcttccggatgccatctcccgtgcagccatgacgctggttcagtctctgctcaatggcaacaaaatcctctgttgtggtaatggaacttccgctgccaatgcacagcattttgctgccagcatgatcaaccgtttcgaaacggagcggcccagcttacctgccattgcactaaatactgataatgttgtcttaacggcgattgccaacgatcgcttacatgatgaagtgtatgcaaaacaggtgcgggcgctgggtcatgcgggagatgtattgttagccatttccacccgtggcaacagccgcgatattgtaaaagcggtagaagctgccgttacgcgtgatatgaccattgtggcattgaccggctatgacggcggcgaacttgcaggtttgttagggccacaggatgtggagatccgcattccttcgcatcgtagtgctcgcattcaggaaatgcatatgctgacggtaaattgcctgtgcgatctgatcgataacacgcttttccctcaccaggatgattaaggagaatacatgaaggcattatcgccaatcgcagtccttatttccgcgctgctgttgcaaggttgtgttgccgctgccgtagtgggtaccgctgctgtgggtaccaaagccgcaactgacccacgcagtgtcggcacccaggtggacgatggtaccctggaagtgcgcgtgaacagcgcattgtcgaaagacgaacagattaagaaagaagcgcgcattaatgtaacggcctatcagggcaaagtgctgctggttgggcagtcaccaaatgctgaactttcggctcgcgccaaacagattgctatgggcgtagacggtgccaacgaagtgtataacgagattcgtcagggccagccgattggtctgggcgaagcatctaacgatacgtggatcaccaccaaagtgcgttcgcagctcttaaccagcgacctggtgaaatcgtccaacgtgaaagtgaccaccgaaaacggtgaagtgttcctgatggggctggtgactgaacgtgaagcgaaagcggcggcagatattgccagccgggtgagcggcgtgaagcgggtaactacggcgtttacgtttattaaatagcagccccttgtaatgcctgatgcgacgcttgccgcgtcttatcaggcctacaacgatacaaaccgtaggtcagataaggcgtttacgccgcatccgacatgttttccctcaaatcagaacaacagcgccagcccgccgacaatcacaccagacactgccaccatcgcccctgtcagccataaggctttcgccgggaacgctttgcgcagcataatcagtgacggcaaactcactgccgggagcgtcatcaacaatgccagcgccggagcggttcccatacctgccagcatcatcgtttgtacaatcggaatttctgctgccgtgggaatgacaaacaagcatcctgctaccgccatcgccaccacccacatcaggctgttatcgacagcaccatcggcatgggggaataaccagacgcgagcggcacccaacaccagtactgcaaggatgtaaaccgggatcgtactccagaaaagcgtccatagcgccctgccccagcggctaaaaaacccgccctgtgcttccggtatgtcaatttcgaccggtgcctgcgtttgcggtgtttcacgcacccatttttgcaccagcgtcgcaatcagcaacaccatcaccagcccggccaccagacgaatcgccgcaaaaccccagccgaggacaaagcccataaacaccagcgtcgccgggtttaacaccggattgcccatccagaatgccagcgcaccgcccatcgacacctgttggcgacgcattcccgccgcgaccggagccgcacagcaggtacacatcatgcccggcaacgaaaacagcgttcccagcagcgtgccgcgaaagcgcgattgcccaagcgtacgcaacaaccagtcacgcgggatcagcacctgaatcaacgaaccgaggatcacccccagcaccgccgctttccataccgcgaggaaatagatcatcgcgtaatccaacgccgcctgccatgggttagcatccgcctgcgcaaggatagatttaccaatactgtgggtttcggcagcagtaaacgctttgccgtagtaaggttcccatttcacataccagagaccggcaatgacaacgagaaagaaaagcgcgggtttccaccactgaatgggcgttgccgcctgagatgaagactgaccagtcatagcattccccaggaataagttatgataattgagcgcgtgaatattacgctcactatcaattcttgggaataattattcagctcttttgcgtaattctgaagagcttaaaatcgtcacgccttcatgctcaggccgcatcgactctgccagcatgacccgcgccacgtctctcgcatcaatggatttccagttacctggtaacaaacggaacagcggcgcaaaaagcgtttcgttcatccgctgtttgctacgatcgcccagtaacatcgacgggcgagcaatggtcaatttcggccagttctgggcgattaatgcttcttccatctcccctttgacgcggttatagaaaaacggcgagtgggcattggcacccatcgcactgactaccaacatatgctgcgcgcccagtcgccgcccggttaatgcggtatccactaccagcgtgtaatcggcatgaataaacgcctctttgctccccgcttctcgccgcgtggtgccgagacaacaaaacacaatgtcgatgggatcggtgacctgcgccaacgcgtcactcagttgcggatcatggggattaaacaccccgggcatatcgcccaacggacgtcgcgtcggcgcagcaatggcgttaactttcggttcgttaatcaacatccgcagcaggtgaccgcccaccagccccgttgcgcctgtaatcagtacctgactcatcttcgctcctttacagaattgtctgccttgcgctccacggctcatgcaccaggcttaatagaccatgaggtaattatccccgattgtgggaaattcgcctcatccaatgcaacaacgcggaggaagcatgagtaagaaaattgccgttttaatcactgatgaatttgaggattcagaatttacttcacccgcagacgagttccgtaaagccggacacgaagtgattaccattgaaaaacaagcgggtaaaacggtgaaaggcaaaaaaggagaagccagcgtgaccatcgataaatccatcgatgaagtgacgcctgcggagtttgatgccctgctgctaccgggcggccattcaccggattatctgcgtggggacaaccgttttgtcacctttacccgtgattttgtgaatagtggcaaaccggtgtttgccatctgtcacggcccgcagttgctgatcagcgccgatgtgattcgggggcgcaaactgaccgcagttaaaccgatcattattgatgttaaaaatgcgggcgcggaattttacgatcaggaagtcgtggttgataaagatcagctggttaccagccggacaccggacgatctgccagcgtttaaccgcgaggcgttacgcctgctcggtgcctgagtcgcgtagccaaatcatttttttaccaaagcccagcgtgttgtcggtgaatttgatttcatcgagccggatttcccacaccggggccgacagcattctggcaaccggaaagcgacgattgtacgccttgcgcgcgaggtcgctttcctcaccttccagcctgcggatctcacctttaaactgcacaccgcgaattaacgctaccgttttcggctgaccgtttaccgttccggcaaccgcagcctgcggcccactcatctgcgcgtggcgcgttttttcttccgtcaaaatgtagaaggcgactttctgcgcatcaaaaagataaaaggcattagcgcaccagagttccccttcctgctgcacacaccaagtgacaacatgttgttttgccagccaacggctgatggcgatgagtgtttccattgctgttctcttttatactgtgggcctgaccttaacatgcgacgcagacgatgacaccctggtttctttacttgatccgtaccgccgacaataagctttataccgggatcaccacggatgtcgaacgccgctatcagcagcaccaaagcggcaaaggggcgaaagcactgcgcgggaaaggagaactaacgctggtgttttccgcgccagtgggcgatcgttcgctggcgttacgggcggaatatcgcgttaagcaactgaccaaacggcaaaaagagcgtctggtagcggaaggcgcagggtttgcagagctgttaagcagtctgcaaaccccggagattaaaagcgattgaaatgctcgtgatactcaaccaggccggtaacgccattcagcgcgtcatccgctaaacgatgtacctggaaggcgctttcagtgcccggccagcggcaacgcagatcgtgatgcgccgccagttcaaagccgaaacgactgtacagcgccggatcgcccagcgtcaccactgcggcatagccgaactcattaagcgaatcgagtccttcatagaccagttggcgtgccagcccctgtccacggtatttttcatcaaccgccaacggtgccatgccgacccattgcaggtcttcgccctgcacatcaaccggactaaatgccacatagccaatgacctgaccttcgtcatctgtcgccaccagccccagcgtcagaaagccatcttcacgcagatcgtgaaccagcttcgcttccgcatcactttcgaatgagcgacgcagcagggcatcaatacccggcgcatcaatgggaatttctactcgaattagcatggttcacctaccgatgtctgtttggtttcaggcgcggttttcattcccgcctcaacaaaatccgccagttgcagcagcatcatgcgtaaggctttcggcatttgctccagttcaatggcgtccatcaggtttttcacatacagccccagctccgtatcgccttcaatcaccagccgacgctggaagaagagcgtatccggatcttgtttacgcgccgcaatcatcagcagatcgctggcgtcggcactaaaactcacatcagcttgcgcgttctggctaacgaccagtttgccattcaccaccgaggtaaaccattgcaggtcaatatcacgcacatgaatacttaaccagcggccttcaagaaactccagctcgccatcatccagcgcctggcggaattgccagcttaagacctgctcaagaacctggcgttttagcgcaaatggcgtcagttttaccggtacactcaacagagatggccccaaatgcacaatacgggaacgcagtttatccaacacgagttttactccctgtttcaacaatcatcctattttgccatatcagaaaaataacatagcggtataaatcaacaattccatatgaaattgctgctaccaccaatacaactttaactgccttaaatcaaaaattgtcgcagcaaggttaactaaaatcccagttcgttaacatttttgcgttttgatagcgcaaccttcaggaaaaattatggagctgctctgccctgccggaaatctcccggcgcttaaggcggccatcgaaaacggcgcagatgctgtttatatcgggctaaaagatgataccaatgcccgtcacttcgccggccttaactttaccgagaaaaaattgcaggaagcggtgagttttgtccatcaacatcgccgcaaacttcacatcgcgattaacacttttgcgcatccggacggttacgcccgttggcagcgcgccgtggatatggcggcgcagctgggtgccgacgcgctgatcctcgccgacctcgccatgctggagtacgccgccgagcgttatccgcatattgagcgccacgtatcggtgcaggcttcggcgaccaatgaagaggcgattaacttttatcatcgccattttgacgttgctcgcgtggtgctgccgcgcgtgttgtcgattcatcaggtgaaacaactggcacgggtcacacctgtaccactggaagtctttgctttcggcagcctgtgcattatgtcggaaggtcgttgctatctgtcgtcgtatctgacgggtgagtcgcccaacaccataggcgcgtgttctccggcccgtttcgtgcgctggcaacaaacgccgcaggggctggaatcccgcctgaacgaagtgctgatcgaccgttatcaggacggcgaaaacgcaggttatccgacgctatgtaaagggcgttatctggtggacggcgagcgctatcacgcgctggaagaaccaaccagtctcaataccctggaactgctgccggagttaatggcggcgaatattgcttcggtgaaaattgaaggccgccagcgtagcccggcgtatgtcagccaggtggcgaaagtctggcgtcaggctatcgaccgttgtaaggccgatccgcaaaactttgtaccgcaaagcgcgtggatggagacgctcgggtcgatgtccgaaggcacgcaaaccactcttggcgcatatcaccgtaaatggcagtgagaaaagcaatgaaatattccttagggccagtgctgtggtactggccaaaagagacgctggaagaattttatcagcaggccgccaccagcagcgccgacgtgatttatcttggtgaagcggtatgcagcaagcgtcgggcaaccaaagttggcgactggctggagatggcaaaatcgctcgccgggagtggtaagcagattgtgctctccacgctggcgctggtgcaggcatcatctgaactgggcgaactgaaacgctatgttgagaacggtgagtttctgattgaagccagcgatctcggcgtggtgaatatgtgcgctgaacgcaaactgccgttcgtcgccgggcacgcgctgaactgctacaacgcggtgacactgaaaatattgctcaaacagggcatgatgcgctggtgtatgccagtggagctttcccgcgactggctggtgaatctgcttaatcagtgcgatgagctgggcattcgtaaccagtttgaagtggaagtcctgagctacggtcatctgccgctggcctactccgcccgctgctttaccgcgcgttcggaagaccgcccgaaagatgagtgtgaaacctgctgcattaagtatccgaacgggcgcaacgtgctgtcgcaggaaaaccaacaagtgtttgtactcaatggcattcagaccatgagcggctacgtttacaacctcggtaacgagctggcatccatgcagggcctggttgatgtggtccgcctgtcaccgcagggtactgacactttcgcgatgctcgacgccttccgcgctaatgaaaatggcgctgcaccactgccgttgacggcgaacagcgactgtaacggctactggcggcggctggcaggactggagctgcaagcctaagtaaatagctcactttgttaacaactttaactactctttaatgcagtattaaagattaatcggtaacaaagtgagctgttatgactgataaaaccattgcgttttcgctactcgatctggcccccattcccgaaggttcttcagcgcgagaagcattctcccactctctcgatctcgcccgtctggctgaaaagcgcggctatcatcgctactggctggcagaacaccacaatatgactggcattgccagtgctgccacgtcggtattgatcggctatctggcggcgaataccaccacgctgcatctggggtctggcggcgtgatgttgcctaaccactcaccgttggtcattgcagaacagttcggcacgcttaatacactctatccggggcgaatcgatttggggctgggtcgtgctccgggtagtgaccaacggacaatgatggcgctacgtcgtcatatgagcggcgatattgataatttcccccgcgatgtggcggagctggtggactggtttgacgcccgcgatcccaatccgcatgtgcgcccggtaccaggctatggcgagaaaatccccgtgtggttgttaggctccagcctttacagcgcgcaactggcggcgcagcttggtctgccgtttgcgtttgcctcacacttcgcgccggatatgctgttccaggcgctgcatctttatcgcagcaacttcaaaccgtcagcacggctggaaaaaccatacgcgatggtgtgcatcaatattatcgccgccgacagcaaccgcgacgctgaatttctgtttacctcaatgcagcaagcctttgtgaagctgcgccgtggcgaaaccgggcaactgccgccgccgattcaaaatatggatcagttctggtcaccgtctgagcagtatggcgtgcagcaggcgctgagtatgtcgttggtaggtgataaagcgaaagtgcgtcatggcttgcagtcgatcctgcgcgaaaccgacgccgatgagattatggtcaacgggcagattttcgaccaccaggcgcggctgcattcgtttgagctggcgatggatgttaaggaagagttgttgggatagtgtgtcttaacgcgggaagccttatccgagctggcaacgctgtcctacatagacctgataagcgaagcgcatcaggcattgtgtaggcagcagaaatgtcggataaggcaccgctgattactgatacaccggcagtaaattaaagctcgataaaatatgcaccagtgcgttgccgacgccaaacaccagaatcagcgcaatcatcggcttgccaccccagacgcggaatttcgggctgccaaagcgtttacgcgatgcacgggctaacagcgccggaacaattgccgcccagatggtagccgctaaaccagcataaccaatggcgtacaggaatccgttcgggaacaacagcccccccacaactggcggggcaaaggtcagcaatgccgttttcaagcggcccacagccgagtcgtcgaaaccaaacagatctgccagatagtcaaacaaacccagcgttacgccgaggaacgaactcgctaccgcaaagtttgagaacacgaccagcagcagatccagactacggctgttcagtacgccgcttaacgcctgtaccagcacatcaatattaccgcccttctctgcaataccgataaactccggacgcgggatgttacccatcgtcgccagcaaccagatggtatacagcgccagcgccatcagcgtaccgtacaccagacatttcacgatggttttcggatctttgccgtaatacttcatcaggcttggcacgttaccgtgataaccaaacgatgccagacagaacggcagggtcatcaacagatacggtgcataagacgcattgctttcggcgacgttgaacaatgtcgcaggctgcacatgccccagcaggctaccaaaggtgaggaagaaggtaatgactttcgcccccagcacaatcgctgtcatgcgactgacggctttagtgctcaaccacaccacaaacgctaccagcaatgcaaaaccaaaacccgccgcccgtgccgggacgtttagtgacatctctgcgaaggtgtgatgcagaatcgaaccactggcagaaatataggcataggtcaggatatagagcacaaaggcaatggaaatgccgttgaccacgttccagcctttgcccagcaaatctttggtgatggtgtcaaaactcgaaccgattctgtaattcaggttagcttccagaatcatcaagccggaatgcagcatacagaaccaggtaaagatcagcgccgccattgaccagaaaaaccacgccccggacatgaccactggcagagaaaacatccctgcgccaataatggtgccgccgataatcaccacgccgccaagcagcgacggtgacgtttgggtggtggttagtgttgccatgagggcttctctccagtgaaaaatagtgcgactgcgttgttatgcattgcactgtaccagtacacgagtacaaaagacagaaaaaaagccccgatggtaaaaatcggggctgtatatattattttacagattgtgttcgctgttcagcgatgattacgcatcaccaccgaaacgacgacgaccggtagaatcatcacgacgcggagcgcggccttcacgacgttcgccgctaaaacgacgaccatcaccacggccaccttcacggcgttcaccgctgaagttacgaccgccttcacgacgttcgccaccgaaaccacgaccaccgccacgacgctcaccgccagtatgcggctgtgcatcgcccagtaactgcatgttcatcggcttgttgagaatgcgagtgcgcgtaaagtgttgcagcacttcacccggcatacctttcggcagttcgatggtggagtgagaagcaaacagcttgatgttaccaatgtaacggctgctgatgtcgccttcgttagcaatcgcaccaacgatatgacgaacttcaacaccatcatcgcggcccacttcaatgcggtacagctgcatatcgccaacatcacgacgttcacgacgcggacgatcttcacggtcaccacgcgggccacggtcgttacgatcgcgcggaccacggtcatcacggtcacggaattcacgtttcggacgcatcggcgcatctggcggtacgatcagagtacgttcaccctgtgccattttcagcagtgccgcagccagagtttcgagatccagctcttcaccttcagcagtcggctgaattttgctcagcagtgcgcggtattgatccagatcgctgctttccagctgctgctgtactttagcggcgaatttttccagacggcgtttgcctagcagttctgcgttcggcagttctacttccggaatagtcagcttcatagtacgttcaatgttgcgcagcagacgacgctcgcggttctcaacgaacagcagcgcgcggccagcacgacccgcacgaccggtacgaccgatacggtgaacgtaagactcagaatccatcgggatatcgtagttaactaccaggctgatacgctcaacgtccaggccacgggctgcaacgtcggtcgcaatcaggatgtccagacgaccatctttcaggcgttccagtgtctgttcacgcagcgcctggttcatgtcaccgttcagcgcggcgctgttgtagccgttacgctcaagagcttcagccacttccagagtcgcgtttttggtacgaacgaagataatcgccgcatcaaaatcttccgcttccaggaaacgtaccagtgcttcgtttttgcgcataccccagacagtccagtagctctggctgatgtcaggacgggtagtcacgctggactgaatgcgcacttcctgcggctctttcataaagtggcgggtaatgcgacgaatcgcttccggcatggttgcagagaacagagcggtctgatgaccttccgggatctgcgccataatggtttcaacgtcttcgatgaagcccatgcgcagcatttcgtcagcttcatccagaaccagaccgctcagtttagagaggtccagagtgccacgtttcaggtggtccagcagacggcccggagtaccgacaacgatctgcggcccctgacgcagggcgcgtaattgcacgtcataacgctggccgccgtacagagcaaccacatttacgccgcgcatgtgtttagagaaatccgtcattgcttcagcaacctgtaccgccagttcgcgggtcggtgccagcaccagaatctgtggtgctttcagctcaggatcaagattctgcaacagaggtaaagagaatgctgcagtttttccgctccccgtctgggccatacccagaacgtcgcggccattcagcagatgtggaatacactctgcctgaattggagatggtttttcgtaacccagatcgttaagggcttcaaggataggagccttcaggcccagatctgcaaaagtggtttcgaattcagccatgtagtacgtgtgcctcaaaattaatggcggccagtctacataactcatcatgaaattgatcagcaattttcattgaaaagtgtgaaccggctcaaagtaggtgtattaacgaacaacaacgccctcacccgttaaggtgatggcaatcaaaaaagattacgggctgatgtgtacgtcagctattgctggtccgattctgccaggtcatcttggtcctggcccaggagcgataattccaacaatgcgtatcggtgctcaacaaagttatgaacgttgttggcaaccgccagtttgaacagtgccgtggcgctgtccaaatcccccagacttaggtagtacttacctaaatagaagttggtttcactgagatgctcagcgagcgaggtgttatccgttgcgtccgccttgagcctttccattaacgtttgttcgctaatgttgcccaggtagaactcgacaatgttccatccccactgttccttatccgatttttcgaagtgctgtttcaacacttctttagcctgcttctcatcgagcttctgctcggcgagataaagccacagactacggaaaggatcattgggatcgtcttgataaaacgccagcagatcatcttgcgctaacttgtcacgaccgccgtaatataatgcgatcccgcgattcaagtgcgcgtagttgtaagttggatcaagctcaagtacagaatcaaacgcttcataggcagcatcaaaattgcctgcctgcgttaaatatatgcctaagtaattgaatacttcaggcatatccggtcggattgccagcgcttgcgaaaaatcgttacgcgctaatgccctcagaccgagactatcatacaacactccgcgctcatataaaagctgtgcgcgttcgtcatcggttaaagcccgactggcaaggatttgttccatacgtgccagaatcacttcctgctgtaaagtcggttgcaatggtaccgcgaggacttcacttttacgccaggaagtattactgcatcctgcaagcgtaagtgctgtcgcaacgaaacaccagcgcaaaaaaggcttcatttcccactcccgaagaccacggttgaatgaacgtcctgttcccggttgctaacaaggcgtcctgcccggttaaaagccccccgccgcagcggagggcaaatggcaaccttactcgccctgttcagcagccggagcttccggtgctgcagcaggttgagactgctcagtcgcttctttaatgctcagacggatacggccctggcgatcaacttccagaactttcaccggtacttcctgacccatctgcaggtaatcggtcactttctcaacgcgtttgtcagcgatttgagagatgtggaccagaccttctttaccgccgccgatggcaacaaatgcgccaaagtcaacgatacgggtcactttaccagtgtagacgcggcccacttcgatttctgcagtgatctcttcgatacgacgaatagcatgtttcgctttctcgccgtcggtcgctgcaatcttcacagtaccgtcatcttcgatttcgatggtggtgccagtttcttcggtcagagcacggattacagaaccgcctttaccgataacatctttgatcttgtccgggttgatcttgatggtatggatacgcggtgcgaactcagagatatcgccacgcggcgcgttgatcgcctgttccattacgcccaggatatgcagacgcgcacctttagcctggttcagcgcaacctgcatgatctctttggtgataccttcaattttgatatccatctgcagtgcagagataccgtcgcgggaacctgcaactttgaagtccatatcgcccaggtgatcttcgtcgcccaaaatgtcagacagtacaacgtagttgtcgccttctttcaccagacccattgcgatacccgcaacggcagctttgatcggcacacctgcgtccatcagcgccagagacgcgccgcacacggaagccatagaagaggaaccgttggattcagtgatttcagacacaacacgtacggtgtacgggaatttgtccatatccggcatgactgccagcacgccgcgcttcgccagacgaccgtgaccaatttcacgacgcttcggagaaccgaccatgccggtttcgcctacggagtacggagggaagttgtagtggaacaggaaggtatcggtacgttcgcccatcagttcatcaagaacctgcgcgtcacgagcagtacccagcgttgcggtaaccagcgcctgcgtttcaccacgggtgaacagcgcagaaccgtgagtacgcggcagcacgccagtacgcacatccagaccacggatcatatctttttcacgaccgtcgatacgcggttcgcctgccagtacgcggctacgaacaacgtttttctcgatcgcgtgcagaatttcacccagttcgttttcgtccagggtttcgtcttcagcaagcagcgtcgcgatggtttcagatttgatgacatcaacctgcgcataacgctcttgtttgtcggtgatgcggtaagcatcgctcaggcgagcttcagccagtgcagcaacgcgcgcgtttagcgcttcgtttaccggctccggctgccagtcccaacgcggtttaccggcttctttcaccagttcattgatgttctgaataacaacctgctgttgttcatgaccgaacactactgcgcccagcatctggtcttcgctcagcagttgagcttcagattcaaccatcagtacagcggcttcagtaccggcaacaaccagatccagtttgctctctttcagctcgtcctgagtcgggttcagtacgtactggtcattgatgtaacctacgcgggcagcaccaatcgggccattgaacggaataccagacagagacagcgctgcggaagcaccaatcatcgcgacgatatccgggttaacttgcgggttaacagaaaccacggtggcgataacctgaacttcgttgacgaagccttccgggaacagcgggcgaatcgggcggtcaatcagacgcgcgatcagggtttcgccttcgcttgggcggccttcacgacggaagaagctacccgggatacgaccagcagcgtaggtacgctcctgatagttaacggtcagtgggaagaagtcctgacctggtttggcttttttctggccaacaacggtaacgaataccgcggtgtcatccatgctaaccataacagcggcagtagcctgacgagccatcatgccggtttccagagtcacggtgtgttggccgtactggaatttacgaacgatcggattaagcaatgtaatatcctttctctttcttagacagtaccttacggcactggtgttaatacccgatcttctgcgcatcctcgcgactaatgacaaccctaacccagctctatgtgggtaaagcctctcattagccgcgcgaacctctgcaacggaagatcattcatagcaacaatacattagtttccagtgaattgctgccgtcagcttgaaaaaaggggccactcaggcccccttttctgaaactcgcaagaattagcgacgcagacccaggcgctcgatgagctgggtgtaacgtgctacgtctttacgtttcaggtagtcgagcagtttacgacgctgagaaaccatgcgcagcagaccacgacggctgtggtgatcttttttgtgctctgcaaagtggccctgcaggtggttgatctgtgcagtcagcagtgctacctgaacttcggtagaaccggtgtcgtttgcgtcacgaccaaactcagaaacgattttagctgttgcttcagtacttagagacattttaaaactccaaagtatatagaatgaaaggacgccgatctctaattcagcgatcccagtgtacgttacgcaaagtgttaaacaatttacgcgacgttaagcggcagtattctactcgtagcgacctgttatcgcaagacggttaacattacgccgggtattcaaccaccaggcgacgaggcgcaacgcggccttcatcgtcaatttcgcccataccgataaatttgccgttctcaccttccgtgacgcgaaccagtccttccagtggcgcaccagatgtacgaaccgggttaccatttttgaagtaaacagaagacgttaacggaagattcaccaccggatagtccgaagctggactgtccattggcatcagtaatggatcaagtaactccgcggctggaatatcctgctgttcagcttgctcaacaagttcacgcaggtgctccagggtcaccatccgttcaaccggatatttacttaccgccagacggcgcaggtaaataacatgcgcgccacagccgagtttttcacccaggtcatcaatgatggtgcggatataagtgccttttgagcagtgaatttccagctccagctcattgccttcatggcgaataaacagcaattcataaacggtaatcggacgcgcttcacgcggaacttcaatgccctgacgcgcatattcgtacagttttttgccctgatatttcagtgctgaatacatcgaagggatctgttcgatatcgccacggaaagtatccagtgccgctgccagctgctctgcgctaaaggttaccggacgttcttcaacgatctgtccgtcggcatcagaagtatcggtacgctgtccaagacgcgcaatgacccgatagcgtttgtcggagtccagcagatactgggaaaacttcgtcgcttccccgaggcaaatcggcaacatgccggtcgccagcgggtccagcgcaccggtatgcccggcacggttggcgttatatatacgtttcactttttgcagcgcatcgttgctggacataccctgaggtttatccagcaacaaaacgccgttaatgtcgcgaccgcgacgacgaggacgactcattagtcctccttgctgtcgtccgggttaacacgacgttcttcgtcatgtttgaccacgctggtcaccaggtttgacatgcgcatcccttcaaccagagagttgtcgtagaagaaggtcagttccggcacgatacgcaggcgcatcgctttccccagcaggctgcggatgaaaccagaagcttcttgcaacgctttgatgcccgctttaaccgcgtcttcatctttgtcgttgaggaacgtcacatatactttggcatacgccaggtcgcgagacatttcgacaccggaaacggtggtcatcatgcccaggcgaggatctttaatttcacgctgcaggatgagagcgatctctttttgcatttcctgcgctacgcgctgcgggcgaccaaattctttcgccataataaattctcctgacaaaaaaggggctgttagcccctttttaaaattaatttcaggtggaagggctgttcacgttgacctgataagacgcgccagcgtcacatcaggcaatccatgccggatgcagcgtaaacgccttatcccgcatggaaccctaaaaaccttaagcaatggtacgttggatctcgatgatttcgaatacttcgatcacatcgccagtgcggacgtcgttgtagttcttaacgccgataccacattccataccgttacggacttcgttaacgtcatctttgaagcggcgcagggactccagctcgccttcgtagataaccacgttgtcacgcagaacgcggatcgggttgtgacgtttaaccacaccttcggtaaccatacagcctgcgatggcaccaaatttcggcgatttgaacacgtcacgaacttccgccagaccgataatctgctgtttcagttccggagacagcataccgctcatcgccgctttcacttcgtcaatcaggttatagatgacggagtagtaacgcagatccaggctttccgcttcaatcactttacgtgcagaggcatcagcacgtacgttaaagccaaccaggatggcgttggacgccgcagccagggtggcgtcggtttcggtgataccacctacgccagaaccgatgatcttcactttaacttcgtcagtagacagtttcagcaaggagtcggagatcgcttcgacagaaccctgtacgtctgccttcaggacgatattcacttcgtgaacttcgccttcggtcatgttggcgaacatgttctcgagtttagatttctgctgacgcgccagtttaacttcgcggaatttaccctgacgatagagtgcaacttcacgcgctttcttctcgtcacgtacaacggtaacttcatcacccgcagccggtacgccggacaggccgaggatttccaccggaatggacggacccgcttccagcacttcctgacccagttcgttacgcatcgcacgaacacgaccgtattcgaagccacacagaacgatatcgcccttgtgcagagtaccttcacgtaccagaacggtagcaaccggaccacgacctttatcgaggaaggattcgataaccgcaccgctcgccatacctttacgtaccgctttcagctccagaacttccgcctgcagcaggatagcgtccagcagttcatcgataccggtacccgctttcgcagatacgtgtacgaactggctttcaccgccccactcttccggcaggatgccgtactgggagagttcgttcttaacgcgatccggatcagcttctggtttatcgatcttgttcactgcaaccaccaccggtacctgcgccgctttcgcgtgctggattgcttcgatggtctgcggcatcacaccgtcgtcggcagcaacaaccaggactacgatgtccgttgcctgcgcaccacgagcacgcattgaagtaaacgcggcgtgccccggggtgtccaggaaggtgatcatgccgttttcagtttcaacgtggtatgcaccaatgtgctgggtaatgccgcccgcttcgccagaggccactttcgttgaacgaatgtagtccagcagagaggttttaccgtggtcaacgtgacccatgatggtcacaaccggcgcgcgcggttcagccgcagcacccgtgtcacggtcgctcattaccgcctcttccagctcgttttcacgacgcaggataactttatggcccatctcttcagcaaccagctgtgcggtttcctgatcgataacctggttgatggttgccattgcgcccagtttcatcatcgctttgatgacctgagagcctttaaccgccatcttgttcgccagttcgccaacggtgatagtttcgccgatcacaacgtcacggttaacggcctgagcaggcttctggaagccttgctgcagcgaagaacctttacgttttccgcctttaccgccacgtactgctgcgcgtgcttcttcacgatcagcttttgattcagcgtgtttgttgcctttcttcggacgcgctgctttcgcgttacgaccacggccacggccgccttcgacttcacgatcgctttcgtcttctgcctggcgagcatgttgagaagtagtgacgtgataatcgctggaatcttcagtcggttccgcgttatcagtccatttgttttcttccgccatacgacgtgcttcttcagcaacgcgacgtgcttcttcttcgagtttacgacgcgcttcttcttcagctttacgcttgagctctgcagcttcctgctcacggcgggctttttcagcctgggcgtttttagtcatatcgtcttgttgattgctcactttgtctttttccgcagcttcacgtttcgcttgttcagcagcttcacgcttagcttgttctgcggcctcacgttcagctttttgttgcgcctcgcgtttagccgattcttctgcctcacgacgggcttgctcttccgcttcacgctgcgcttgctcttccgctgcaaggcgttcagcctcttgcggatcgcgtttcacaaaggtgcgtttcttgcggacttcgatttgtaccgatttgctttttccaccggtaccaggaatgttaagggtgctgcgtgttttacgttgcagcgtcaatttgtccgggcctgaatttttctgattcaggtggtcaatcaaagtctgtttctcttgtgcagacacagagtcgtcagcagacttccggatacctgcatcagcaaattgctgtaccaggcgttccacggaggtctgtcgctctgcggccagcgttttaatcgttacatctgtcatgctgttccttcctgctacagtttattacgcttcgtcaccgaaccagcaaatattacgggcagccataatcagtgctccggctttttcgtcggtcaacccttcgatatcagccagatcatcaatgccctgttcggcgagatcttccagcgtacaaacgccacgggcggccagtttgaatgccaaatcacgatctaccccttcaaggttcagcagatcgtcagccggtttgttatcaccgaggctttcttcctgggcctgtgcaatggtggccagtgcatttttagcacgctcgcgcagtgcttcaacggtcggctcatcaaggccttcgatttccaacagctctttcatcggcacataggccagttcttccagcgtcgagaagccttcttctaccagaacagtcgcgaagtcttcgtcgatgtcgagatatttggtgaaggtgtcgatcgctgcgtgcgcttccgcctgatgcttagcctgcaggtcgtcaacggtcatcacgttgagttcccaaccgctcagctgcgaagccagacgcacgttctgaccgttacggccaatcgcctgcgccaggttaccggcttcaacggcgatatccatggtgtgtttatcttcatccaccacgatagaagcaacgtctgccggtgccattgcgttaatcacgaactgcgccgggttatcatcccacaggacgatatcgatacgctcgccacccagttcagtagacaccgcctgaacacgcgcgccacgcatacctacgcaagcacctaccggatcgatacgtttatcgttggttttcaccgcgattttcgcacgagaacccgggtcgcgagccgctgctttaatttcaatcacttcttcgccgatttctggcacttcaatacggaacagttcgatcagcatttccggcttggaacgagtgacgaacagttgcgcgccacgcgcttccgggcgaacggaatagagcacgccacgaacgcggtcgccagggcggaagttttcacgcggcagcatatcttcgcgcaggatcacggcttcagcgttgttgcccagatccagagagatgttgtcgcggtttacttttttcaccacgccggtgatgatttcaccttcgtgttcacggaactgatcaaccaccatcgcacgttcggcttcacgcactttctgcacgataacctgttttgccgtctgggtagtgatacggtcaaaggtaacagactcaatctgatcttcaacgtaatcgcccaggttcaggctttcatcttcataacgtgcggcttcaagggtgatttccttggtcggctgggtgacttcatcaacaactaaccagcgacggaaagtgtcaaaatcaccgcttttgcgatcgatctgtacgcggacgtcgatctcttgttcatattttttctttgttgctgtcgccagcgcgctttccaatgcttcgaaaatcttctcgcgaggtagcgccttttcattggatacggcttcaactacagccaaaatttctttgttcatcgcgggcttttcacctcatccagactattaaaagtggggaaccaggttcgccttctggatattactcagcgcgaacacttcatctttaccttcgacggtaactgtgatcatttcaccgtctaccgctttgataacgccctgccatttacgacggttttgtaccgccatacggagaaccagagtcacctcttctccgacaaaacgggcgtagtgttcagccgtgaacagtgggcgatcgagacccggtgaggagacttccaggttataagcaacggtgatgggatcttcaacatccagcacagcacttacctggtggctcacatcagcacaatcatcaacattgatgccatcttcactatcaatatagatgcgcagtgtggatgtgcgaccgcgaataaattcgatgccaaccagttcaaaacccagggcctcaactggcgcagtaatcatctctgttaatttttgctctaatgtggacaagcccacccccaagacataaaaaaagggcctaaagcccagttattctgtagtcagataacaaaaaaccccgataaatcggggctttatataactgaaccctataaccgcaactgcggtctggagcactttccagaaggattttttcaaatcccactacgaaggccgaagtcttcacagtatatttgaaaaaggactctaagggaaagtggttgcgggggccggatttgaaccgacgaccttcgggttatgagcccgacgagctaccaggctgctccaccccgcgcctgaaacgtggcaaattctactcgttttgggtaaaaaatgcaaatactgctgggatttggtgtaccgagacgggacgtaaaatctgcaggcattatagtgatccacgccacattttgtcaacgtttattgctaatcatgtgaatgaatatccagttcactttcatttgttgaatacttttgccttctcctgctctcccttaagcgcattattttacaaaaaacacactaaactcttcctgtctccgataaaagatgattaaatgaaaactcatttattttgcataaaaattcagtgagagcggaaatccaggctcatcatcagttaattaagcagggtgttattttatgacgacgattctcaagcatctcccggtaggtcaacgtattggtatcgctttttctggcggtctggacaccagtgccgcactgctgtggatgcgacaaaagggagcggttccttatgcatatactgcaaacctgggccagccagacgaagaggattatgatgcgatccctcgtcgtgccatggaatacggcgcggagaacgcacgtctgatcgactgccgcaaacaactggtggccgaaggtattgccgctattcagtgtggcgcatttcataacaccaccggcggcctgacctatttcaacacgacgccgctgggccgcgccgtgactggtaccatgctggttgctgcgatgaaagaagatggcgtgaatatctggggtgacggtagcacctacaaaggaaacgatatcgaacgtttctatcgttatggtctgctgaccaatgctgaactgcagatttacaaaccgtggcttgatactgactttattgatgaactgggcggccgtcatgagatgtctgaatttatgattgcctgcggtttcgactacaaaatgtctgtcgaaaaagcctactccacagactccaacatgcttggtgcaacgcatgaagcgaaggatctggaatacctcaactccagcgtcaaaatcgtcaacccgattatgggcgtgaaattctgggatgagagcgtgaagatcccggcagaagaagtcacagtacgctttgaacaaggccatccggtggcgctgaacggtaaaacctttagcgacgacgtagaaatgatgctggaagctaaccgcatcggcggtcgtcacggcctgggcatgagcgaccagattgaaaaccgtatcatcgaagcgaaaagccgtggtatttacgaagctccggggatggcactgctgcacattgcgtatgaacgcctgttgaccggtattcacaacgaagacaccattgagcagtatcacgcgcatggtcgtcagttgggccgtctgctgtaccaggggcgttggtttgactcccaggcgctgatgctgcgtgactctctgcaacgctgggttgccagccagatcactggtgaagttaccctggagctgcgccgtgggaacgattattcaatcctgaataccgtctcagagaacctgacctacaagccagagcgtctgacgatggaaaaaggcgactcggtgttctcgccagatgatcgtattggtcaattgaccatgcgtaacctggatatcactgatacccgcgagaaacttttcggttatgccaaaactggcctgctttcctcctctgccgcttcaggcgtgccgcaggtggagaatctggaaaacaaaggccagtaattcgacatcaaccctgcccttcaggggtggggttaccttgcttatcctctgtaaactcctttctgagcatcacataatcgaaaacatcatggtttgcatccacaacccgtgagtctcctttatagtgtgcaatcacttcctcaagcgtttgcggctgttccggctttgttacccccatccacgcattaataaggtaattattgtaagctgtcgaaaagatgttgttttccgttgtgcgatccacgccatccccaagaacggggctataccagataaacatcgggacatgatatgcctgctggctagcctccctgcctccatgaaaatagacgttcttcttcgtagggtcacgttccaggccgtggtcggcaaaatacatgaccgaggcgcggcgatcttttaataattcaaaaacctgacctagcaaactatctgtgtaatgaatggagttgtcatagcaggcatcctgatcgtcctgcggttgaaacacggcgctggattgcggataggcgctacaagccggttcatggcttccatttaaatgaagaacaatcagtttcttttgctgcgtattttgctgtaatgcttgcgataaatgcggcaacaacaattcatcaaatcctctgacataaactgtttccatggcgcgcatggcgatactggtaactgctgtaccattctgccgaaaagcggattgcgagcttagccagaaagtctgaaatcctgcttgattagccatattaataatgttgtcggggtaattatgaatgtcatgactcaaaacagaatcagcagttaaagaaaggggaaccgacagcgcagtgtaaggtgcgccgcttattgcttgattaaacagtttgatctgttttctttgtgcttcaacttgcggtgtcgtagagcgtgtatatccatacaaagacatattgtcgacacgtacagactcccccacaatcaacacgtaggtatcaatacctgtatccctgactgataattgaaaatacggcaccgtgtttgcaattgagagtaatctttgatgctctttcgctgctaaagcaaaatagttgagattgaaaaacggcgtataggtagcaaatcgcgacgctagtatatatggactgaacgcttttttattttttgcatctttataagcaaattgacaagcggaaaataaactgcccgaaatgacaatcagcaataatattcctgtcactttttttgtcggcaaggaaacatcatattttattattactgccaaaaaaagaagggataaaaaagcaaaggcacatagataagggatatacatccccagcattttgacaacttcatccggatcactctggagcacactaatcgcaaatccatcattgaaagttgtaccaaaggtacaccatgaatagaggctaatactcatgtctgccgcagtcagtaacacaaatggtgcggcaacaagcaggcgaagcggaagggatgatatacgttttacaaccaggatggtcagaacgaagaacagcaagcgctgaaccatatgcgcgccggaagaggcgactaagttcgtaataccaaaaacaataacacaaagatacaacaaccaatgagatttaaaacttctagcaaatttgttgaatactgtcatccagaaatccaagttcacaaccaatataaacaattatcaacaatgttcaattttatatcagacatgtttttcaactctgatccatatcagaccgaaacactgttagttttttctttttaaatgatgcggccattgcgttctcagtaattaaataacattatcaatgcgtctctaaacattacgcagaacgtagccatcagtagttatactgacaggagcaggatggtttatcgagaagtaaacatatccgtattcgtaccggaactggagttgacacaataaagtgccaattatgtcagcagaagggaaaagtttataactaaggcgtaccggcaccatcgtttcaaggtaccagctacgagtaaagcaactggacgagatacagatacctgacaaccattcctcagaccaggaccaaaacgaaaaaagacgcttttcagcgtctcttttctggaatttggtaccgaggacgggacttgaacccgtaagccctattgggcactaccacctcaaggtagcgtgtctaccaattccaccacctcggcacggatactactttttagttcgggatatcgctggtcggcttagccggagcagctggttgagtttgttcggttttcaccggtgcactcagattttcccattcgctacctttattggttttgttgctattgatgttacccagcaccagactgatgatgaagaataacgttgccagcagcgccgtcatgcgggtcatgaagttaccagaaccacttgaaccaaacagcgtagcggaagcgcctgctccgaaggaggctcccatatcagcgcctttaccttgctgcagcatgatcagaccaacaaggccaattgccacaataaggaaaactactaaaagagcttcgtacataatcaacctgttccttgcggagttgccgcgtaccaatgcttcaaccaataaagcgggagtttttaatctttcccactgaagcgggtgtgaatactaaccaaagcgaatgaccttcgcaagggcaattttatcgcattgtatcaactgcggaaaaaaacagcaaaaccgatgtgttcgctgagaaaaaaggcgacaatcgccgcctttttagccagttatctaacgctttaaacggcttttactgcatcggcgatgcggtgtgcaaattcagtcacctgcgcttcgtcttcgccttccaccatcacgcgaattaacggttcggtgccggatttacgcagcaacacgcgtccacggttgcccagcgcagcttcaacctctgcggtcacggctttaactgactcatgctcaagtggatcgccgctacctgcggtgtaacgtacgttaaccagaatctgcgggaacattttcatgccgctgcaaaggtcgtgcaggctcatatggttacgtgccatagccgccagcacctgcaagccagcaacgatgccgtcaccggtagtagttttatccagcaggatcacatgaccggaattctctgcaccgatacgccagcctttctcctgcattttttccagtacgtagcggtcacccactttcgcgcgcgcaaatggaattcctaactgtttcagcgccagttcaagccccatgttgctcatcaatgtacccacagcgccaccacgcagctggccctgacgaagaccttcacgcgcgatgatatacatgatctgatcgccatcgactttattgccttcatggtcaaccataatcacgcgatcgccatcgccgtcgaaggcaataccgagatccgctttttcagccagcacacgagcctggagcgcgcgaacgtcggtagcccccacttcggcattgatgtttacaccgtttggctcacaaccgatagcgataacgttcgcccccagttcgcgcagcacgttcggcgcgatgtgataagtcgcaccgtttgcacaatccaccacaatcttcagttcactgaggctaagttcgttcgggaacgtggctttgcaaaactcgatatagcgacccgcggcatcaacgatacggctggctttacccagttctgccgaatcaacgcagctgatctccttttccatttccgcttcgatggcctcttctaccgcatccggcagtttggtgccgtcgatagagaagaatttaatgccattatcgtagaacgggttatgcgatgcagatatcacaattccggcctctgcgcggaaggtacgcgtcagataagccacggccggtgttggcatcgggccagtgaagagtgcggaaaggcccgctgccgccagacccgcttccagtgctgactccagcatatagccagaaatacgcgtgtctttaccaataatgatcttacgggagccgtggcgcgccagcactttacccgcggcccaacccagcttaagcacaaaatcaggtgtgatcggcgcatcccctacacgaccacgaatcccatcggtaccgaaatatttacgattactcatagcgtttgttttcctttgcagacagagtggcttccaccacccgcatcgcttctacggtttctttgacgtcatgaacacgaataatgtgcgcgccttgcattgcggcaatgaccgcacaggccagactaccgctcaggcgctcggacggccccacgttcagcagctgcccaatcatcgattttcgtgacatacctaccaacagcggcaggttgaaatggtgaaattcagccaggcgcgccagtaatgaatagttatgggagagatttttaccgaaaccgaatccggggtcgagcaacaatttctcttttgcgatacccgcctgctcgcaacgtgctatttgctcaataaagtagcgattcacttctgcaaagacatcgtcatacttcggagcttcctgcatggtttttggatttccctgcatatgcatcagacaaaccggtaaaccggtttctgcagccgcctccagagcgccaggttcggaaagggagcggatatcattaataatgtgagcgccaactttcgctgactcacggatgacttctggtttggatgtatctaccgagatccagacttcgaagcgttgagcaattgcctcaaccacaggaataacacgttgcaactcttcttcaacgctaacttccgccgcccctgggcgcgtggactcgccaccaacgtcaatgatcgtcgcgccagcgttgatcatcagattcgcatgtttcaccgcatctatcagcgagttatgcgtgccaccatccgaaaaggaatcaggcgtgacgttgaggatccccattacgtgaggatggctaaggtccagtgaagtaccctgggcaaagagtttcatgatgttatccctggtatgaattgataagaaaaaaccccggagcacgccccggggttttcggtacaaatacagtcatctgatgcgggaacttacttgtcgcctaactgctctgacatggtgttacccgggttcggcgtacgcggttcatcaaccggacgaggagcctttggactaccattgtcgccagaattgttagaagcgcctggttcttcccagcccgctggcggacgtacatcgcgacgtgccatcaggtcatcaatctgcggtgcgtcgatagtctcatatttcatgagagcatctttcatcgcatgcagaatatccatattgtcggtcagaagctgacgcgcacgattatagttacgctcaatcagtgctttcacttcctggtcgatgatacgtgcagtttcatcggacatatgtttcgctttcgctacgctacggccgaggaatacttcaccttcttcttccgcgtacagcagtggacccaatttctcagagaagccccactgagtcaccatgttacgtgccaggttggtcgcaactttaatatcgttggacgcaccggtagaaacatgttccggcccgtagatgatctcttctgccagacgaccaccgtacagcgtagaaatctggctttccagtttctgacggctggcgctgattgcgtcgccctcaggcaagaagaaagtcacacccagcgcacgaccgcgtgggataatcgtcactttgtgcaccggatcgtgttccggcaccaggcgaccgataatcgcatgacccgcttcgtggtaagccgttgattctttctgcgcttccgtcatcaccatggagcgacgttccgcacccatcatgattttgtctttcgctttctcgaactcaaccatcgacacaacgcgtttgttgccacgagcagcgaacagtgccgcttcgttcaccaggttcgccaggtcagcaccggagaaaccaggagtaccacgggcaatgattgccgcgtcgatatcgggtgccaatggtacgcgacgcatgtgaactttcaggatctgctcacgaccgcgaacatctggcaagccaaccacaacctgacggtcgaaacggccaggacgcagcagggccgggtcgagaacgtccggacggttagtcgcggcgataacgatgataccttcgttaccttcgaagccatccatctcaaccagcatctggttcagagtctgttcacgttcatcgtgaccaccgcccagaccagcgccacgctggcggcctacggcgtcgatttcatcgataaagatgatgcacggtgccgctttcttcgcctgttcgaacatgtcacgaacacgggatgcacccacaccgacgaacatttctacgaagtcagaaccggagatagtaaagaacggaactttcgcttcgcctgcaatcgctttcgccagcagcgttttaccggtacccggaggaccgaccatcaggacgcctttcgggatcttaccgccgagtttctggaagcggctcggctcgcgcagatactcaaccagttcagcaacttcttcttttgcttcgtcgcagcccgcaacgtcagcaaaggtcgttttgatctgatcttccgtcaacatgcgcgctttgctcttaccaaacgacatggcacctttgccaccgccgccctgcatttgacgcatgaagaagatccagacaccaatcagcaacagcatcgggaaccaggagatgaagatagaagccagcaggcttggttcttcaggcggttcaccgacaaccttgacgttcttggtcaacaggttatccagtaatttcggatcctgaaccggaatgtaagtggtataacggttactatctttcttggtaacgttgatttcacgtccgttgatacgcgcttcacgaacctggtcgttattgacctcttgtaggaaggtagagtaatccaccttacggccattagactcgctgggcccaaagctctggaatactgacatcagcacaacggcaatgaccagccagagtattaggtttttcgccatgtcactcaagggattaacctcttattacaactgtgttaaaaacagcgtcaggatactctatatccagcatctttcaaactttcgtctgaaatctcccggttagggtttacgcccggtcgctacaatatacacttcccgcgaacgtgcacgagaagagtccggcttacgaactttaaccttcgtaaacagggagcgaatttcccttagatactcatcgaaaccttcgccctggaacaccttcactacaaaactgccacctggcgctaatacatcacgacacatttctagcgccagttccaccagatacatggcacgggggatatccaccgccggtgttccgctcatgtttggtgccatatcggacatgacaacctggactttgctgtcgccaacgcgctccagcagtgctttcatcaccagttcatcacgaaaatcgccctgaagaaagtccacaccaacgataggatccataggtaaaagatcgcaagcgatgatgcggcctttgccgccaatttgggtgaccacatattgtgaccaaccacccggagcagcaccaaggtcgacaaccgtcattcccggtttaaagagtttgtcactttgctgtatttcatcaagtttaaaccaggcacgggaacgtaacccctttttctgtgcctgttgaacatatttatcgctaaagtgttcctgaagccagcggctggagctggcagaacgcttcttacctgtcatttaactttcccatggggataactcatcgtaaccaattgcgtaaatttttacgcgcctatttggtgatatatgggagatggcggtagaatgacccgttttcaatcccaacgtaagcaaaaaatacgatgaatctgagtactaaacaaaaacagcacctgaaaggtctggcacatccgctcaagccagttgttctgcttggcagtaatggtttgaccgaaggggtgctggccgagattgaacaagcgttagagcaccatgaactcatcaaggtgaaaatcgccaccgaagatcgcgaaactaaaaccttgatcgtggaagctatcgtgcgcgaaaccggcgcctgtaatgtacaggtcatcggtaaaacgctggtgctttatcgcccaactaaagaacgtaaaatctcgctgccacgctaagattatcctaaagttacacacatttgctgtgtaaaacgaggggttttccgcaggcaggagagcaaaatgccacgctctgttcgttgataaaaggccgcatagcggcctttttcctttctttacaatacatcaacatcttgagtattgggtaattcttacaggtattccaccttaattacttcaaattctacttcgccgcccggcgttttgatgaccacaacatcatcttcttctttgccgatcaggccacgagcaataggcgagtttacagaaatcaggttttgtttaaagtcagcttcatcatcgccaacgatgcgataagtctgttcttcgtcagaatcgagattcagcaccgttacggtagcaccaaaaataacgcgcccattgttaggcattttggtgacatcaatcacctgcgcgtttgacagcttggcttcgatgtctttgatacggccttcgcagaagccctgctgttcacgagctgcgtggtattcggcgttttctttcaggtcgccatgctcacgcgcttccgcgatagcagcaatgatttcaggacggcgcacagatttcagaaaatccagctcttcgcgtaatttttctgcgccgcgtaaggtcatcggaatagcttgcatttgttatacctcttgaatattcctgatggggcaagtcttcacccaccccggctgttcggcctgcccggcataactcctcaccgggaccagaagcaaaaaaataccgacccgggtacaagtcccaggtcagctacaattcacattttgatagtcattttaccctgaagttcccgaagggtcatcgtttactttatagggcgttgcgccgtagtatgacggctcgattccaggttgttagcgcgagattatgcgattttccagatttatcatcggattgaccagctgtatagcgttcagtgttcaggccgcaaatgttgatgagtacattactcaactccccgctggtgccaaccttgccctgatggtgcaaaaagtcggcgcgtcggcccccgctattgattaccacagtcagcagatggcgctgcctgccagtacccagaaagtgattactgcgctggcggcgttgattcaactcggccccgattttcgttttaccacgacgcttgaaaccaaaggcaatgtggaaaacggcgtacttaagggtgacttagtggcgcgatttggtgccgatccgacgttaaaacgtcaggatattcgcaatatggtcgcgactttgaaaaaatctggcgtcaaccaaatcgatggcaatgtgttgatagatacctccattttcgccagccacgataaagcccccggctggccatggaatgacatgacacaatgctttagcgctccgcctgccgccgccatagttgaccgcaactgtttctccgtctcgctctacagtgccccaaagcctggtgatatggcttttatacgcgtggcatcttattaccccgttacgatgttcagccaggtacgcaccctcccccgtggttctgccgaagcgcaatactgcgaactggatgtggtgccaggcgacctgaaccgctttacgctgacgggatgcctgccacaacgttctgagccgctcccgttggcttttgccgtgcaggatggagccagctatgccggtgcaattctgaaagatgagttaaaacaggcgggtatcacctggagcggaacactgctgcgccagactcaggttaacgaacctggaacggtagttgccagtaaacagtcggccccgctgcacgatctgcttaagattatgctgaaaaagtcggacaacatgatcgccgatacggttttccgcatgataggccatgcgcgcttcaatgtgcctggaacatggcgggccgggtcggacgccgtgcgtcagatcctgcgccagcaagccggtgtcgatattggaaacaccagtattgccgatggttcagggctttcgcggcataacctgattgcccccgccaccatgatgcaggtgctgcaatacattgcccaacacgacaatgaacttaactttatctccatgctgccgctggcgggctatgacggctctttgcagtaccgtgcaggtctgcatcaggcgggcgtggatggaaaagtctcagcgaaaaccggttcgttgcagggggtatataacctggcgggattcattaccacagcgagcgggcaacgaatggcgtttgtgcaatatctttctggctatgcagtagaacctgcggatcagcgtaatcgccgtattccgttagtgcgttttgaaagccgtttgtataaagatatttatcagaacaattagtcaaaaagaaaccccggcacatggccggggcttcagattattgacaaagtgcgctttgtttatgccggatgcggcgtaaacgccttatccggcctacaaaatcgtgcaaattcaacatattgcaattctcttgtaggcctgataagcgtagcgcatcaggctgatttggcgtttatcatcagtgattaacgcttgtaaatgaactcaacgccttcttcgtcgtcttcgtcccagtcgtcatcccagtcttcatcatcctcttcagcaatctcttcaagctgctggcgatgataatcatcccacatgaattcgactttctctggctgtttcgcttcttcagcctgcacgaccgggttttcaatgataaaggtcatcacatcccagcagagatctttcacgcccagtccactcgccgcagagatcagataatatttatcttcccagtccagcgcctcagcgatcgctttcgctttctcttcggcttctaccttatccagcagatcgatcttgttgaacactaaccaacgcggtttcgccgccagatcctggctgtatttttccagctcgctgataataatacgcgcgttttcaaccggatcggtgccgtcaatcggatcgatatcgatgaggtgcaacaggacgcggcaacgttccaggtgcttcaggaagcgaatgcccagacctgcgccttccgcagcgccttcaatcagtcctggaatatcggcaacaacgaagctcttttcgttgtccattcgtaccacacccagacttggcaccagagtggtaaacggataatccgccactttcggtttagccgccgataccgcacgaataaaggtcgatttacccgcgtttggcatccccaacataccgacgtcagccagcagcatcagctccagcagcagctcgcgcttatcgcccggcgtgccgttggttttctgccgcggtgtacggttaacggacgatttgaaacgggtattgcccagaccgtgccagccgcccttagcaaccagcagacgctgaccgtgtttggtcatatcgcccatggtttcaccagtaccctggtcgattacacgcgtacctaccggcactttaattgtgacgtctttaccgcgcttaccggtacagtcgcggcttgcgccgttctgaccgcgctctgcacggaaagatttttcaaaacgataatcgataagcgtgttcaggttctcgtcggcttccatccatacgtcaccaccatcaccgccgtcgccgccatccgggccgcctttcggaatatacttttcgcggcggaagctcacgcaaccattaccgccatcacctgcaacgaccagaatcgatgcttcatcaacaaacttcattttattctccgtaaatcattcgcctgcgcggggttgcgataccaccgttgtatgcttacgtaatccgccccaaatacgatgaccaatggcggaatacatcgcgcccgcaaccacgacaaacgcaccgagataacctaaaaggtttaacatcggtctggcgaagaaatcgggccaggccagtgataaaagatctgaaaaaaacagcgtaaacagtggggtgagcgtgatgatcgcgctcacctgcgctgcctgccagcgagccatcgcttccgccagggcgccatatcctaccaatgtattcagtccgcaaaaaattaaacatgcgagctgccagtggctaagctgcgctatcactccaggctttgccagagggaagagcgcaattgtacataaagtgtacagtaaaaacaggatctgcggtgaggccagccgacgcaataaaaccttttgcgccacgccataactcacccaaaccgtcgcagcaccgaccccaaagataactccccaggtgtaatcggtgagctttgtaaatatctcgaccagactggtgttaaaaaacatcaccaggccgctcaggagcatcaatgcccctacaacctgagtgctgcgcattttctctttcaggataaatacgctggcaaccatcatgccaactggcgagagttgcccaatcacctgcgaagcggtcggactcaggtattgcaaggatgagctgaacaggatgaagttcccaaacagcccggcggtcgccactgccaacaaaatcaaccagcgtggcttacgaaacacgcgtaatggcggcaacctcttcttcaccgcaagaatggcacccaggccaatactcgccatcaagaaacggtaaaacacgattgtcggaggttccatcacctccagcacctgcttcattgcgattggcaacgccccccagcaaattgctgtggtgagcgccaaaagaatgccaatgcctgcctgctgcttcataccgtattccctgcaaagcgcatttgcggattaacgtcgcaccatgcgcatttttaccggttatcgaatgtaaaaagccccgcaacgtgttgcggggctttcatccgttaccgggacgcgaaaaacttattcagcttcgatgctgataaatttacggtttttcgggcctttaacttcgaatttcactttaccgtctgctttagcaaacagagtgtggtcacgaccgcaacctacgttagcgccagcgtggaatttggtaccacgttgacgaacgatgatgctacccgccagaacggattcgccaccgaaacgcttaacgcccaggcgtttagcttctgaatcgcgaccgttacgtgtggagccgccagcctttttatgtgccatttgaaatctctcctcaggtcttaggcgctgatgccagtaattttcacatcagtgaaccactgacgatggccctgctgcttacgatagtgtttacgacgacgaaacttaacgattttaactttctcgccacgaccgtgagcaacaacttcagctttgattacgccgccatcaacgaaaggaacgccgattttgacttcttcaccgtttgcgatcatcagcacttcagcgaactcaacagtttcgccagttgcgatgtccagcttttccaggcgaacggtctgaccttcgcttactcggtgttgtttaccaccactttggaaaaccgcgtacatataaaactccgcttccgcgcacaccttttcaatgattcagagtgcgctataaatattcacaatagggcgcgaatattacgcaaaacgcacgcctttgacaagtgctacagtcaatacacgaagaaaaaaaacacaacttgtacggtaacgtttatctgtgccattttttcagtacaatcaccctatattcctaaccataaaccctaagttgcctttgttcacagtaaggtaatcggggcgaaaagcccggcttttgcgatgaatttagaaaaaatcaatgagttaaccgcgcaagatatggcgggtgttaatgcggcaatccttgagcagcttaattccgacgtccaactgatcaatcagttaggctattacatcgtcagcggcggcggtaaacgtattcgtccgatgattgctgtactggctgcacgagctgttggctatgagggaaatgcgcatgtcaccattgctgccctgatcgagtttatccacacggcgactctgctgcacgacgacgttgtggatgaatcagatatgcgcaggggtaaagctaccgccaacgccgcatttggcaatgccgccagcgtgctggtaggcgattttatttatacccgcgctttccagatgatgaccagcctcggttcactcaaagtgctggaagtcatgtcagaagccgtaaacgtcatcgcagaaggtgaagttctgcaactgatgaatgttaacgatccggacatcactgaagaaaactacatgcgcgttatctatagcaaaaccgcgcgtctgtttgaggctgccgcgcagtgttccggaattctggctggctgtacgccggaggaggagaaaggcctgcaggattatgggcgctatctcggcactgctttccagttgatcgacgatttactcgattacaatgccgatggcgaacagttaggtaaaaacgtcggcgacgatctgaacgaaggtaaaccgacgctgccgctgctgcatgcgatgcatcatggcacaccagaacaggcacagatgatccgtaccgccatcgaacagggtaacggtcgccatcttctggaaccggttctggaagcaatgaacgcttgtggatctcttgaatggacgcgtcagcgcgccgaggaagaagcagacaaagccatcgcagcgttacaggtgctcccggacaccccttggcgagaagcactcatcggcctcgcgcacatcgctgttcaacgcgatcgttaatcccctcccctcatcccgcgcagtgcgcgggatgattccagtaaactccataagaatacttattcagcgtaataatgcactgaaaaaccagtgtatacatctttatatattctgaatattcacactctttacaggaactttttagagcaatcggccatcaggagtatagtgatgctcgacagaagaagtgttctgaatgaaagcgactaacttaaggagtgaggaaagatggaaagtaatttcattgactggcatcccgctgacatcattgcgggtttgcgcaagaagggaacgtcaatggcggcggaatctcgcagaaatggtttgagttcctcaacgctggcgaatgcattatcgcgcccatggccgaaaggagagatgattattgcgaaggccctgggaactgacccctgggttatctggccatcacgctaccatgatccgcagacccatgagtttatcgacagaacgcagttgatgcgtagctacactaaaccgaaaaaatgagtggtctggcggtagccccgcgtacggggctgccagctttcagacgattactcgcctttcacacgctcaatatttgcacctaaagcgcgcagtttgtcttcaatgcgttcgtagccacgatcgatgtgataaatacgatcaaccaccgtcgtcccttccgcaatacagccagccagcaccaggcttgctgatgcacgcagatcggttgccataacctgtgcgccagaaagtttttcaacaccgtgacaaataacggtattgctttcgatttcggcgtgcgcgcccatacggctcagctctggcacatgcataaagcggttttcaaagaccgtttcggtgatgaatccagtcccttctgccaccaggttcaacagcgtgaactgggcctgcatatcggtcgggaatgccggatgcggcgcggtacgtacgttaacagccttcggacgtttgccatgcatatccaggctaatccagtcttcgccgacttcgatgtccgctccagcgtcacgcagtttcgccagcacggcgtcgagagtatctggctgcgcgttacggcagataattttgccgcgagaaatcgccgccgccaccaggaatgtaccggtttcgatacgatccggcagcacgcgatagacaccgccgcctaaacgttccacaccttcgatgacgatacgatcggtgccctgaccgctaattttcgcacccagcgtaatcaggaagttcgcggtatcgacgatttccggttcacgcgctgcgttttcaataatcgtggtaccttccgccagggttgcagcacacatgatggtcaccgttgcgccaacgctgactttatccatcacgatatgtgcgcctttcagacgaccatcgacggaagctttaacgtaaccttcttccagtttgatggtcgcgcctaattgttcgaggccagaaatgtgtagatcaaccggacgcgcaccgatcgtacaaccgccaggcagtgaaacttgcccctgaccaaagcgcgctaccagcggccccagtgcccagatagaagcacgcatggttttaaccagatcgtaaggtgcgcagaatacattaacgtcgcgggcatcaatatgcacagaaccattacgttctactttcgcacccagctggcttagcagcttcattgatgtatcgacgtctttcagtttcgggacgttctggatctctaccggttcttccgccagtagtgcggcaaaaaggataggcagagcagcatttttagcgccggaaattgtgacttcgccctggagcttcgttggcccctgaacacgaaatttatccatttagtttgttctcagttaacaattcatatccgctaccggcgaatcgcccatagctcaaaagccgttcagtttgcgatcgcgcgcccactccgcaggggtatacgctttaatcgacacagcatgaatgcggttatccgcaatatattccatcagcgggccatagaccgtctgctgttttttaacccgactcatgccgtcaaacaactcacccacggcaataacctgaaagtggctgccatcgccggaaacgtggacttcctggagggagagagcgttcatcaacacgctctgaatttcattattttccatgggatcttcaatcatcagttaataaaccagcgaaacatcttagagcaaagttgcgctggcataaataagcaaaaagcctcgctgataaatcagacaaggctcgacttgcaggcaggtttgccggacaggcggttaacgccatatccggcctgaaaaaatttaacgaggcagaacatcagcaggcaaattatacaatttcgccagggtatacactttgtcgtttaccccctgaagcgtcacattgttgccctgctttttcgccagatcgataagatggagcagcagtgccagtccccccgtatccacgcgggagacacggctaagatcgatgcaggtaatccccttcaccgcttcctcacgcatttcccaaagcggtagcaaaacgtcctgatccagctctccggataacgccagcgtgtcacctgtctgcatccagctcagtgactcgctcattattttttctcttccagagtgattttctgttgagaaatcgatttcagttgcgcagtcaggccgtcgatacctttggtacgcagcagcgttccccactcgttttgtttggtggtgatcatactgacgccttcagcaatcatgtcgtaagcctgccaattgcccgtctgggagtttttacgccactggaagtccagacgcaccggcggacggccattcgggtcaataatggtaacgcgaataggcacaatggttttatcgcccagcggctgttctggcgcaatctgataggtttgaccgtgatacatcgccagcgcctgaccgtaagcctgcttcaggtactcacggaaagcggcaaagtaggcttcacgttgagcaggggtcgcactcttgtaatactggcccagcaccagcgcaccggcgtatttcacctgtacgtatggcagcagttcctgatcaacaatggtacgcagataatccgggttggcccgaatttgcggttgctcattcttcaggcgatcgaacgttttctgcgccgcctcgtccatcagcttatacggattggtctggtctgccgcggttgccgcactcagaggtgcaatcaccagcaaagcgaccatcattaaacgtttaaacatgcgtcggttctcctgaaattatttcgttgtacccacaggttcagtggtttcattattacctggcgcagcagctggcgcatcgccactattcttattgtcatcgcctttactaccgtaaaggaactgaccaatgagatcttccagcaccatcgcagacttagtgtcctgaattgtatcgccatccttcaggatagcagtccccagttccgggtcttcaaaaccgacgtttaatgccagatattgttcccccagcaggccggaagtacgaatgctcagcgaactggtatctggaatgtggttataacgttgttcaatttccagcgttacgcgcggcagataggttttcgggtccagcgtaatatccgccacccgacccacaacaacgccaccaatactgaccggagagcgcgctttcaggccgccaatgttatcgaacgtcgcataaagcgtgtaggtcggttcagtacgtatggacgtcacgttcgccgccttcaggcaaacaaacagcgccgccagcagtgctgctaataaaaagatacccacccaaatttcattttttttcgtttgcatgaactcaattcccaaacatcaatgcggtcagcacaaaatccagccccagaacagccagagacgagtggacaacggtgcgagtggttgcccggctaatcccggcagacgtcgggatggcgtcgtagccgttaaacaacgaaatccacgtcaccgtgatggcgaacaccacgctcttaatcagacagttgaccagatccatacgccagtcgacggcattttgcattgccgaccagaagaacccgctatcaatgcctttccaactgacgccgaccagagagccgccccagatccccacggcgacgaaaataaccgtcaacagtggtaatgaaataaccccagcccagaaacggggagaaataacccgacgcagcggatccaccgccatcatctccatactggagagttgctctgtagcgcgcatcaggccgatttctgcggttaacgccgaaccagcacgcccggcaaacaacagcgcggcaaccaccggccccagttcacgcagtagcgataacgccaccagcatacccagactggtttccgcactataagtggtcagaaccagataaccttgcagccccaacaccattccgatgaacacgccagaaaccacaataatcagcatcgacaggacgccgacattatagagctggcgcaccagcagcggcgcatgtttgcgaaattccggtttgccgaccagcgcattgaataacattaacccggcccgcccgaacgttctcagggttttaatccctttatgtccgagcgacgccagcgcatttaacagcatgagtggcttaactccctggtaaaagatcagcgtgataatcgccggcaggatagcggaacggaacaggcccgtcagctatcccgtccagaaactgacgtacgcgcggatcaggattcgcctgcaacgcctgggcactgccatgagcgacaatttttttgtccgccaggatccaggcgtgatccgcaatacttaacacttccggcacatcgtgagaaaccaccacacaagtcacgcccagcgcgctgttcagctcagaaatcagcttcaccagtacgcccatggtgatgggatcttgcccaacaaaaggttcatcaaacatgatgagatccggctccagcgcaatcgcacgcgccagcgctgcacgccgcgccatcccaccggaaagttcagaaggcattagtttagccgctccacgcagccccacggcctccagcttcatcatcaccgtactatgcaacaatggcgcgggaagttgggtatgttcgcgcagtggataggcgacgttgtcaaatacgttcatatcagtgaacaacgccccggactgaaataacatgctcatccgtttgcgcactgtatacaggcgcgaacgagacatcgccggaatattctcaccatcgaaaaggatctcaccatgatctggtgcgatttgcccgccaatcagacggagtagcgtcgttttaccgatgcccgatggccccatgatcgccgtgatcttccctcgcggcacggtcagggaaatattatcgaagatgcagcgattgccacgcgtaaaactgacatcgcgcatatcgactaaattcgccacagactgctccataattcacccttcgtcttgcgttgattttctaagcatggcgctcaatttaaccttgaacccaacatatttacagaatattacccgccgtggttagcgaaagctggcatttgttttactttttagccgcataaagtcaaaattaagaatccgttacggctttctgaaaatcttcagcggaccggcgagtatacctgaagaaaggacgttagatgcttttagctacggcactgttaattgttggtttacttttggtcgtttacagtgccgaccgcctggtttttgccgcgtctattctttgccgaacctttggcatcccgccgctgatcatcggcatgacggtggtcagtattggtacatcgttaccagaagtcatcgtctcgcttgccgcgtctctgcacgaacaacgcgatttagccgttggtacagccctcggctcaaacattatcaatatattgctgatcctcggtctggctgcgctggttcgtccttttaccgtccattctgatgttctacgccgtgaattacccttaatgttgttggtcagcgtggtggccggttccgtactctatgacggacaacttagtcgcagcgatggtatctttctcctctttctggctgtgctatggctgctgttcattgttaaacttgcacgtcaggctgaacgtcaggggactgacagcctgaccagagagcagcttgcagagctgccgcgtgacggcggattgcccgtcgcgtttttatggctcggcattgcgcttatcatcatgccagtggccacgcggatggtggttgataacgccacggtgctggcgaattactttgccatcagcgagttgacgatgggtctgacggcaattgctatcggaaccagcctgccggaactggcaaccgcaatagcgggggttcgcaaaggtgaaaacgacattgctgtcggaaatatcattggcgcaaacatttttaatattgtcatcgtgttgggtttacccgcgctgataacgccaggagagattgatccactggcgtacagtcgtgactacagcgtgatgttgctggtgagcattatttttgcgttgctgtgctggcggcgctccccgcaaccgggccgtggtgtaggggtattattaactggcggatttatcgtatggctggcgatgttgtactggttatcgccaatactcgttgaataactggaaacgcattatgtcgcacgtagagttacaaccgggttttgactttcagcaagcaggtaaagaagtcctggcgattgaacgtgaatgcctggcggagcttgatcaatacatcaatcagaatttcacgcttgcctgtgaaaagatgttctggtgtaaagggaaagttgtcgtcatggggatgggaaaatcggggcatattgggcgaaaaatggcggcaacgtttgccagcaccggtacaccttcatttttcgtccatcctggtgaagccgcgcatggtgatttaggcatggttaccccacaggatgtggtgattgctatctctaactctggtgaatccagcgaaatcacggccttaattccagtgcttaagcgtcttcacgtaccgttaatctgcatcaccggtcgcccggagagcagcatggcgcgcgccgcagatgtgcatctgtgtgttaaagtagcgaaagaagcctgtccgttagggctggcaccgaccagcagcaccaccgccacgctggttatgggcgatgccctcgctgtcgcgctgttaaaagcacgcggctttactgctgaagattttgcgctctcacacccaggcggcgcactgggtcgtaaacttctgctgcgcgtaaacgatattatgcatacgggcgatgagatcccgcatgttaagaaaacggccagtctgcgtgacgcgttgctggaagttacccgcaaaaatcttggtatgactgtcatttgcgatgacaatatgatgattgaaggcatctttaccgacggtgatttacgccgtgtcttcgatatgggcgtggatgttcgtcagttaagtattgccgatgtgatgacgccggggggaatacgtgtgcgccctggcattctggccgttgaggcactgaacttaatgcagtcccgccatatcacctccgtgatggttgccgatggcgaccatttactcggtgtgttacatatgcatgatttactgcgtgcaggcgtagtgtaaagattcaaggataaacaacaatgagcaaagcaggtgcgtcgcttgcgacctgttacggccctgtcagcgccgacgttatagcaaaagcagagaacattcgtctgctgatcctcgatgtcgatggcgtactgtcagatggcctgatttatatgggcaataatggcgaagagctgaaagcgttcaatgttcgtgacggttatggcattcgttgtgcgctcacctctgatattgaagtcgctatcattaccgggcgaaaggctaaactggtagaagatcgttgtgccacattggggatcactcacttgtatcaggggcagtcaaacaaactgatcgcctttagcgatctgctggaaaaactggcgattgccccggaaaatgtggcttatgtcggcgatgatctcatcgactggccggtaatggaaaaagtgggtttaagcgtcgccgtggccgatgcgcatccactgttgatcccgcgcgccgattacgtgacgcgcattgctggcggtcgtggcgcagtgcgcgaagtttgcgacttattactcctggcgcagggcaaactggatgaagccaaagggcaatcgatatgagtaaagccagacgttgggttatcattgtgctatcactggcggttctggtgatgatcggcattaatatggccgaaaaagacgataccgcccaggtggtcgtcaacaacaatgatcccacctataaaagcgagcatacggacacgctcgtctataacccagaaggggcactaagctatcgattgattgctcaacacgttgaatattattccgatcaggccgtttcgtggtttacgcagccggtacttaccacgtttgataaggataaaatcccgacatggtccgtaaaagcagataaagccaagctgaccaatgaccggatgctctatttatatggacacgttgaagtcaacgcacttgtgccagactctcaacttcgcagaatcacgacggataacgcgcagatcaatctggtgacgcaggatgttacctctgaagacctcgtcacgttatacggaacaacatttaactccagcggtctgaaaatgcgcggcaacttacgcagcaagaacgccgagctgattgaaaaggttagaacatcctatgaaattcaaaacaaacaaactcagccttaatcttgtgcttgccagctcacttctggccgccagcattccggcatttgccgtaaccggagacactgatcagccgatccacattgaatcggaccagcaatctcttgatatgcaaggcaacgtggttacctttaccggtaatgtcatcgtcacccagggcaccatcaaaattaatgccgacaaagtggtcgttacccgtccgggcggcgaacaaggtaaagaagtgattgacggctacggtaaaccggcaacgttctaccagatgcaggacaacggtaaacccgttgaaggtcacgcttcccagatgcactacgaactggcaaaagattttgtcgttctgacgggtaatgcttatctgcagcaggtcgatagcaacattaagggcgataagatcacttacctggtgaaagagcagaaaatgcaggctttcagcgacaaaggcaagcgcgtaacaaccgttctggtgccgtcgcagctgcaggacaaaaacaacaaaggccagaccccggcacagaagaagggtaattaattcgttatggcaacattaactgcaaagaaccttgcaaaagcctataaaggccgtcgcgtggtagaagacgtcagcctgaccgtcaactccggggaaattgtcggtctgctggggccaaacggtgccggtaagaccaccactttctacatggttgtaggcattgtgccgcgcgatgcgggcaacatcattattgatgatgacgatatcagtctgctgcctctgcatgcacgcgcgcgccgcggtatcggctatctgccacaggaagcctccattttccgtcgcctcagcgtttacgataacctgatggcggtactgcaaattcgtgacgacttgtctgctgaacaacgtgaagaccgcgcgaacgagctgatggaagagtttcacattgagcacctgcgtgacagcatggggcagtcactctccgggggtgaacgtcgccgtgtagaaattgcccgcgcactggctgcgaatccgaaatttattctgctcgacgaaccgtttgccggggttgacccgatctcggttatcgacattaaacgcatcattgagcacctgcgcgacagcggcctgggcgtgctgatcactgaccacaacgtgcgtgaaacactggcggtttgtgaacgcgcttatatcgtcagtcaggggcatttgatcgcccacggcacgcctacagaaatcttacaagacgaacacgttaagcgtgtataccttggggaagacttcagactctgatagggtagaagtttgcgacgttttagcaggagagtacgattctgaacatgaagcaaggtttgcaactcaggcttagccaacaactggcgatgacgccacagctccaacaggcaattcgtctgttgcagttgtcgacgctggaacttcagcaggagctacagcaggcgctggagagtaatccgctgcttgagcaaatcgacactcatgaagaaatcgacacccgcgaaacgcaagacagtgaaacgctggacaccgccgacgcgctcgaacaaaaagagatgccggaagagctgccgctcgatgccagttgggacaccatttacaccgctggtacaccatccggcaccagcggtgactacattgacgatgagctgccggtctatcagggcgaaacgacgcagaccttgcaggattacctgatgtggcaggtcgagctgacaccgttttccgacactgaccgcgctattgctacctctatcgtcgatgccgttgatgacaccggttatctgactgtcccgctggaagatattctcgaaagtatgggcgatgaagagatcgacatcgacgaggttgaagccgtccttaagcggatccaacggtttgatccggtcggtgtggcggcaaaagatctgcgtgactgtctgctgatccaactctcccaattcgataagaccacgccgtggctggaagaggccagactgatcattagcgatcatctcgatctgttagccaatcacgacttccgcactttaatgcgcgtcacgcgtctgaaagaagatgtgctgaaagaagccgtcaatctgatccagtcgctcgatccgcgccccgggcagtcgatccagactggcgaacctgagtatgtcattccagatgtgctggtgcgtaagcataacggtcactggacggtagaactcaacagtgacagcattccgcgtctgcaaatcaaccagcactacgcctcgatgtgcaataacgcgcgcaacgatggtgacagccagtttatccgcagcaatctgcaggatgccaaatggttgatcaagagtctggaaagccgtaacgatacgctactgcgcgtgagtcgctgtatcgttgaacagcagcaagccttctttgagcaaggtgaagaatatatgaaaccgatggtactggccgatatcgcccaggctgtcgaaatgcatgaatcgacgatatctcgcgtgaccacgcaaaaatacctgcatagtccacgaggcatttttgaactgaagtatttcttttccagtcacgtcaataccgagggcggcggcgaagcttcctccacggcgattcgtgcgctggtgaagaaattaatcgcggcggaaaacccagcgaaaccgttgagcgacagcaagttaacctctttgctgtcggaacaaggtatcatggtggcacgccgcactgttgcgaagtaccgagagtctttatccattccgccgtcaaaccagcgtaaacaactcgtttgacccaaccgataaggaagacactatgcagctcaacattaccggaaataacgtcgagatcaccgaggcactgcgcgaatttgttacagccaaatttgccaaacttgagcaatattttgaccgaatcaaccaggtctatgttgttctgaaagtggagaaagtcacccacacctcagatgcaacactgcatgtaaacggtggtgaaattcatgccagcgcggaaggtcaggacatgtacgctgccattgatggcttaattgataagctggcacgccagttgaccaaacataaagataaactgaaacaacactaattgtccgggcaattagcatgtgcatggcggtctgttgtgcggcacaacgggccatttgtacggttaatgctccgagcctgttccactgtttgagtgggcaggttcttaggtgaaattatgacaaataatgatacaactctacagcttagcagtgttcttaacagggaatgtacgcgaagccgcgtccactgtcagagcaaaaaacgcgccctggaaatcatcagcgagctggcggcgaaacaacttagcctgccgcctcaggtggtttttgaagctatcctgacgcgggaaaaaatgggcagtaccggtatcggcaatggtattgccattccgcatggcaaactggaagaagatactctgcgcgccgttggcgttttcgttcagctcgaaacgcctatagctttcgatgccatcgacaaccaaccggtggacttactttttgccctgctggtgccggcagaccaaactaaaacgcacctgcatactctgtcgctggtggcgaaacgtctggcggacaaaaccatctgccgccgtttacgcgcagcccagagcgatgaagagctgtatcaaatcattacggataccgaaggtactccggatgaagcgtagttattcggtaatgtctcttttagacgttgtgaggagaaacagtacatggtactgatgatcgtcagcggacgttcaggttcaggtaaatctgtcgccctgcgtgcgctggaagatatgggtttttactgcgtggataaccttcccgtagtgttgttacccgatctggctcgaaccctggccgatcgcgagatttctgccgccgtcagcattgatgttcgtaatatgccggagtcaccagaaatattcgaacaggcgatgagtaacctgcctgacgctttctcaccgcaactcctgttcctggatgccgaccgtaataccttaattcgtcgttacagtgacacgcgccgactgcatccgctttccagcaaaaacctgtcgctggaaagtgctatcgacaaagaaagcgatttgctggagcctctgcgttcgcgagcggatctgattgtcgatacctcagaaatgtccgttcacgagctggctgaaatgctgcgtacccgtctgctgggtaaacgtgaacgcgaactgaccatggtctttgagtctttcggcttcaaacacggtatccctatcgatgcagattacgtctttgacgtgcgcttcttgccgaacccgcactgggatccgaaactgcgtccaatgacaggtcttgataaacctgtcgccgcgttcctcgaccgccacacagaagtacacaattttatctaccagacgcgaagctatcttgagctatggttacctatgctggaaaccaacaaccgtagctacttgacggtcgccattggttgtaccggcgggaagcaccgttcggtgtatattgcagagcaactggcagactacttccgctcgcgcggtaaaaacgtccagtcacgccatcgtacgctggaaaaacgtaaaccatgaccgtcaagcaaactgttgaaatcacaaacaagctgggcatgcatgcccggcctgcaatgaagctgtttgaattaatgcagggttttgacgctgaagtgctcttacgtaatgacgaaggcaccgaggctgaagccaacagcgttattgcgctgctgatgttggattctgccaaaggacggcagattgaagttgaagcgaccggtccacaggaagaggaagcactggccgccgttatcgccctctttaattctggttttgatgaagattaatcttcatcactttgacatacaactcccttcaaactccccccgacaataagaaaatcacgtactgaaatcgttctcaatcaacgtcatttgtacattttgtgcgcttttcactttcagaagaaccttaagaaaaccttaagaggcattgtttaggttttgtttaagttaatcgaccatactggagatcgtcagaaaatatttccaggagatggcatgattcgcttatctgaacaaagtcccctgggcaccggaagacatcggaaatgttatgcgcatccggaagatgcccaacgctgtatcaagattgtctaccatcgtggcgatggtggcgataaagagatccgccgtgagttaaagtactacgcgcatcttggtcgccggttaaaagactggagtggaataccgcactatcacggtaccgttgagacggattgcggaaccggttatgtctacgatgtgattgcagattttgacggcaagccttccattacgctgaccgaatttgctgaacaatgccgttacgaagaagacattgcacaactgcgccagctactgaaacagctgaagcgttatttgcaggataaccgtatcgtgacgatgtcgctgaagccgcagaatatcctctgtcaccgcatcagtgagtcagaggttatcccggtcgtctgcgacaacattggtgaaagcacattgattccactggcgacctggtcgaagtggtgttgtctgcgtaagcaagagcggttatggaaacgatttatcgcccaaccggcgctggctattgccctgcagaaagatctgcaacctcgtgagagcaaaacgctggccctcacttcgcgcgaagcttaatccagctggtgttgttgcataaacggctcaccgcctaactgatacatctgccgtaaaatccacgcctgacggttacgcacgtagcccgatggcgaggagactttgaaacgaagtggattaggtaatacagctgccagtaatgcagcttccgaccgggtaagtttgctcgcgggtttgtggaaataacgttgtgccgcagcttcgacgccaaacacaccgtcgccaaattcggcgatattcaggtaaaccgtcaggatacgctttttgctccagaccgtttctatccccagcgttaatccggcttccagcccttttcgaacccagctacgcccatcccataaaaagagatttttggctgtctgttgagaaatcgttgaagcaccgcgaatacggttttcattgcgctcgttgtgcgccagggctttctcaatggaagcgacatcaaagccccagtgctcaggaaatttctgatcttctgcggcaatcaccgccagtcccatccacggcgagatttgatccatactgacccagtcagaatgtgccacgtaacgaaaattgccatgcagccaggcgctgacctgtcgctcgaccattaccgctgagaagggaacaggcgcaacgctaaacaacgcgatgcccccgccccagaaaacggcgaggacaaccattaaccgcaaaagaaaacggcgaacgaaactaaacaccgttaagcggcttttactcattcagccagaaccagcacgcgggaaaccagcttatcaatgccgctcgccgcttctgcaatgttctgcgccagcatatatgctggggtggtgacaatcttattgtcttcatcaaccacgatatcatcgacaggacacggcacatgctccgcgcccatctcttccagcacttctgcggtatcgatatcagtaccgatggtcaaacgcagcgggaaatcgaaaattttcggcagcatcgccggggcaatacacataaaaccaagcggttttccggcctgatgcatcgcttgtgccagcgcctttaattcacggtcaacggtgcattcgctaccaagactggcaaaattgcttaaattcttcgccgcgccaaacccccccggcacaatcaacgcatccagttcagcggcatcggcctgggccagaggacggatttcaccgcgcgttattcgtgccgcttcaatcagcacattgcgcgtttccgtcatcgcttcgccagttaaatggttgataacatcaacctgctgcttatccggtgcaaagcagaccgcctgcgcaccgctgcgtgaaatagctaacaacgtcaacaccgcttcatgaatttcagaaccgtcatagacgccgcatccgctcagaattacgccaattttcttcattgtgatcatcctttcgcaattgactgaaacacattaatttttttaataaaaatggtacgcatcacacatttaactgattcatgtaacaaatcatttaagttttgctatcttaactgcgtgcggcctgaaaaacagtgctgtgcccttgtaactcatcataataatttacggcgcagccaagatttccctggtgttggcgcagtattcgcgcaccccggtctagccggggtcattttttagtggcttttgccacccacgctttcagcacttctacgtcgtgacgccactcttctttcatctcttcaatccattcaccgacgttatcttcccaggccggaaggtcaggagactgaatttgctgacccagctgttgcagatggcgtaaccccactgaccccgccgcacctttaattttatgtccttcctcaacaatgccttttttatcctgcgccgtcagattcgactccagcacgctgacatagcccggcatcatcttctcaaacaccgctaacccgtcggtgatcagcttcggtcctacaagttcgagatactgttccagcatgggaatatcgagcaatgcttctgatttactgttctcttctgtcgtcaccgtactctcctcatcatcctgggtatcccagaatttcttgatcatcgcggttagcgccggaacagaaagcggcttactcagcacatcatccattccagcattgaggtactcttgtttgtctttcagcacgttagcggttaaggccaccagcggcggtaaatcctcgcgcggataacgtttcgtcagttcacgagagatatccagcccggtcatatctggcaactgaatatccagcaacaccaggtcgtattcgcccggtttaaacatctccagcgccgccttgccggtcatggcgacatcaacgctgttacctaatttttccagcacagaacgcgcaacaatcacgttcagttcaatgtcttccaccagcagcacattcagcgccggtaaaggcatatcgtcttcatcaaacgcatcatcgacctcttctgctaccgacggtgcgtggatcgtcaacgtaaaggttgaacctttgccctgttcgctggtaaccgtaatatcgccgcccatatttttcgccagacgacgagaaacggccagaccaataccggtgccggtggcaggtttaccgccatgactgtctttcacctggtaatacatggcgaaaattttatccagctcatcctgcggaatgccgataccagagtcttccacttcaaaatgcagcatatcgccttcatcgtagcgcacgcgcacggtaacctggccttgctgggtgaatttgacggcgttactgatgaggttccacaggatctgccgtaaacgcgtcccgtcggtaatgacctgatgcggtaatggcagcgtcggctccaggttaaagcgcaatcctttttgttgcgcctgcaatgcggagagattttccagatcggcaaggaagctggtgaaatcaaccggttgattatcaagctggaccttgcgccgttccatcttatccatgtcgataatatcgttaaagatattccccagcgtgacggccgaaacatggatggtcttgagatatttttcctgctcggcggtgagttcggtatccagcagaatgcggctcagaccgacgataccgttcagcggtgtacgcaattcgtgactgatggtggagataaacgtcgttttgtcgcggctggcccgttcaagcgcatcctgataccgcttacgctcggtaatgtcgcgaccaaagcccatcaaaccgtgacgtttacccacgcggtcgtagtacggcactttacggatttcaaagcaggctttgcgcccgtccgggtaatccagccactgttcataggtcagtgacacattatgacggaacactttttcatcggtttcaatgacttttgcggcggcttccggtgagtaaacatcagcaggtttcaggtgaaccagttgtttttcgctttttccggtcagcagctccatcgcgcggttacagccggaaaactctttatcttcgttacgataaaaaaccaggtcgggtgaagcatcaaggaaggaacgtaagaatgaggattgctgctcgagctgaatttgtgtctcttcgcgctctttgatttcaattttcagttggccgaaggtttcctgcagttctgcttccgctttttcacgaacggcaatttcctgatttagctgggcaatattatcttttaactgaacgttgaggctcaaatcgcgctcgcgcatctcctccagtttttgcaccagccgtgacagacgttgtcgtgactcctccagttgctcgacgaccaccgatagaaagtagaccgcccacggcgtaatcagcaaaccaaagaagatagaacgaataacatcaatgctttcgacctgaccatgcagcaccatggttaccgccatttgtaccacaatggcaagaacgacgagggccagcgccagcaacattgagaagcgcaccagacctaacttcatcatcaggtcaacataatactgcgccagcagacgaatttgcttcattagggaattccttcacgacaacctgccccaataatacccaattctgacagttacgttataaattgtgtgagaaatgcggaattcccctcaacgacctactccgttggaggtagccacggacgtcccagcgccgatccctgtacgccatgttcattcagatagcgatccagctcgaccattcccgtccatcgattttcgcaccacagcggagcaagcagcgtcgggcgacgggcgctggcggaaatgcggtggtagatcacttccggtggcgtatggcgaatcatttctccggcagtgagcgtgtaatcctccagttcaataccgttcaaacgccccgcttcccaggctttcgccataatgctgcctttcacaatatgcagcggatgcagctttatgccgtccacgccggtttcaaccactcgctccagcgtttgcaaacattcagcctgcccttcgccaggcaggccgacaattaagtgggaacacaccttcagcccgcgctgacgtgccagctgggttgtacgctgataacaggcaaaatcatggccgcggttgatgcgatgcagtgttttgtcgtgggcggtttgtagccccagctccagccacacttcgtaaccctggtccttatattcgcaaagcagatccagcaccgcatccggcacgcagtccgggcgggtacccacacacaaaccgacaatattggcctggctcaccgcctgctgatacatagaacgcagcacctgaacttccgcaaaggtgctggtatacgcctgaaagtaggccagatagcgtttagcgcggttaactaaattcgcctggtgcgccagttgctcggcaatggaacgatgctgctgcgcttcatcggcaaacgaggcaacattacagaatgtgcagccaccacgcccgatggtaccgtcacggttagggcagctaaaaccgccgtgcagcgtcagcttatgcaccttttgcccataacgacgggtgagatcaccaccaaacatattgactaatttctgtaactgcataatctgatagaccgcgccttgaaaagaggccaaagcctgccatttttagctcaattcggcgatgacctggatcaatcgtcccggcctgcttttatcaactgcataatcaatcaaaattaccgaaatttcatgcataatcacataaatcacttttgcttatcttgtgtcagatttttttatctcctgatggattttaggcaaaaacagtagcatgaaacgtcattaccaattaaggcagtataaaatgctggttttgtcgtcagttcaaggcaggataagggttaacacacctttatgacagtcaggaattgactgtttctctaacgacttcccttttagccttaaagataaaatccattttaatttcagtcatttaataaagaattttgcgctaaagcacatttctgtaccaataagcttgccatttgacctgtatcagctttcccgataagttggaaatccgctggaagctttctggatgagcagcctgctcatcatatttatgcagtaattgagatcccctcttcaccgtattaaccgatgcgaaaaggacaacaagggggcgaatgcgaggcgcgcgtatgacacgcaaaccccgtcgccacgctctttctgtgcccgtgcgcagcggttcggaagtggggttcccgcagagcctgggggaggttcacgatatgttgtacgataaatcccttgagagggataactgtggtttcggcctgatcgcccacatagaaggcgaacctagccacaaggtagtgcgtactgcaatacacgcactggcccgcatgcagcaccgtggcgcgattctcgccgatggtaaaaccggcgacggttgcggcttgctgttacaaaaaccggatcgcttttttcgcatcgttgcgcaggagcgcggctggcgtttagcaaaaaactacgctgtcgggatgctcttcctgaataaagatcctgaactcgccgctgccgcacgccgcatcgttgaagaagaactgcaacgcgaaaccttgtcgattgtgggctggcgtgatgtccccactaacgaaggcgtgctgggtgaaatcgccctctcctctctgccacgcattgagcaaatttttgtgaacgccccggcaggctggcgtccacgcgatatggagcgccgtctgtttatcgcccgccgccgcattgaaaagcgtctcgaagccgacaaagacttctacgtctgtagcctgtcgaatctggtgaacatctataaaggtctgtgtatgccgacggatctgccgcgcttttatctggatcttgcggacctgcgtctggaatcggccatttgcctgttccaccagcgcttctccactaacaccgtaccgcgctggccgctggcgcaaccgttccgctatctggcgcataacggtgaaatcaacaccatcaccggtaaccgccaatgggcgcgtgcgcgtacttataaattccagacaccgcttatccctgacctgcacgacgccgcaccgttcgtcaacgaaaccggctctgactccagttcgatggataacatgctggaactgctgctggcaggcgggatggatatcatccgcgccatgcgtctattagtaccacccgcctggcagaacaacccggatatggacccggaactgcgtgccttctttgactttaactccatgcatatggagccgtgggatggcccggcgggcatcgtgatgtccgacggtcgttttgccgcctgtaacctcgaccgtaacggtctgcgtccggcgcgctacgtcatcaccaaagataagctcatcacctgcgcctctgaagtcggtatctgggattaccagcctgacgaagtggtcgaaaaaggccgcgtcgggccaggcgaactgatggttatcgacacccgcagtgggcgtattctgcactcggcagaaaccgatgacgatctgaaaagccgccatccatataaagagtggatggagaaaaacgtccgccgactggtaccgtttgaagatctgcccgatgaagaagtgggtagccgcgaactggacgacgacacgcttgccagctaccagaaacagtttaactacagcgcggaagagctggactccgtaattcgcgtactgggcgaaaacggtcaggaagcggtcggttcgatgggcgatgataccccattcgccgtgctctccagtcagccgcgcattatttacgactacttccgccagcagtttgcccaggtgactaacccgccaatcgacccgctgcgtgaagcgcatgttatgtcgctcgccaccagtatcggtcgtgaaatgaacgtcttttgcgaagcagagggccaggcgcaccgtttaagctttaaatcgccgattctgctctactccgatttcaaacagctcacgacgatgaaagaggagcactaccgcgcagatacgctggatatcacctttgacgtcactaaaaccacgctcgaagcgacagtcaaagagctgtgcgacaaagccgaaaaaatggtacgtagcggcaccgtgctgctggtgctctccgaccggaatatcgctaaagatcgcctgccggttccagccccgatggcggttggcgcgatccagacccgtctggtcgatcaaagcctgcgttgcgatgccaacatcatcgtcgaaaccgccagcgcccgcgatccgcaccacttcgccgtgttgctgggcttcggcgcgacggctatttatccataccttgcctatgaaacgctgggccgcctggtagacacccatgcgattgccaaagattatcgtaccgtgatgctcaactaccgtaacggcatcaacaaaggcttgtacaaaatcatgtccaaaatgggcatctccaccatcgcctcttaccgctgctcgaaactgtttgaagcggtcggtctacacgatgatgtagtgggcctgtgcttccagggggcggtcagccgcattggtggggcaagctttgaagacttccagcaggatctgctgaatctgtcgaaacgtgcctggctggcgcgtaagcccatcagccagggcggcctgctgaaatacgtccacggcggcgaataccacgcctacaacccggacgtggtgcgcacgctgcaacaagcggtacaaagcggcgagtacagcgactatcaggaatacgcgaagctggttaatgagcgtccggcaaccacgctgcgcgatctgctggcaattacgccgggtgaaaacgcggtcaacattgctgatgttgaaccggcaagcgaactgtttaaacgctttgataccgccgcgatgtctatcggcgcgttaagcccggaagcccacgaggcgctggcggaagcgatgaacagcatcggcggtaattcgaactccggtgaaggcggcgaagacccggcgcgctacggcaccaacaaagtgtcgcgcatcaagcaggtggcttccggtcgctttggggttactccggcgtatctggtcaatgccgacgtcattcagattaaagtcgcccagggcgcgaagccaggcgaaggcggtcagttgccgggtgataaagtcacgccttacatcgccaaactgcgctattcggtgcccggagtgacgctgatctccccgccgccgcaccacgatatctactctatcgaggacttagcgcagctcattttcgacctcaagcaggttaacccgaaagcgatgatctccgtgaagctggtttccgaaccgggagtaggcaccatcgcgactggcgtggcaaaagcttatgcggacttgatcaccatcgcaggctatgacggcggcaccggcgcaagtccgctttcatcggtgaaatacgcaggctgtccgtgggagctggggcttgttgaaacccagcaggcgctggttgctaacggcttgcgtcacaagatccgtttgcaggtcgatggcggcctgaaaacgggtgtcgatatcatcaaggcggcgattctcggcgcagaaagcttcggcttcggcactggcccgatggtggcgctcggctgtaaatatctacgtatttgccatctgaacaactgcgcaacgggtgtagcaactcaggatgacaaactgcgtaagaaccactatcacggcctgccattcaaggtgacgaattactttgagtttatcgcccgtgaaacccgcgagctgatggcacagcttggcgtaacacgtctggtggatctgattggtcgcaccgacctgctgaaagagctggacggtttcaccgccaaacagcagaagctggcgctgtcgaagctgctggagactgccgaaccgcatccaggtaaggcactctactgcaccgaaaacaacccgccgtttgataacggcctgctgaacgcgcagttgctgcaacaggcgaaaccgtttgtcgatgagcgccagagcaaaaccttctggttcgatattcgcaacaccgaccgttctgtcggcgcgtcgctttcaggctatatcgcccagacgcacggcgatcaggggctggcagccgatcctatcaaagcgtacttcaacggcaccgcaggccagagcttcggcgtgtggaacgcgggcggcgtggaactgtacctgaccggtgatgccaacgactatgtcggtaaaggcatggcgggcggcttaatcgccattcgtcctccggttggttccgccttccgcagccatgaagcaagcattatcggcaacacctgcctgtatggcgcgaccggtggtcgtctgtatgccgcaggccgcgcgggtgaacgtttcggcgtgcgtaactccggtgctatcaccgtggtagaaggcattggcgacaacggttgtgaatatatgacgggtggtatcgtctgcattctgggtaaaaccggcgttaacttcggtgcgggcatgaccggcggtttcgcttacgttctcgatgaaagcggcgatttccgcaaacgcgttaacccggaactggtcgaggtcttaagcgttgacgctctggcgatccatgaagagcatctgcgtggtcttatcaccgagcatgtgcagcataccggctctcagcgcggtgaagagattctggcgaactggtcaaccttcgccactaaatttgcgctggttaaaccgaagtccagtgatgtaaaagcactgctgggtcaccgtagtcgtagcgcagctgagttgcgcgtgcaggcgcagtaaggggtagcaacaatgagtcagaatgtttatcaatttatcgacctgcagcgcgttgatccgccaaagaaaccgctgaagatccgcaaaattgagtttgttgaaatttacgagccgttttccgaaggccaggccaaagcgcaggctgaccgctgcctgtcgtgcggcaacccatactgcgagtggaaatgcccggtacacaactacatcccgaactggctgaagctcgccaacgaggggcgtatttttgaagcggcggaactgtcgcaccagaccaacaccctgccggaagtttgcggacgagtctgcccgcaagaccgtctgtgcgaaggttcctgcactctgaacgatgagtttggcgcggtgaccatcggcaacattgagcgctatatcaacgataaagcgttcgagatgggctggcgtccggatatgtctggtgtgaaacagaccggtaaaaaagtggcgattatcggcgcaggcccggcaggtctggcgtgtgcggatgtcctgacgcgtaacggcgtaaaagccgttgtcttcgaccgtcatccagaaattggcgggctgctgaccttcggtattccggccttcaagctggaaaaagaggtaatgacgcgtcgccgtgaaatcttcaccggcatgggtattgaattcaaactcaataccgaagtgggccgcgacgtacagctggacgatctgctgagtgattacgatgccgtgttccttggcgtcgggacttatcagtcaatgcgcggcgggctggaaaacgaagacgccgatggcgtgtacgcagcgctgccgttcctcatcgccaacaccaaacagttaatgggctttggtgaaacccgcgacgaaccgttcgtcagcatggaaggcaaacgcgtggtggtccttggcggtggcgacactgcgatggactgcgtgcgtacgtccgtgcgccagggagcgaagcacgttacctgtgcctatcgtcgtgatgaagagaacatgccgggttcccgccgcgaagtgaaaaacgcgcgggaagaaggcgtagagttcaaattcaacgtccagccgctgggtattgaagtgaacggtaacggcaaagtcagcggcgtaaaaatggtgcgtaccgaaatgggcgaaccggacgccaaaggccgtcgccgcgcggagatcgttgcaggttccgaacatatcgttccggcagatgcggtgatcatggcgtttggtttccgtccacacaacatggaatggctggcaaaacacagcgtcgagctggattcacaaggccgcatcatcgccccggaaggcagcgacaacgccttccagaccagcaacccgaaaatctttgctggcggcgatatcgtccgtggttccgatctggtggtgaccgctattgccgaaggtcgtaaggcggcagacggtattatgaactggctggaagtttaagcgaggtaacaatgaattcgccagactgtgtctggcgaatcaaattactgacgaagtgcgcgttgttttctggcaaatgcggcatgagcgtttgacctttcctataatagggataattttcaataaattgtgctttgttcaccaagtctgatgagtgaagcacatcaagcaatttctcatttacaatccgtctcaattacttgttaacacctctgacaataccgattctgcaagctattcagtcttttcattccatgtaaattgtctcgatattaatatacaaaatatgaatataaaaaaccaatatattatccttaattatctatatattttcctatttttcagcgcaaacattcatgtaatgaataattatcaccacaaactacctcaccagcaccttattattcacataatcgtaactataaaattcattaaataaatacatcccagcaagttggctatttctgaacgagttatttatttacattcacaaacagatatatatactgcttcagctttttattttaaaaaataaatttgttattaaggatatgttcatatgtttttcaaaaagaacctcacaaccgctgctatttgtgcagcactttctgttgcagcattcagtgccatggcaacagattcaactgatacagaattaactatcatcggcgagtatacccctggtgcatgtaccccagttgttacgggcggcggcattgttgactatgggaaacatcataacagtgcgctgaatccgaccggtaaaagtaataaactggttcaactgggccgcaaaaacagcacattaaatataacctgcacagcaccaacgctaattgctgtaacctccaaggataaccgtcagtcgaccattgtagcgttaaacgacacatcctatattgaaaaagcttatgatactctcgtagatatgaagggaacgaaaaacgcctttggtttaggttctgcgcctaatggacaaaaaattggcgctgcaaccattggtattgacaggtctaatggcgggattctcgcggcggacgatacaggtgaaattcctgtcgacctgattcaaactgaccactggtcagcagcgacccccacatggaaagcctcgtctaatggcgcattctgctcgctgacaagttgctcagcaatcgagcgcggttattctgttgcaaaaacaggggaactgacacctgttgccattacagcggtcaccttcccgttactgattgatgctgcggtaaatgacaatactattcttggttctgatgaaacgatcaaactggatggtaacgtcactatcagcgttcagtatttataagaacttgtaatacagtttttatttttacgcattaaccagttagctataactcggacagattatgccctatgacatggtctgtcttaatcaatctcatcgcaaacagtgcataacatatattaacaatatgtttctgcgttatttatcattattacaggagttttaatttaaatgctcagacacattacattcactgtatttataacaacatcaatgaataccttagccacagggatggttcctgaaacatcagtattgctggttgatgaaaagcgtggtgaagctagtattaatattaagaatacagatgatcatccttcattgctttacaccaccattgttgatttgcctgaaagcaataaatcaattcgtttaatcccgactcagcccgttattcgtgttgaagccggtcaagtacaacaggttcgatttttacttcaggcgactgttcctctgcaatcagaagagctgaaacgcgtaacgttcgaaggtattccaccaaaagatgacaagagcagcagagttactgtttcaattcgtcaggatctacctgtactgatccacccgacttccctgccggaagagcgagaggcctggaaattcctggaatggcgtaaaaatggcgaccaaattgagattagcaaccccagtaattatgtcgttcgtatgaccttacaatttaaaacgctcccttcaggaaaaacgggggctataaataagacctattttctaccacacaccagtacaactactgcattaacaaacgctacggatacaaaagtcgagttttacccagccagccgatatggttatcgcggtaataaatatgtcactgacttaaaataactttgcctggagcgacaaggatgttaaaaaaaacgttactggcctacaccattggttttgccttttctcccccagccaatgcagatggtatagagattgccgctgttgattttgatcgggaaacattaaaatcactaggtgtagatcctaatatatcgcattatttttcccgttcagcccgttttttgccaggtgaatattcactggcagtatcagtaaatggcgaaaaaaaaggcaacattgctacgcgctttgatgaaaatggcgacatttgtcttgatcaggcatttctgcaacaagccggtttaaaaattccttctgaagaaaaaaatggctgttacgactatatattgtcctacccgggtaccacaatcacaccattacctaaccaggaagcgttagatattatcgtttcaccacaggcgatcattcccatagggttggatctcacaaacgcagcaactggtggaacagctgcgctgctaaactactctctgatgagcagccgtgcagaattttctaatgggagttcggactactcccaggctgcacttgaaggcgggattaatattaatgactggatgttacgcagccatcagttccttacacaaacaaatggcacattcagtaaccagaactcgtcaacctaccttcaacgtacctttacagatcttaaaacactcatgcgagcaggtgaagttaacctcaataatagcgtgttggaaggagccagtatttacggtatcgaaatcgcaccggacaacgcattgcaaaccagcggcagtggtgtgcaagttactggtatagccaacacctctcaggctcgtgtcgagattcgtcaacaaggagttttaattcattccattctggttcctgcgggcgcattcactatccctgatgtacctgttcgcaatggtaatagtgatcttaatgtcaccgttgtcgaaacagacggtagttcgcacaactatattgttccctccaccctgtttaatcagcatgtagaaagcttccagggttatcgcttcgcgatagggcgggtagacgatgactatgacgaatcaccttgggtaattagtgcatcgagcggatggaatctgacacgctggagtgcaatgaacggcggcgttatcgtagcagaaaattatcaggcggcatcaatccggtcgagtctggttcccctgcccgatttaacagtgagcagccaaattagtacatcgcaggatacgaaagactcactgcaaggacagaaatatcgtcttgacgcgaactacaatctcccattttcacttgggctaacaaccagcctcactcgatctgatcgccattatcgcgaactgtctgaagcgattgatgatgattataccgatccgactaaaagcacttatgcgcttggtttaaactggtctaactccattctgggtggtttcaacatcagtggctataaaacatatagttacgacggtgacaatgactcaagcaaccttaatattaactggaacaaagcgttcaaacacgccacggtttccgtcaactggcagcatcaacttagtgcttcagaaaataatgaagacgatggtgatctgttctacgtcaacatcagtattccatttggcagatcaaacaccgccacactgtatactcgccatgacgatcataaaacccactatggtactggtgtcatgggagtcgtctcagatgagatgtcctactatgtgaatgctgaacgagatcacgacgaacgtgaaacgagcttgaacggcagtatcagttccaatctccattacacccaagtcagccttgccgcaggagcaagcggcagtgatagccgtacttacaacggtacgatgtcaggtggtattgccgtacatgatcagggagtgaccttttcaccgtggactatcaatgacactttcgccatcgcaaaaatggataacaatattgcaggtgtcagaattacatctcaggcaggcccagtatggacagattttcggggtaatgccgtcattccatcaatccagccgtggcgaacatcaggagttgagatcgataccgccagcttgccaaaaaatgtcgatatcggtaacggcacaaaaatgatcaaacaaggccgtggtgcagtagggaaagtcggattcagtgcgataacacaacgccgtgcattactcaatatcacactttccgacggcaaaaaactgcccagaggcgttgcgattgaagatagtgaaggcaactatctgacaacatcagtggatgacggtgttgtattcctcaataacatcaaaccggacatggtgctagatataaaagatgagcagcaatcatgccgtattcaccttacattcccagaagatgcaccaaaagatgtgttctatgagacagcaacaggagagtgccaatgaaacggataataacaggatgcctgctgctgaacttcgccatggccgctcaggcagagtgtaatatctccagtagcatacaaaatatcgactatggcaaacgaagtgctgccatgcgccaagttgaccggggtaaaacaacacaattagcagacagaacaatcacgctggtaatgcaatgcgatcaggacgctcatattcgtgttcagttgaataccgctaatatttccaacaacggatttggatttggcccgaatggttcattaaatctgatcgccagcgatgcattttcaggtagtaacaatctcgacctggcgttagccagtggcaaaaatgacaatccgggcagcacaggaacagcatcaattagtacttcccccaataattggctggtgtttatgcaaaatggtcaagaagtggtaattgatagcggtaaaagcgttagcctcacactgacaatggctccagcttttaaggatgaaggggaactaaccgacatgacagatattacaggcaatctgacggtcctggtggaggcaaaatgaacaatgtaaaattactgattgccggaagtgccttttttgccatgtcagcgcaagccgctgatagagtatcaattgacgttaaggtgactctggaagctgcagcttgtactccaatactaagcaacggcggagttgttaacttcggtagtcattcagtcaatagactttcaacgcagcactacacacagattggaacacgtaatattaatatgactataacttgcgaatccgctaccggcattgcgattaccgctcgtgatacacgaatggatagtatgaccaccggaaaagatagtgggggtcagagtggtgtaaaatataccttaaatggcggaggttatattagccagacaacgcgcttattcggcttagggaaaacaaaagataataaaaatatcggtagttatgccgtgttaattgatagcaacaacattagtgccagcaatggtagccagacgttagctgtatcaatagcaggtgcagatgccgtcataacagggcaaaaaagagcatggcaaacgctcaccgcttatccgcttgcagtcgatcaaagctattattacacctttgtaaaaccaggtgaaacaaccccaactcctgtaacgaacgccattataccgcttcaggtgagcgcatctatcgcgaatgatttaggcggttcagaaaaaatcgaacttgatgggaaagctgtgataagcgtagtctacttgtgataacaatgccggacaggagtactatcaggcattcgttttatacgatcggttaatgtttcaggaaagctcttcgcatatcttggggaaagtaaatgtaatacgctgttcttaattgttcagtgctcaccccccagagtatagctcattccattattcaacttagctccatataaagggacagataatggaatcgctctcagaaggaaccacagcaggctaccagcaaatccacgacggtattattcatctggtcgatagcgcccggacggaaacggtacgtagcgttaacgcgttaatgaccgcgacgtaccaggaaattggccgacgaattgtcgaatttgaacaaggtggcgaggccagggctgcgtatggtgcgcagctaatcaagcgactatcaaaggatttatgtctaaggtataagcgtgggttctctgcaaaaaacttacgccaaatgaggcttttttacctcttttttcaacatgttgaaattcgccagacaatgtctggcgaattaacaccattgcccaggtccacctacgtccgtttactttccgttaaaaacgctgacgcccgcagcttttatgaaaaagagacgctccgctgtggctggtctgttcgccagctagagcggcaaattgcgacccagttttatgagcggacactactgtcacatgacaaatcagccatgctgcaacaacacgctcctgccgagacgcatattcttccgcaacaggcgatacgcgatccctttgtgctcgaatttctggaattgaaagatgaatattcagaatccgattttgaggaggcgctgatcaaccacctgatggatttcatgctggaacttggggatgattttgcctttgttggtcggcagcgaaggttacgcattgatgacaactggtttcgtgtcgatctgctgtttttccaccgccgtttacgctgcctgctaatcgtcgatctaaaagtgggcaaattcagctatagcgatgccggacagatgaatatgtatctcaactacgccaaagagcactggacgctaccggatgaaaatccgcccatcggtctggttctctgtgcagagaaaggagccggagaagcgcattatgctctggcaggtttgcctaacaccgttctggcaagcgaatataagatgcaactacctgatgagaaacgactcgcagatgaactcgttcgaacacaggcggtgctagaggaaggctatagacgccgttaatttcagcggtttcgaattctgcagacagtgtctgcagaatctttaaaacgaactaagttttaagccattaaatcagccttaaccttcaccacaacctttttaatctctccaggctcgccgacaacgcatcctggtttatgcggttcacctggcataaacacggcgaacattcccggttttaagatgatggcttgctcgttatcaatggtgctgcaaagctgataatcatcctcatggtggaactcttcacactgacgcgcagtgcctgccatgccaaacagaatccgttcctcaccgtttaataacagctggatatcaatgtattgctcgtgcaattccgcttttttctcgacgggcgattgagtgttaaacgtcatgacattcataaagatattgtcgccctgtaattcgtaacgacccggcgctttttcttgcggtctggcagctaatgccagcgttaacgcgtcctgtaacgcaggatgtaacccagcagacggtaatgactgtacttcacccatcatcataatttttctccctgggccaacagcgcagccccaagtaaacctgcatcatggcggtaatgcgccgccagtaaatcaacatgaaatgccgctggctcctgcgccagatacgtttccaccagcgccagatacccttctgccagaccaacgctgccaccgaccaccacgcactggcaatcagttgtggctttaatatcagcgatcagccttgcaagcgtacgtgcggagcggtgaatcagctgctgcgcctgctcgtcaccctgcccggcgcgcgtgaaaatagttttcgcatccgcgccagccaactccccctgcgctgccgctgcaatgccgcgaccagaagcaatcgcttccacgcaacctgtgcgtccacagccgcagactgggccgtgtggatcggcaagcgtatgcccgatatgccccgccagaccgccagggccggtaagcagtttgcagccgctcactacaccgccgccaacgccggtggaaacggtgataaagaccatatcggttatatcgccatccagcgcctgaaactccgcccatgctgcggcctgcgcgtcgttaatggcaatggtcggcaaattggtaagttgttccagcgttttgactaacggaaagtgtagcaatccaccaagattatgcggattcagcgccagcaaactgccgtcgcgaataattccggttgaagcgatggcaacccgctgcgcatgagcttgcaacggagagactaatgcggataaggcatcacgcaaggcttctggtgtctggctggctggcgtaggaagttcacgacgatcgcggatctgcccgtcagcgccaatcagcgcggcggcaagtttagtaccgccgatatcaatcgccagtgtggtcatagcaccgcctttttcatcgctgtgttgtaccactgacaaatgtgctcaagacgcgtgattgcagaaccgaccgtcaccgcccacgcgccgtggcgcatcgcatccgccgcctgagcaggcgtgttgtaacgcccttcggcaatcacccgacatccggcgtcgctcaacgttttcaccagcgccagatccggctcttctggcgtttcaggcgtggtatagccagaaagcgtagtgccaataatttcggctcccagcttttggcatgccaggccgtcttccggcgttgagcagtcggtcatcgccagtaaaccgtgatggtgaatacgtgccagcagcgtttcaacaggcaccggacgcgggcggtcggtgccgtcaatggcgataatgtccgcgcccgcctgcgccagcgcatcaacatcttcaatataggccgtgatgcgtaccggagaatcctccagatcgcgtttcacaattccaataatcggcacgctcaccaccgcacgcgtggcttgcagatttgccacaccttcaatgcgaatggcaaccgcgcccgcctgttctgccgctaatgccatggcggcgacgatttcgggtttatcgagcgggctgtccggaaccggctggcaggagacaatcaggccaccgttagcagcgattttttgatccagttgtgcaagtaacgacatacatcttcccttagcgaaaggcccggtacatagaccgggcaacaggattaacttttggttttgactaaatcgtttttggcgctgccaaacggcacggcaccgctgaatggtttaccgtcgatagcgtcatgagtacgcaacgcttccgggcgcaaccaacgctgaacgcgagaaggcatatccagcccaatcagcaggatcaccacgaacgtcagactgaacgagagcgatgccagcgcagtacccagatccagacgttgagcgatcaacgcgccgatgattggggccagtgcaccgcccaatgcgccaacgttgtaggtaaagcccaggcccgctgcacgctggtcggtatcgaaataaccgccaatcagttttggtaagatcccggcgatcccttgtccaagcatttgctggaagaacagtaacagaccgagcacccagacgtttgcgccgccaatcgcaaataccggaataatcagcagctgcgaggccagcaggctacaaacgtacgctttgcgggttcccagccagtcaccgaggaagccacctacgcagcatcccaccgccgcgccaaagccactaaagaacagcacattggctacagtatgcgggttataagccagatcggttttcagatacgttggcagcagcgcctgaatcggccatgagtagaggaaagcaaacaacacgaccaccatcagcattacgcccgttggccagcgtttgcctgtactctgcaccataaagctgataaagattgcggcgcataacagcccaagaacagcgacgatcgcggcattttgcaggttaccggcgaagcagaaccacagcgcagtagccgccgccagtgtcattacgatattggcaatgcgatgttcaccacggtagagaatatccaccattgtgcgtactggtgctttacctgcgtgtttctctttccagtcttccgcttccgggatgtttttacgcagccagagagcaaagatgattggcaaaatgccgataaagaacagcgcacgccaaccccagaccggaaccaccaggctatagacctgagcggcaacgacggcccccacagagaagcctgaaatcaaaaaaccactggctttgttacgcagatgttttggccagctttcaatgacataggtggcgctggaaccgtattcacccgccatccccatgccgatgaccagacgagcgataaacatggtgatgtagcctggcgcaaagccgcaggccagcgtcccggccgagaagagaacgatgctggtgaccattgccagacgacgcccgtagcggtcacccatagcgccgagcatcaggccgccgaaccagcgagagataaaggctgcggagatcagacttgccgcctgcaccgtcgtcagcccgaattcaccctgtacttcggtgagtaccagggcgattaaaacgaaatcaaaaccgtcaagcagatatcccaaccaggcagcggaaaatgcgcgccattgtgcacggttgagatggcgataccacgggatattctgggttgtagtactcattgtgagtctcccgcggtgggcgatgcccacacgctttggtatgaaaattgtagggtacagatgcgtttatttcccctcacccggtaggggcgagcgaggggaaaacaactcacccgcgctcttgcatcaactgctgggccagcgccttcagttctggcagatatttttcatctaccggtccaaacggtttgcggcacagcggcacagaaacgacatccatataatgcaggatagttttcaggccgcggaatacgcccgttttgatcagtaaatcaatgactttgttgcactcagtttgcagtttctgcgcggtctggatatcgccttctttcagcgccttcacgatcccctgatatcgccagcccatgatgttgtaagtactgccgataccaccatcagcgcctgccagcaagccggaagcgaagatttcgtcgtaaccgttatagagcaccagatcaggatgttcacgacggatctgttccatctgatagagatcgccagaagtctgtttcagcgcaccgacgccaggcaacgtaaccagggtgttgatctgatccagggtcagttttaccccactcagggctggaatgttgtacaccaccatcggcaaaccatccgctgaatcaataattgcccgatagtgatcgcagtgttcttcaaagctgaaaggatagtagaacggcgtgacggcggagacggcatcgaagccataacgtttagccgatgccgcaagttgttggctttcggcggtgctgacgcaaccgacgtgggcgatgagtttaatcttacctttcgcctcttcggcgacgatttccagtacctgttcacgctcggaaaggctttgtacaaaggcctcgccggtcgaaccacccacgtataaaccgtcgatgccctgctgaatattgaactgaaccaggcgacgcagactcgctttatccagtgcttgttgttggtcaaaaggagtcaggagtgcagccattacgccacgtaaattcgttgccataaatacctctgaagtgatgcttgtctgataaacgatacacctttatacctgttataccagatcaattaagcaacaccctatacagaaagcttataatgcgatctgcttcactaaagtggcattatttctttttgttggtggtctgaccgaaagcgtgccaggtagcagagacgctgttgagatgcgattgcaacgcacgatcggcttcgtcaggatcatgacggcggatcgcatcaacgatcgcaatatgctgttgataactaacgttgttatgttcgtgcagtgcctgatcggtaaccgttgggcgtgcggcaataagccagtcgagcagggcaacgtggatcgccatgaagattgggttaccggggatctccgccagcacgcggtggaaatcaacgtctgaacgaatgaatgccgcgttattatccagcgactgactgttgatttccagtgcttttgccagtaaatcgatttgctcatcggtggcatgttcagccgcatagcgcaccagactggattcaaagaacagacgtaattgttcgaaatgggcaatcccaccgggatgagaaaggaaatctttcgccatgccggaaagctcaccgatgatagtgtccgcagaaggacgcgagacgcgagcgcgttcgccgttgtttatttgcaccagacctttgcgttttaacgctgccagcgcttcacgcaccgaaggacgcccgacgttaaagaacgccatcagttcgcgttcagacggtaattgttcaccttcgccaaattcacgacggcggatcatctgttccagctcttcttccaccatttcggagagttttttacgcgccagcgggcggctacgcaagttgcgaccaattgcaggtgaagaatcttcggtttgcgaatcaaatgcgttcataaggcccattctgtaaggtcagtgtgattaacatcatcagtgacatcctatcacaggattgaaagtaggggaaaatggcagggttttctctttgtgcctcatcattaccataattaacggaataattaactattgcgaaaaattaatgtaacgcagataaaaacatcccgtttgaattatttataagactattcacgagcattatgaatattatgaatgtgttcttacaaaataatcataagcgcatattttttaatgaaaaatcacctcacctacaattaaaaacacgacatccgcaccataaatagccttgcaaaaaatataacatcgttgttttcaatctgccgtttatgggattgaccgttttcttttgacacggagttcaacaatgttcggcataattatatctgtcatcgtattaattacgatgggctatttgatcctgaaaaactacaaacctcaggtggtgctggctgccgcaggtatcttcctgatgatgtgcggtgtctggttagggttcggtggtgtactcgatcccaccaaaagcagcggctacttgatcgtcgatatttataatgaaatcctgcgcatgctgtccaaccgcattgccggattggggctgtcgattatggcggtgggcggttatgcccgctacatggagcgcataggggccagtcgcgcgatggtgagcttgttaagccgcccgttaaaactcattcgctcgccgtatattattctgtcggcaacttacgtcatcggccaaatcatggcgcagtttattaccagcgcctccggtctgggtatgttgctgatggtcaccttatttccgacgctggtgagtctgggagtaagtcgcctctctgcggtggcggttatcgcaaccacaatgtccattgagtggggaattctggaaacgaactccatttttgctgcccaggtagcgggaatgaaaattgccacatacttcttccactaccagcttccggtcgcctcttgcgtcattatctcggtggcgatctcccactttttcgtgcaacgcgcttttgacaaaaaagataaaaatatcaatcacgaacaggcagagcaaaaagctctcgataatgtcccgccgctctattacgccattttacctgtgatgccgttaatcctgatgctcggctcgctgttcctcgcccacgtcgggctgatgcagtcagaactgcatctggtggtggtgatgttactgagtttgacggtgacgatgtttgttgagttcttccgcaagcataacttgcgcgaaacaatggacgatgtgcaggcgttttttgacggcatgggtacgcagtttgccaacgtggtaacgctggtggtcgcgggtgaaatatttgcgaaaggcttaacgacgattggcactgtcgatgcggttatcaggggggcggagcattctggtctgggcggtattggcgtgatgattattatggcgctggtcattgccatttgtgccattgtgatgggctctggcaatgcgccgtttatgtcatttgccagtcttattccgaatatcgcagccggactacatgtaccagcggttgtaatgattatgccgatgcattttgccacgacgctagcgcgcgcggtttcgccgattactgcggtggtagtcgttacgtcaggaattgcaggcgtttcgccttttgcggtggtgaagcggacagcgatccccatggcagtcggtttcgtggtgaatatgattgccacaatcacgctattttattaagtcattaaaaagacaaaacaggccgcctgggcctgttttgtattacttcacaacgcgtaatgccggtcgaccaccgcgtggtggctgcggaggttcatcgtcaggatgagtgtcatcatcgtgatctggcttgtcgccatcaataaccgacataacggtttcgttgtctgccgatgtctcttcatcattcatgatgctggtatcttcatcgtaggcagcttcaggctcaaacatcgtgcctgcgccattttcacgggcgtagatagccagcacggcagccagcggcacagaaacctgacgcggaatgccaccaaagcgcgcgttaaagcgcacctcatcattcgccagttccagattgccgacagcacgcggcgcaatgttgagtacgatttgcccgtcacgcgcatattccataggaacctgcacgccagggagcgtcacatccaccaccaggtgcggcgtgagctggttatccagcaaccactcatagaatgcacgcagcagatagggacgacgtggtgttagctgtgacaaatccatacagattaactccggcccagacgcatttcacgttctgcttcagttaaagaagcaaggaaagagtcacgctcaaagacgcgggtcatatagcctttcagctctttcgcacccgggccgctgaactcgatgcccagttgcggcagacgccacagcagcggagcaaggtagcaatcgaccaggctgaactcatcgctcaggaagtacggcttctgaccgaagaccggcgcaatcgccagcagttcttcgcgcagttgcttacgtgcggcatctgcttcagaagctgaaccgttgatgatggtgttcatcagcgtgtaccagtctttttcgatgcgatgcatgtacagacggctttcaccgcgagctaccgggtaaacaggcatcagtggcggatgcgggaaacgctcatccagatattccataatgatgcgagattcccacagggtcagctcacgatccaccagggtcggaacgctctgattcgggttgaggtcaatcagatcctgaggcggattgtccttttccacgtgttcgatctcgaaacttacacctttctcagccagcacaatgcggacctgatggctatagatgtcagtaggaccggaaaacagcgtcattaccgaacgtttgttggcagcgacagccatgaaaacctccaggtatagtcagaatttttactgctaccagccaccaggtggccagtcagaagttgtgttacccagtaaggaacgactctctttgttcgaaaatcaaacaaaaaatgagcaatacccgacatttgggcagaaaattggatgatagtttaccagattttgcgacctttgtggtgagtcgatgccggaaatggggaaaaagagatgcgctttagtctgaaatagttgacttagtcccttattggcgatgtggtttttgttttgcctgtctgtcagacggcagcaaaaagcaactttccattttttacgctgattcagaatttaaccataaaaaaacccgccgaagcgggttttttcgcaaattgttttctgccggagcagaagccaattaacgtttggagaactgcggacgacgacgtgctttacgcagaccgactttcttacgttcaacctgacgagcgtcacgagtaacgaagccagctttacgcagttcagaacgcagggactcgtcgtattccatcagagcgcgggtgataccgtgacggatcgcaccagcctgaccagagataccaccacctttaacggtgatgtacaggtccagtttctcaaccatgtcgaccagttccagcggctgacgaactaccatgcgggcagtttcacgaccgaagtactgttccagagaacgttggttgattacgattttaccgttgcccggtttgatgaaaacgcgagctgcggaacttttgcggcgaccagtgccgtagtattgattttcagccattgcctataatcccgattagatgtcaagaacttgcggttgctgtgccgcgtggttgtgctcgttacccgcgtaaactttcagtttacggaacatagcacgacccagcgggccttttggcaacatgcctttaaccgcgatttcaatcacacgctcaggacggcgagcaatcatctcttcaaaggtcgcttgtttgataccaccgatgtggccggtgtggtgatagtacactttgtcagtacgcttgttgccggttacagcaactttgtcagcgttcagaacgatgatgtaatcaccggtatctacgtgcggagtgtattccgctttgtgcttaccgcgcaggcgacgagccagttcagtagccagacggcccagagttttaccggtcgcgtcaacaacataccagtcgcgttttacggtttctggtttagctgtaaaagttttcattaaaagcttacccaataaatagttacacgttggtgaacacccaaacgtcttcaattgttgaggttcacacgacaaagtccggcaaacctaccccttcgaatagcctatgccagcacacaaaaagttttgggaaaaaaactttcttgtaacgtggggtcgcaggattatagagaagtcggggtcaaagatcgacccctttttgtgatttgtggcaggttttaacccgccaaatgctcgcgcttcagatactcttcgctttgcatctcttgcagacgtgacaggcaacgctggaactcaaacttcagccgctcaccctgataaatttcatacagcggcacttctgcactcaccactaatttgacatggcgctcgtaaaactcatccaccagcgcaataaagcgccgcgcttcgctctccatcaaccgcgtcataactggtacatcaaacaacatgaccgtatgaaagaggcgtgagagcgcaatatagtcatgctgactgcgggcgtcgacgcacagcgtagtaaaagaaaccgccagcgtctggttctcgacgcccattgtcgccaatggccgatggttgatttctaacgtcggtgaattttctcgtttcgcccccgccagagccaaccatagtttatccatttgcgcccggatttcatcgttgagtggcgaaagccacagatgcgcctgagtgagtgtacgcagtcgataatcaacaccagcgtccacgttcattacatcacaatgctgtttaatggcatcgattgcaggcagaaaacgcgcacgttgcaggccatttcgataaagttcatccggcggaatatttgacgtcgctaccagggtaataccgcgggcgaacagggctttcatcagaccgccaagtagcatggcgtcggtaatatcagaaacaaaaaattcgtcaaaacagagcacgtcagtttcggctttaaagcgatcggcaataatttccagcggatcggtctgcccctgtaaggcagttagctcttcgtgcacccgcagcataaaacggtgaaagtgcaggcgctgtttccgctctcccggcaggctttgatagaaaaggtccatcagccaggttttcccgcgtcctacaccgccccacatatataagccacgcactggcgtatgctttgtgtcttcgcgtttaccccacagcttaccgacccgcgccattagcccactcgtcctgggggctggtggcgtgctattgatgagttcctgataaataatttccaggcggctgacggcctctttttgaacgtcgtcgggttgatggctgccttcattgagcgccttcaggtattgcgatgttggggtaacgctttgcatgatcttattgttattccttgaataatcggtgcgccgttgttcacggttgacgaaaaaaaggccgttctacactacgcgatatgcagtcgggattccacttctgtggaattaacggttatagtggcataatcagccgcaggcatggagcctgaagccaacaccctacggaaacaaaagacaacgggagatgttcatgacctgggaatatgcgctaattgggttagtcgtcggcatcattattggtgctgtggccatgcgttttggtaatcgtaaactacgccagcaacaggcgttgcagtacgaactggaaaagaataaagctgaactggacgagtatcgcgaagagctggttagccactttgcccgcagcgcggaattactggataccatggcgcacgactatcgccagctgtatcagcacatggcgaaaagctccagcagcctgctgccggaactgtctgctgaagcaaacccgttccgtaatcgtctggcagagtctgaagccagcaacgatcaggcaccggtgcagatgcctcgcgactattctgaaggcgcatccggcctgctgcgtactggcgcgaagcgcgactaatttatttttcgggcgcagccattgcgccctcctcttctctccctccccgactatcatttaatctggtgtctcattgttagccgtctgaaaattcaataacatcaaactgttttgaatctcttttcttatcattcaggtacgagagcaggaataatgaaaaaacaaacccagctgttgagtgcattagcgttaagtgtcgggttaactctctcggcgtcatttcaggccgtcgcgtcgattccaggccaggttgccgatcaggcccccctccccagtctggctccaatgctggaaaaagtgcttccggcagtggtgagcgtacgggtggaaggaacggccagtcagggacagaaaatcccggaagaattcaaaaagttttttggtgatgatttaccggatcaacctgcacaacccttcgaaggtttaggctccggtgtcatcatcaacgccagtaaaggctatgtgctgaccaacaaccatgtgattaatcaggcacagaaaatcagtattcagctcaatgatgggcgcgagtttgatgcaaaactgattggtagcgatgaccagagcgatatagccctgttgcaaattcaaaacccgagcaaattaacgcaaatcgctattgccgactccgataaattgcgcgtcggtgattttgccgtggcggtcggtaacccatttggccttgggcaaaccgccacctctggcattgtttccgcattaggccgcagcgggttgaatcttgaaggtctggaaaactttatccagacagatgcttccattaaccgcggtaactccggcggtgcactgttaaaccttaacggtgagttaattggcatcaacactgcaatccttgcgcctggcggcgggagcgtcgggattggatttgccatccccagtaatatggcgcgaacactggcgcagcagcttatcgactttggtgaaatcaaacgcggtttgttaggcatcaaaggcaccgagatgagtgccgatatcgccaaagccttcaaccttgacgtgcagcgtggcgcgtttgtcagcgaagtgttgccaggttctggctcagcgaaagcgggcgtcaaagcgggcgatattattaccagcctcaacggcaaaccgctgaatagctttgctgagttgcgctctcgtatcgcgaccaccgagccgggcacaaaagtgaaacttggcctgctgcgtaacggcaaaccactggaagtagaagtgacgctcgataccagcacctcttcgtcggccagcgctgaaatgatcacgccagcgctggaaggtgcaacgttgagcgatggtcagctaaaagatggcggcaaaggtattaaaatcgatgaagttgtcaaaggaagcccagctgctcaggcaggcttgcaaaaagacgatgtgatcattggcgtcaaccgcgatcgggtgaactcgattgctgaaatgcgtaaagtgctggcggcaaaaccggccatcatcgccctgcaaattgtacgcggcaatgaaagcatctatctgctgatgcgttaatgtcgtaaaccgggcatcaggctgacgtgtgatgtccggttaactcgtggtatgctgctgccgttcccttttttaatgacgcctccatcatgtttgtgaagctcttacgttccgttgcgattggattaattgtcggcgctattctgctggttgccatgccttcgctgcgcagccttaacccgctttccactccgcaatttgacagtaccgatgagacgcctgccagctataatctggcggttcgccgcgccgcgccagcggtggttaacgtttacaaccgtggtttgaacaccaactctcacaaccagcttgagatccgcaccctgggatccggtgtaatcatggatcaacgcggttatatcatcaccaataaacacgtcatcaacgacgccgatcagatcatcgtcgccttacaggatggacgtgtatttgaagcattgctggtgggatctgactctctaaccgatctggcggtacttaaaattaatgccactggcggtttacctaccattccaatcaatgcacgtcgcgtaccgcacattggcgacgtggtactggcgatcggtaacccgtacaacctcgggcagaccattacccaggggattattagtgccacgggtcgaattggtctgaacccgaccgggcggcaaaacttcctgcaaaccgatgcttccattaaccacggtaactctggcggcgcgctggtgaactcgctgggcgaactgatgggcattaacacgctgtcgtttgataagagtaacgatggcgaaacgccggaaggtatcggctttgcgattcctttccagttagcaaccaaaattatggataagctgatccgcgatggtcgcgtgatccgcggctacattggcattggcggacgtgagatcgcaccactgcacgcacagggcggtggtatagatcaactgcaagggatcgtggttaatgaagtgtcacctgacggcccggcggcgaatgcgggtattcaggtcaacgatctgattatttcggtggataacaaaccggccatctctgctctggagacgatggatcaggtggcagaaattcgccctggttcggtgatcccggttgtagtgatgcgtgatgataagcagttaacgctgcaggtcaccattcaggaatatccggcaaccaattaagtcgagtgctcaaaacaaaaaaccggagtctgtgctccggttttttattattcgctaatcaattacttattaacgaactcttcgcccagggcgatatctttcttgagcgtatccagcataccttccagcgcgttctgttcaaatgcgctcagggtaccgatagatttacgctcttccacgccgtttttacccagcagcagcggttgagagaagaaacgggcgtactgaccgtcgccttcaacgtaggcacattcgacaacgccttgttcgccctgcagtgcacgaaccagagacagaccaaaacgtgcagctgcctggcccatagacagggttgcagacccgccaccggccttcgcttcaaccacttcagtacccgcgttctggatgcgtttggtcagatcagccacttcctgctcggtaaaactaacgccaggaacctgtgacagcagcggcagaatggtaacaccagagtgaccgccaataaccggcacttcaacttcgcctggctgtttgcctttcagttccgcaacaaaggtgttggaacgaatgatatccagcgtggtaacgccgaacagtttgtttttgtcataaacaccggcttttttcagcacttcagcagcaatcgcaactgtggtgttaaccgggttagtgataataccaatgcacgctttcgggcaggttttcgcaacttgctgtaccaggtttttcacgatgccggcgttaacgttaaacaggtcggaacgatccatacccggtttacgcgctacacctgcagagataagaacgacatctgcgccttccagcgccggagtcgcatcttcaccagaaaaacctttgattttcacagcagtagggatatggctcagatcgacggccacaccgggagtcactggagcgatatcatacagagagagttctgaacctgaaggcagttgggtttttaacagtagtgcaagcgcctggccaataccgccagcagcgccgaggactgcgactttcatcctaaactccttattatattgataaactaagatatgttgctccgctgccgcgaccttaatccacaaaattgccgtttacaatgaccacatctcaagaatgtgtagtcacgcaagtttagcgtttatgcatttaattgccgtaatcaggaacctaacttacgtaattaacagtcgcttatgcattagcgcaacattccaacaggtggtgacaatataccctaccgttcagccaaaacaacatcaatttgataacaattaatttacttttaagcagaatttgcatgccgtgacgcaggcatgtttctcaataacgaaatttgataaaatcccgctctttcataacattatttcagccttcttcagggctgactgtttgcataaaaattcatctgtatgcacaataatgttgtatcaaccaccatatcgggtgacttatgcgaagctcggctaagcaagaagaactagttaaagcatttaaagcattacttaaagaagagaaatttagctcccagggcgaaatcgtcgccgcgttgcaggagcaaggctttgacaatattaatcagtctaaagtctcgcggatgttgaccaagtttggtgctgtacgtacacgcaatgccaaaatggaaatggtttactgcctgccagctgaactgggtgtaccaaccacctccagtccattgaagaatctggtgctggatatcgactacaacgatgcagttgtcgtgattcataccagccctggcgcggcgcagttaattgctcgcctgctggactcactgggcaaagcagaaggtattctgggcaccatcgctggcgatgacaccatctttaccacccctgctaacggtttcacagtcaaagacctgtacgaagcgattttagagctgttcgaccaggagctttaatctctgccccgtcgtttctgacggcggggaaaatgttgcttatccctctcaaccccctgctttcccctgcgattaatttaacgaatagtgcgttttactgcgacatgtcattcacacaatgaatacataaggtaaaaaaagcacattatgcaaaattcattatctaattgaaaaaactagaattaacgataaataaccgtatttttaattcttttttgttattaaaattcacatttttaacacttagtatcaactgaaacagttagcgcggtattaattagctcaataattagtgtatacttgattttgtgatatgggtcacgaaacaaaggcccagctaaaagattatgtcgagttaaaaatcatgaaaatcaaaaccactgttgctgcattaagcgtactttctgttctctctttcggtgcattcgctgccgactccattgatgctgcacaagcacaaaatcgtgaagcaatcgggaccgtatccgtaagtggtgtggcgtcttcgccaatggatatgcgtgaaatgctgaacaaaaaagcggaagagaaaggcgcaacggcctaccagattactgaagctcgtagcggtgacacctggcacgctacggctgaactgtacaaataaaccctcatcgtcttgtccgacgatattgcccccggttcgggggcttttttttgcgctaatgacgaacattaaaacgcaaatgcccttccagctcttcctctgcctcatcaaacagcaatattaacgcgccaaaacggcgacgcgttttctctcccagatgaacaaattcaatctcaagtggtagcggcaggacatcgttcattaacacatcccatagtgagtcgagatcgcgtaccttatctttcgccagaccaaaggtttggctaaagtcacgataaaaatcctcctgactctcaatctcatcaaaatcaaaggtataaatattcatctgttgccaccgtcacgtttcgcggcgagttctgccgtgcatcgctaagtatagccatgaaaaaaccgacgcttttggcgtcggttttgacttaactatcggtcaacgcatgttgatacttatggagcatccccgccagccgatgaaccggttccgtcacctgcggtggagcttgccagatgcgtagcttttcctggtagatttccagttcttccagcaactgaccaaagtaccgacgacgtttatcatcgctacgggcagatatcacatggtctgctgtgcggcgcatttgtcggtgaaacgccgataaatcctcgttaaccgggatcggcgcatcacgcaggcgctggtgggcgataatcatcgtcagcgccaggcgaaatttcggcaaatcccctgggaacttattcatcagcaaaaacagctgctgataaagtgccgggaggtggttctctttacgacgtgccacattggtagtcatcgcggaaacagcggcagaaacaaactgattaagcagtacacgtccagtcctgtcgcgcgatttatcccgcaccagcaaaataacggtgaacgcgagcacacagccgacgatttgccctaatgcgctgtcgagaaactgactgaaatggaaagtcatcgggttatccagcacgataatatttatggtgctggccagtgcccccatcgagcccagtcgccgtttctgtacttctataccgaggaagaatcccagcactgccaggctaatacacagcagcaacatgctctgttgggtattagggataatcaccaaaaagtagagcagccctaacggcagcgcggccagcgtcccgtagataaagtcgatcgccaccatgcgtggattcggcaaacgcattgccagtgacgtcacgaccgcaatcatcaccattgcaccactaccggaagtccagcccgtccacagccagaaaagcgttcccagaatgcaggaaagtgtggttcgccagaagttaaccattgcatgatgacgttcggctgactctacttttacttccggttcgccttgcaggatctcttcttcggtggcgttgatttttgtgttactgataacgccgcgcttgagaagctgataacgcgttgccgccgcgacccagctataaatggtgacaggcgtttcccgttccccggtccaggcgataactcttcgcaggcgtttgagctgcttgtggacgtcctgcgcggtttctaccggtgtgtcaaaaaattcgcggaaagtatcagtgatcaattccgggcgcgtattctgaataagataagtttcgcaggattgggtaatcagcgtcagcgatagcgtattgatcgcttttaaacgtcgattggcccgcgcccagcgggaagattccatattcaggttgctgcgcataccttgtagcgccgtggtgcgtcgaaccaggtcgccccaggctttatcgacaacttcaccatcgccatgcttgatacagagttgcattaattgatattgcgcgaccagcaaactttccagctctcgatccacttcttgtttgatcgatcgcggagaaaagagcaaatccgccataattgcacacacaataccgataacgatctcgctacaacgttcgacggcaaactgcggcgtaagcaatggttcaggctgaatggtgatcacaatgatcagcgcggtataaccggccagcccccacgcatacgagttttctattcgtaccagcgaggatatccaggtacaaaaaccggcccagatacagcacaccagaatcatcaataatggtgcgcggatcatcgcaatgatgatcaccagtccggcaatacagccaataaatgtgccgatgatgcgcaaaaagccacgatagcgaatagcgccagaatacggttcacctcccgcagcaaaggccggaccggcagcaacaatcgccgctgtcagtaccgcccagcgtggcgtttccagctggaagtgaaagccaacaaacagcgccagtacaatggcggtcgccagttttaccgcaaagcgaatatgttggttagcaatggagaaaatacccatcgtgattaaccaaactcacgcaggcgatgggccattttacggaagaacgaatcctggctttcgtcgcgatcttgtttgccagtgaccaccactgtagcagtggtgcccgcaggccagatgttctcttgctggttgtcgagacgaatacgaaccggaacacgttgcgccaaacgcacccattcaaggttagagtcgatggtcgccatccctttgtcgtcacgcgtgctgctggcgttggtgaccccagcggcaacactatcaacagtccctttcagcactttgttactgccaagcggcgtgatctctgcacgatacccagggcgcaccccttccagcttagtttcttccatataggccagtacatagaaagagttctgtttcaccagcgcaaccgccgttgatccacgagtaataaactcaccggtatagacgttgaggttggtcacccagccatccgctggcgcgcggatcaccgtgcgttcaagatccagttttgccagatcgcgggtcgcctgcgctttcgctaactgatgcagaaccgtttgtagtacgttgttggcctggtcgatctcttcgcgagacatcgcctgcacaccgagacgattacgacgtccggcctcctggcgtttctcctgtgccagtacctgataataagcaacatcggcttgcgcttcctcaagcgccttttgatagcgcggctggtcgatggtgaacagtacctgtccttttttcaccagctggttatcatgaacattcacctgggtaatgagtccagaaacgtccggcgcgatcgcaacgacatcagcgctaaagcgcgcgtcacgcgtccacggggattcggtgtaatagacccaggcattaaaaattgcgatgaaggccagaatgactaatacgaccgtgatggccgtacgggagaattttcttattagtgttttcacttcaacctcaaacgaacagtcgcgatatcaaataaaacaagcagcaatagagcgcggtgttgaacaacgccggatgccagacaaagtcgtagatacctgttggcacaagtacccggcgcaccagccagaaaatcgccagtgataaaagcaattcaaaaaatatcggtgggaaggacagcccaaacaccacgataacgggaaacagactcatgtcgaccttggttgtatagagagagcaggcgttattattttcagcatctgtcgccgcagagaagggcatggaaagccgggcgagagcaacattgctgtagattgatatttaatatattagcgtaactgttatgctgttatctatattatgtgatctaaatcacttttaagtcagagtgaataatggaacgactaaaacgcatgtcggtgtttgccaaagtagttgaatttggctcttttaccgccgccgccagacagctacagatgagcgtttcgtccatcagtcagacggtgtcaaaactggaagatgagttgcaggtaaagctgttaaaccgtagtacacgcagcattggtctgactgaagccggcagaatttactaccagggctgccgtcggatgctccatgaagtgcaggatgttcatgagcaactgtatgccttcaataacacccccatcgggacgctgcgcattggctgttcttcaactatggcacaaaatgttctcgccgggctgacagcaaaaatgctgaaagaatacccaggtttgagcgtcaatctggttaccggaattcctgcccccgacctgattgccgatggtctggatgtggtaatccgcgtcggcgcgttgcaggattccagcctgttttcccgccgtctgggcgcgatgccgatggtggtgtgcgccgcgaaaagctacctcacacaatacggcataccggaaaaacccgccgatttgagtagtcattcatggcttgaatacagcgtgcggcccgacaatgaatttgaactgatcgcaccggaagggatctcgactcgcctgatcccacaaggaagatttgtgactaatgatccgatgacgctggtgcgctggctgacggcgggtgccgggatcgcctacgtgccgctgatgtgggtgatcaacgagatcaatcgtggggagctggagatcctgctgccgcgttaccagtcagatccacgcccggtttatgcgttgtataccgaaaaagataaactgccgctgaaggtacaggtcgtgatcaactcgctgacggattattttgttgaggtcggtaaattgtttcaggagatgcatgggcgcgggaaagagaagtaattcatattgtactgttacgttgttcaaacctgtgccaacgggttcccctcaccctaaccctctccccaaaggggcgaggggaccgttcgtgcacgtagaaagattaattatccttctgaaaatagtgaaattattacgcagtaccgccaacagtcaggttatcgactttcaacgttggctggcccacgccaaccggcaaactttgcccttctttaccgcagacacccacgccgttatccagtttcaggtcgttgccaaccatcgaaatctgctgcatggtttcgataccggaaccaatcaacgttgcgcctttcaccggcttcgttactttaccgttttcaatcagatatgcttctgaagtggagaaaacgaatttgccggaggtgatatccacctgaccgccaccaaagttcggtgcatagataccgtactcaacggattcaataatttcctgcggggtcgatttacccggcagcatataggtgttggtcatacgcggcatgggcagatgggcgtaggattcacggcgaccgttgccagtcggcgtcatccccatcaaacgcgcgttgagtttatcctgcatgtagcctttcagaatgccgttctcaatcagcacgttgtactggcctggcgtaccttcgtcatcaatcgccaccgaacctcggcgatcgaccatcgtgccatcatcaaccacggtacacagttctgaagccaccagctccccgacctgtccactaaatactgaagtgccacggcggttgaagtcgccttccagaccgtgaccaaccgcttcatgcaacagcacgcccggccaacctgcgccaagtactaccggcatggtgcccgctggtgcagcaacggcagaaagattgaccagcgccatacgcactgcttcttttgcccatgcatccgcacggacttcgccgtcgagatcggcaaggaagaattcataaccaaaacgaccgccgccgccactggcaccgcgttcgcgtttgccatcttcttcgacgagaacgctcacggaaagacgcaccagcggacggacatccgccgctagcgtgccgtcggtggccgcaaccaaaattaattcatagacaccactgaggctggcagtcacttcctgtacgcgcttgtccgcttcgcgggcaaccttatcgacgcgacgcaggatatccagcttctcttcacggctcatgctttgcagcggatctaccgaggtatacaacgggctatgctctaccgcgcccagcgtctgtactttaccatcaccactatcacggacgatggtgcgcgccgcttgcgcactctgttccagcgccagcaggctgatttggtcagcgtaagcaaatccggttttttcaccgctgattgcacgcacaccaacgccctgatcgatgttgtaagaaccatctttaataatgcggtcttctaaaacccaggattcgtgatagctcgactgaaaatagagatcgccataatcaaggcgacgttcggccagttgaccgaggatcgcgaacaagtcctgatgtttcaggccgttcgccgctagcaattgttcacttaccaggttaagactcatcgtttttgctactcgttagttactgcagtagaggattttttacggctgccggatgcggcgtgaacgccctatccagcctacggttatgttccggtttgtaggcctgataagacgcacagcgtcgcatcaggcaacggctgtcggatgcggcgtaaacgccttatccgacctacggttatgttccgtttgtaggcctgataagacgcacagcgtcgcatcaggcaacggctgccggatgcggcgtaaacgccttatccgacctacggttatgttccgtttgtaggcctgataagacgcacagcgtcgcatcaggcaacggctgccggatgcggcgtgaacgccctatccgacctacggttatgttctggctcgttggcctttggcaacgattatcctatgagattggggcaattacgcgccctcgtcaaatcattgcgctttttctttacgcggttggcgcaacacttcgttgatttgcggatcgtccagcggacccgaaatgtgatagcgcaaaatggagactttgctccacagcggccccagcactttactggcggcaaacactgccgcgccaacaatggggttaaccgcaaaagccgcagccacgcccaccgtcgcagaaatctctggtgcgacaaccgcttccatattcaggtcgcgacgtaccagatttaccgaccctttcatggcgatatccgcctccaggccatccaccagcgtgtcgtcggtgtgcataacgccgtctttaatccacgcggtgctgcgaatggagtcaaaatagaacccttcgccaaaagtgtctctgaaatcaaaacgcagcttacgcatcagggcatctacgctcaataagcgcagcaattgcccggcatgtccggtattgatttcggtaatttcgcctttacccagttgagtatgaatgatgccattcaacgtcgcttcatctggctgccagggtgctttgcgccagtgtaaatcgtaatccacattaaatgacgactggcgtatgggcgtcgtgacaccaaaaaattctgcggcggcatcaattttctgcccgcgcagttttcctttcagcgaggtacgttcattccccggattattaacccattcaccatcggcagtaagccgcgagaaaccagtatcaatcagtccattggtcagcgttaacgtatcgccagaaatggtgatatcactgtcaatgcgaccgaatttttgcccccagaaccagcactctgtgcatcgtatttgggcgtccggccagccacggaagttaatgcgctccgttgtcgggaaaggtgatgacggcgttgaatcaccacgagttttcgccacgctcgggttgtaataaagatatttgatattcgccagccacggcgcgttattacgcatcgctagcgtggcgttgatttcacgcccttgcgcttcaaccagggtgccatttgccgtcggttgcgaaacaatactcaggttattccattgctgatttcccagtgacaacataggcgtacgtaacgttatgtgttgtgggaaactcgctgcaccaccgacactctccgcagcgcctttctggaacagggccagccactcggcaccattcatcggcggcatattgagttcaacgccactttgttccggcaacggcgggagcgttttactgtctgccgcccaaatagcacgatcgagcgtcagcttttgaccgagcaaccagcggctattgaaatgattatccgcaccagcctgtccggttaattcaaagctgttgagattgccatcaaccttaacgtttaccgctagtggttcacccgcaggtttggctaacggtgaaggtaagtgactgctcacattctttagatcgccgttcagctctatgttataggtcgcaccagcatgataaggcagatcaatgcccactttaccatcccacgccacgctgccactcaatgcttcgttcaccgcttcaggcagaacgccggttttcgccggttgccagttaccgttgaggtttaccgctacctggtaggcttttgccccttctttggtggaaaaatccacgttcaacggctgattaaaccagcttgctgtcagtggttcactttgcagatcgctattgataaagctgaatttaccgctcaaatttttcagggtgctgtcgagtggtttgataaacagactgttattacgcagcgtcacttcacctttcgcggttaccagttcgccgttcagcgggatatcaagatgtaagcgagcattcacatcgccgtcgagctggagttcttgcagggtcgcccccagagaatctttcagcggtgtctcatcaaagtaagggccaacggctttacccggacctttaatgtcagcgtcaatcagcagtttttctttcgagtagtcagggatcactgcggtgagattactcgcgcgcacgccgcccagattaacgccatcggttttcatccataaaccgtcgttaataaagtccagttcaatatcaaggttagttaatgcaggccagtccggctggaaggcaaacttcgcgttgcgcagcggcaccagcacttcaaactgaccttcgttgtgtttataggggaagagttgcggattgccaccataaaccagcgtcgcgttatccgcttcaccgccctgaatcgcgccacttaagtaatcaaccaggtctttacccatcaagttttccgggaaatagcgccaggcttgtgaaccatcatcggtactgatgccagccagaatacccagccagggttcatcgttagcaggttgcaggtaacgaaaaccgccgcgcgcatggacggctttggctttaacgtcaatatcactcccatccagctggaaacctttgtcattgttcagccagcttatagttgcctggccgtcggcgatttccagtggcgcacggaataccgtttcgtaaggcatctttgcctgcttcatcgacgcggtaagcaaaccattttcaacgctgccggaaagcgtcccggagaagtgttccgcacccggtaataatttccattgcttccaggccagatcgctccacgatgcctgaaaacgggtcttgtctgccgcctgaagcgggatatccagcgccagagtgttaatcttgccgctcggttgtgtggagcgccaaacatcacccagtgcaggtgaaagtttcgcggccagcgggcgtatgccctccaggcctgccagctccagattactggcgcgaatccggagttcgtcactgcgtttattgtctttgccgccaacgtcctgttccggtatccaggctagcgtcaatgctccgctcggccagggtttgccgtccatcgtgatccgtgtatcgggaatagagaactgccagcccggattttcacgcgtaatatgcgcggtcagattattcaccgacagcgtatgcgtttgcttctcgcccaaccagctggcaccgccctgtttcagccagacgtcgccaccggttacatcgcctttatcgatcgtcatccagccttcaagggagaactgcgccgtttccagcgcaatattgtcctgcatccatttaccgagccacggcttcaggtcgatgtcatccgcctggagccagacgcgaccattgcttaacaagccctcatcatcgcgcaaatccatgcgcacctgcattacgccgtgctgtccggtaaggctggagaggcttaccagaccttccgcacggtgtcgacgtggatcgttcagccaggtgagttgtgggatcgccagctcggcgcgctgaccggatggcgtcaggaaactgacttcactgtcgcggagatcgaaatggtcaaattgacgaagaaacagatcgctgatgtggctggcttccagactgtcatcgctaccaccgctggtgataggagtgttggtgcgaaagcgcagctgccagaaagtgagatcgcgaaactgccagcgcatatgtaacaggctctgccagacatccagcgccagagtaacgcgtttaaccgaaaattcgccgccatcttttagttctgcacggatgtcgtgtgcttcaagcgtcgggccaaaattctgccagctggctgagagctgactggcttcaaccggcatgccagtcgcggattctattttgttgaggatttccggacgccaggcgtcaagatgcggtaaagcaatacgcaggccgctaaccagcagggcagcgatcacaacgagcgcggctccagtaagcagtaaaatccccggcaatcgcctcacccgtcactccttgtctgctaaaaatgtgactcaaaaaccctttgccggatggcggcccagcatctgtttacatcattacgacgtcaaactgctcctggttatagagcggttcaatttgtactttaacctgtttgccaacgaaaatttccacttccgccagcgagtgtgactcttcgcctttcaaggcttcggctactgccggagaagcatagaccaggaaacggtcggaatcgtaagcatggtggacacgaacaatctcgcgcatgatttcatagcataccgtttccacggttttcaccgttccgcgaccgtggcaggttgggcattcgttacacagtacgtgctcaatgctttcgcgggtgcgtttacgcgtcatctccaccagccccagcgccgaaaaaccattaacgctggttttcacccggtctttgctcaacgcctgctccagcgagtgcagcacgcggcggcggtgatcttcattattcatatcgatgaaatcaataatgataatcccgcccagattacgcaaccgtaactggcgagcgatagcctgcgtcgcttcaatattggtattgaaaatggtgtcgtccagattgcgatgaccgacaaacgctccggtattgatgtccacggtggtcatcgcttcggtctggtcgataatcagataaccaccggatttcagttctactttgcgttccagcgctcgctggatttcgttttcgacatcaaagagatcgaaaatcggctggcgtccggtgtaatgctccagcttgctggtcatctcgggaatgtactccgaggtaaactccagcaatgcttcgtaagtcaggcgtgagtcaacgcgaatgcggtccagttcggcgtcggcgaaatcacgcagaacacgctgcgccagcgccagttcgccgtacagctgataacgggtctgcgggcgttttttacgctccataactttggtccagacgcgtttcagataagcggcatcggaggccagttcagcctcgccaaccccttccgctgcggtacggatgataaacccgccctgctcgtcgcaatactctgcgaccacttttttcaggcgttcacgttctgattcgctttcaatacgttgggaaaccccaacgtgagaagcccctggcataaacaccagatagcgagaaggcagcgtgatatcggtggtcaggcgcgcacctttagtgccaagcggatctttcaccacctgcaccatcagatcttgcccctgacgaaccagttccgagatgtcgcgcaccgtgaattgcttttgttcttcacccgccacacattcggtgtgcggcatgatgtcagatgcatgaagaaacgcggctttatccagcccaatatctacaaaagccgcctgcatacccggaagtacacgacttacacgacccttgtagatattgcctactattccgcgtcgcgcctcacgttcaatatgaatttcctgcagaataccgccatcaatatacgccactcgcgtttccgaaggcgttacgtttactaacaattcagccgtcatgtttatcccttttctcacgcagtgcgttaaaattacttaataattcatacgtttcaaccagcggtaagccgactacggcgtgatagctgccatttatcttcctgacaaaacagccacccagcccctgaataccgtatgcacctgctttatctaacggttcaccgctggcgacatagcccgcgatgtcttcgtctgttaacgttctgaaagtcacatcggtgaccagcaggcaatcgagaatgtgctggctgtcagccaacgccactgccgtcatcacctgatgggtctgacccgataatttgcgcaacatctgcgccgcatgctctgcgtcgcgcggtttctccagcacttctccgttcaggataacgatagtatccgcacccagcaccgggagatcctgcgccgtttgcgcgacacccgcttgtgctttctcgcgtgccagacgcacaacatactgctgcgcgctctcctgcggctgacgctgctcctcaatgcccgtaacaatacgttcaaaggtcacgccaagttgcgcaagtaactcctgacgacgcggagaaccggaagctaaatacagagaagtcatagaaacctttattgcactgcaaactgctgacggactttacgcatcagcaagaaaatccacggccagagcaccccattgactacactactccagaacacttccggtctgaaagagacgttaatcactaaaaactctgcccagaaaacaataatatccaccaccagcgaaagcaacatgacgactagcgcctgctgccataatgcgaggttgcggaaaagctggtatttcagcgccaccaggtaagcaatgatgctcatcgccaatacgcgtacgccaagcgtcgagccgctgatcagatccagtatggcacccatcacaaaacctgtgcccacatttacgcgatggggcaaggccaggatccaatacaacaagataagtaacacccagtttggccggaaaacaatcaggttatccggccagggcatgatttgcagcaacagcgcaatgaggaaagagagccagattacccagcgtccctggctacgatagctcgccactattgccctcccggcgcacgcgcaggcggttgagcaccactttgcggcggcgtagccctttgtggagagcgattagcagcgggctgtgtcggcgcagcaggcgcagtagctgcatttcctgtcgtcggttgctgcggagtcggctgagcgatccccgttgccggttcaggtaactttggccccatcgcgtctggcgaaggcaatacctgcggcatcatctgcatcagacgttcattagcaacacgatgcacctcttccggcgtcatcgggttagcgccgttacgatctgccccccacagcagcaacagataacgcaaacgttgcagccctgcagtcggacgcgcctggatcacagtataagcgcgctgggtatcgagttttacggaagagacaaccgcgaccggatagccttccgggaaacgaccgcccagaccggaggtcaccaacacatcaccaacacgaatatccgtatttgccggcagatgctcaagctgcaaatcatccgtacaaccgttaccggctgcaattacgcggatatcgttgcgcagcacctggattggcagcgcgtgggtcgcatcacaaatcagcagcacgcgactggtcagtttagcgacggccaccacctgaccaacaacacctttgtcgctgatgaccggctggccttcataaacgccattaacgctacctttatcgataacaacttgatcgctataaggatcgttaaccgtggagataacctgagtcaccattttctgctcatcctgacgcagcggggaacccagcagctcgcgcagacgcgcgttctcctgtttgtattgtccaagcatcagcagttcactgtttttcagcaacagttcctgacgtaacgcccggttttcaagttctagttggtcacgcgaggccagcgtctgcgatacgccatccagcaattcacgaggagcattggaaacaaagtagaaaggactgacggcggtatccatataagtacggatttgactgaacgtccccaggcggctgtcggcaataataatgccgagcgccaccagcaccgccagaataaggcgaatctgtagcgacgggccacggctaaaaattggcttcataagttatgcgtattctcgtatcagaccaggcagggtaaacagacacttcccctgcctgcatccgattactcttcgctgaacaggtcgccgccgtgcatgtcgatcatttccagcgctttgccgccaccgcgcgccacacaggtcagcgggtcttcagcaacaacgactggaatgccggtttcttccattaacaaacggtcaaggttacgcagcagtgcgccaccaccggtgagcaccatgccgcgctcggagatgtcggaagccagttccggcgggcactgttccagtgcaaccattaccgcgctcacaataccggtcagcggttcctgcagtgcttcgaggatttcattggagttcagggtaaaaccgcgtggaacaccttctgccaggttacggccacgaacttcgatttcacggacttcatcgcccggataagccgaaccgatttcgtgcttgatacgttctgcggtggcttcaccgatcagagaaccgtaattacgacgcacatagttgatgatagcttcgtcgaaacggtcaccaccaatgcgcacagaagaggagtaaaccacaccgttcaaggagataacagcaacttcagtggtaccaccaccgatatcaaccaccatagaaccggtcgcttcagaaaccggcaggccagcaccaattgcggcagccatcggttcttcaatcaggaagacttcacgggcaccagcgccctgcgcggattcacgaattgcgcggcgttcaacctgggtcgcgccaaccggcacacaaaccagaacgcgcgggcttggacgcataaagctgttgctgtgcacttgtttgatgaagtgctggagcattttttcagtcacgaagaagtcggcgataacgccgtctttcattgggcgaatggcagcaatattgcccggcgtacggcccagcatctgcttcgcgtcatgacctactgcagctacgcttttcggtgaaccggcacgatcctgacgaatggccaccacggaaggctcattcaatacgatgccttgtccttttacataaatgagggtattcgcagtacccaggtcaatggacaagtcattggaaaacatgccacgaaattttttcaacatactaagggataatcctgaaagctggggcggaaaagaaaatccgcttactttaccaaccacacgcagcagcgacaaggcgcaaaaatcatctgctacggtgaaaattagtgcagttcgtttcctttgttacaaatctctgcctgagtccagaaaggcttaatgcatcagcagcattcctcgcctgtttgcaaccgcgtaaggtcattcatctgcatatgtgctgcaacaatctggcgagcagacaagcacactcccatgagacgcagcgcgcgttattctacgtgaaaacggattaaacggcaggttaaaccgagtatctttgtgaatattttttcacgttagtatcaagtggctgtgaggacgcgaaaaaatccccttgcccgcctgtaacaccgcgctgaatcagggtctgccactcgcttcgcgaacgcacgccggtggcgtaaacctgggtgctggtcccggagcaggcttccaccaggctttgaaccagcagctggttctccgttcgcttctcaatgtttctgaccagccccggatggagcttgagtaactcaacattaagttctttgatccaactggtacttaccagcgtcaaaccagcctggttgacggctacccgtacccctaaagcattcactaaacgaataacaggttgtaaacgactgatatgttgacctacatcggcctctgcaagttcaataattatgcgttttcgttgtgatttttcacattgcattaacgtatcgcgcagccaacgctgaaaacgcgggcgaatcagcgactcaacggtaacctgaatcgccagattttcctctggccagtaacgcaatagtggaataagacggctgatttgcagacggtcatactcttccgataagccaaactgcaagaccatcggcatatactccgccgagctaacctcttcattaccatcgaagatgcggcacatgagttcgcgatgatgaacctgaccttcgcgagtaaccgccggtttttgataaaggcgcgggccgccgcgactgagcatttgctcgataagcgtacgccagcgaacattaccgcgtcctttttcaggcaacgagtcatcgtaaatagcccagctattgccgccctgcaatcccgcattacgcgtggcagactctgcatgttccattacctgctcggtatcctgaccactacgccaggcgcagataccaatgtggatcatatcgtcgcgatcgagcattttattgttcggcaaggtatcaacggctttgattaactgaccggcgatgctctctgcctcttttaacgtccggtgcggtaacagcgcagcaaaatcactgcggtggtaacgcgccagcagtgcgccagggtagcgcatcataaatgtcgacagcagattcgtcagagtgaagaactgttcttcaacctggctgtgcccccaggtatcgctcaacatattgaaatccggcagacgaatcatcatcacgatcccgtgggtacctactttctcctgatcttccagtaacgttgctaactgattatcgaaaaagagtcggttattgaggccggttttcacgtcctgggcggcataagagcggatcagcgtatcaagacggctgtgttgttcgcgtgcgttctgaatttcacgaagcagcgtatccagcgcactgctggttctgggcggccattcatagatggttcccaacacattagagccacgctcaccgtttaagatacgagtagcccgggtttccagcaattcttgcccggcaagttgccgttgtaaccagcgtaccgccaggaagagcataacaatgataaagccaatcgcccccgtgagcggcgcggtggtcatcaacgaatggaaatagttgcccatcggatcctgataaaccagacgcaacgacatccccggatgctttatcaacggaacgctcagttcgcgaaacagatcgctggagccaactggacgataactaccatttctggccagggtataaacctgtttatcaccatggagcaggtctacacgaacgatatctgccgacatcattaattcggtaatttgtggccttaatacgctgaagtcattcgacacaaggtgggtatcaatcgccgtcgccaccgcctgaacgcgatgactaaacttatactgaatggcgttgtagaaacttagcgaacagcccagcaaagtcacaaaaattgttaacccggtgagcagcgtaacaaaggccgaaaatttcgtcgttaatctcatccttgtgttaactccgatagtgaggaagcgggcatactagcaaatcagatttatctcgcaatttattgcgcttcatcggctttgcttttccattagcgagtatagtcttcagaaattattttccaatccatcatgcacatgaggaccacttatgcaggcgttacttttagaacagcaggacggcaaaactctcgcatcagtacagactctggacgaaagtcgcctgccggagggcgatgtcacggtcgatgttcactggtcgagcctgaactataaagatgcgctggcgattaccggtaagggaaaaatcatccgtaattttccgatgattcctgggatcgattttgccggaactgtacgcaccagcgaagatccgcgttttcatgccggtcaggaggtgttactcactggctggggcgttggtgaaaaccactggggtgggctggcggagcaggcgcgagtgaaaggtgactggctggttgccatgccgcaagggctggacgcgcgtaaagcaatgattatcggtactgccggttttaccgccatgctgtgtgtgatggcgctggaagatgccggtgttcgcccgcaggacggggagattgtcgtgacgggtgccagtggtggcgtcggcagtaccgccgtggcgctgctgcataagttgggttatcaggtcgttgccgtttccggtcgcgaaagtacccatgaatatctgaaaagtttaggtgctagccgtgttctccctcgtgatgagtttgccgaatcccgtcctctggaaaaacaagtctgggctggggcaattgacaccgttggcgacaaagtgctggcaaaagtgctggcgcaaatgaattacggcggctgcgtggcggcctgtggtctggcgggtggttttactctgccaaccacggtcatgccatttattctgcgtaatgtccgtttgcaaggggtggattcagtaatgacgccaccagaacgccgcgcacaagcctggcagcgactggtcgccgatttaccggaatcattctatacccaggcggcaaaagagatatctctgtcagaggcaccgaactttgccgaggccatcattaataaccagatccagggtcgcacgctggtgaaggttaactaaccatttagcagggaataataagagagggaactcattttgaaatcattattcaatcggttaacgggaaaagcggttagccggacagctttcgtcgaacaccttggtcaggaagttatacaacatcatccaaactggaaagtcatgatttcgactgaccacaaattgatgcgcattgatactccactaaacagctattattgatacgcctccgtcgcctgttaggtttatggtgctttgcctgggcgacgctacgcttagccccttacttatttctggtaccatggggtgaataatctgattttgtttgactacaaattaatcactcgaacctatttaatgctgagcattgtcaatcggttaattttgcgtgctttagcattcacatctatccagacgatgcagtgaaaattgggtaatccccagcaaccgctgcgtaatgtcgtctatcttgtcgcgatcctggcatccctacattatttgtggtctgtgaagattatctcattgcagcccctcatcttcgcagggctggcttttcagcttttcaccttacgttataagaagttccgtcgatgatggcgctaatttcgtgaattgtgcggcttgttgcaaattacacggtgttgaaggttatttacatgttagctgttgattatcttccctgataagaccagtatttagctgccaattgctacgaaatcgttataatgtgcgacctcgtcctccctgacgcagtttttgcgctgcggaaaaggtgacattggcgcaacgaaggtatattttgttttttgccggaggatagcagcagatcgctgcacaatgtccgtcaagtctaacattgacactctggggcaaaatagaccggcgtcccggcctgctggaatttatcgctatgcatacagctgtcggggcatacgctttacagacggcggtgaaacgcctgtcacaatcacactaaacaaagagtacggaacccactcatggatattcgtaagattaaaaaactgatcgagctggttgaagaatcaggcatctccgaactggaaatttctgaaggcgaagagtcagtacgcattagccgtgcagctcctgccgcaagtttccctgtgatgcaacaagcttacgctgcaccaatgatgcagcagccagctcaatctaacgcagccgctccggcgaccgttccttccatggaagcgccagcagcagcggaaatcagtggtcacatcgtacgttccccgatggttggtactttctaccgcaccccaagcccggacgcaaaagcgttcatcgaagtgggtcagaaagtcaacgtgggcgataccctgtgcatcgttgaagccatgaaaatgatgaaccagatcgaagcggacaaatccggtaccgtgaaagcaattctggtcgaaagtggacaaccggtagaatttgacgagccgctggtcgtcatcgagtaacgaggcgaacatgctggataaaattgttattgccaaccgcggcgagattgcattgcgtattcttcgtgcctgtaaagaactgggcatcaagactgtcgctgtgcactccagcgcggatcgcgatctaaaacacgtattactggcagatgaaacggtctgtattggccctgctccgtcagtaaaaagttatctgaacatcccggcaatcatcagcgccgctgaaatcaccggcgcagtagcaatccatccgggttacggcttcctctccgagaacgccaactttgccgagcaggttgaacgctccggctttatcttcattggcccgaaagcagaaaccattcgcctgatgggcgacaaagtatccgcaatcgcggcgatgaaaaaagcgggcgtcccttgcgtaccgggttctgacggcccgctgggcgacgatatggataaaaaccgtgccattgctaaacgcataggttatccggtgattatcaaagcctccggcggcggcggcggtcgtggtatgcgtgtagtgcgcggcgacgctgaactggcacaatccatctccatgacccgtgcggaagcgaaagctgctttcagcaacgatatggtttacatggagaaatacctggaaaatcctcgccacgtcgagattcaggtactggctgacggtcagggcaacgctatctatctggcggaacgtgactgctccatgcagcgccgccaccagaaagtggtcgaagaagcaccagcaccgggcattaccccggaactgcgtcgctacatcggcgaacgttgcgctaaagcgtgtgttgatatcggctatcgcggtgcaggtactttcgagttcctgttcgaaaacggcgagttctatttcatcgaaatgaacacccgtattcaggtagaacacccggttaccgaaatgatcactggcgttgacctgatcaaagaacagctgcgtatcgctgccggtcaaccgctgtcgatcaagcaagaagaagttcacgttcgcggccatgcggtggaatgtcgtatcaacgccgaagatccgaacaccttcctgccaagcccgggcaaaatcacccgtttccacgcacctggcggttttggcgtacgttgggagtctcatatctacgcgggctacaccgtaccgccgtactatgactcaatgatcggtaagctgatttgctacggtgaaaaccgtgacgtggcgattgctcgcatgaagaatgcgctgcaggagctgatcatcgacggtatcaaaaccaacgttgatctgcagatccgcataatgaatgacgagaacttccagcatggtggtactaacatccactatctggagaaaaaactcggtcttcaggaaaaataagactgcaaaagcgtcaaaaggccggattttccggccttttttattactggggatcgacaacccccataaggtacaatcctcgctttcttcacccatcagggacaaaaaatggacactcgttttgttcaggcccataaagaggcgcgctgggcgctggggctgacccttttgtatctggcagtttggttagcagccgcttacttacctggcgttgcccccggttttaccggctttccgcgctggtttgagatggcctgcatcctgacgccgctgctgtttattggactgtgctgggcgatggtgaaatttatctatcgcgatatcccactggaggatgacgatgcagcttgaagtaattctaccgctggtcgcctatctggtggtggtgttcggtatctcggtttatgcgatgcgtaaacggagcaccggcaccttccttaatgagtatttcctcggcagccgctctatgggcggtattgtgctggcgatgacgctcaccgcgacctatatcagtgccagttcgtttatcggcgggccaggagctgcttataaatacgggctgggctgggtattgctggcgatgattcagcttcctgcagtctggctttcactcggtattctcggcaagaagtttgcgattcttgcgcgccgctacaatgcagtgacgctgaacgatatgctgtttgcccgctaccagagtcgtcttctggtgtggctggcgagtttgagtttgctggttgcgttcgttggtgcgatgaccgtgcagtttatcggcggtgcgcgcctgctggaaaccgcggcgggtattccttatgaaaccgggctgctgatttttggtatcagcattgcgttatataccgcctttggtggctttcgcgccagcgtgctgaacgacaccatgcaagggcttgtgatgctgattggcaccgttgtgctgcttattggcgtggtacatgccgctggcggcttaagcaacgcagtacagaccttgcaaaccatcgatccgcaactggttacgccacaaggcgctgacgatattctgtcgcctgcctttatgacgtcgttctgggtactggtgtgctttggcgtgattggcctgccgcatactgcggtgcgctgtatctcttataaagacagcaaagcagtacaccgggggatcatcatcggtacgattgtagtcgcaatcctgatgttcggtatgcatctggccggagcgttaggtcgtgcagtgatccccgatctcaccgtaccggatctggtgatcccgacgttaatggtaaaagtgctgccaccttttgctgccgggatctttctggctgcacctatggctgcgatcatgtcgacaattaacgcccaactgctgcaaagttccgctacgatcattaaagatctctatctgaatatccgtccggatcaaatgcaaaacgagacgcgtctgaagcggatgtcggcggtaattacgttagttctcggcgcgttgctgctgcttgccgcctggaagccgccagaaatgatcatctggctgaatttgctggccttcggtgggctggaagccgttttcctgtggccgctggtgctgggtctttactgggaacgcgccaacgccaaaggcgcgctaagtgcgatgatcgttggcggcgtgctgtatgccgtactcgcgacgctgaatattcagtacctgggcttccaccctatcgtgccctcgttactactaagtttgctggctttcctggtcggaaaccgtttcggtacatccgtcccgcaagctaccgttttgactactgataaataaagagttttgccatgccttggatccaactgaaactgaacaccaccggcgcgaacgcggaagatcttagcgatgcgctgatggaagcgggtgccgtttctatcacttttcaggatacccacgatacgccagtatttgagccgctgccgggcgaaacgcgcctgtggggcgacaccgatgtgattggtctgttcgacgctgaaaccgatatgaacgacgtggtggcgattctggaaaaccatccgctgctcggcgcaggcttcgcgcataaaatcgaacaactagaagataaagactgggagcgcgaatggatggataatttccacccgatgcgctttggtgaacgactgtggatctgccctagctggcgtgatgtgccggacgaaaacgccgtcaacgtgatgttagatccagggctggcgtttggtacgggtacccatccaaccacctctctgtgcctgcaatggctcgacagcctcgatttaaccggtaaaacagtcatcgactttggctgtggttccggcattctggcgatcgcggcgctgaaactgggtgcagcaaaagccattggtattgatatcgatccgcaggcgattcaggccagccgcgataacgccgaacgtaatggcgtttctgaccgtctggaactctacttaccgaaagatcagccagaagaaatgaaagccgacgtggtggtcgctaacatccttgcaggcccattacgtgaactggcaccgttaatcagcgtcctgccggtttcaggcggtttgctgggcctttccggtattctggcaagccaggcagagagcgtttgtgaagcttatgccgacagcttcgcactggacccggtcgtggaaaaagaagagtggtgccgcattaccggtcgtaagaattaaccttcgcatcgccgtagggtgacgcggggcgaagtgcgagcaagctcacaaaaggcacgtaaatttgccgattatttacgcaaatttgcgtgccaacattttcattcataaagaaaaattgagaacttactcaaatttctttgagtgtaaattttagtcactattttctaatatgatgatttttatgagtaattatcgcaccacgctcattttaaatgcaattctttgatccatctcagaggattggtcaaagtttggcctttcatctcgtgcaaaaaatgcgtaatatacgccgccttgcagtcacagtatggtcatttcttaactcatgcgcatcggacaatatcagctcagaaatcgcctgatcgcagcgcccatggctggcattacagacagaccttttcggacgttgtgctacgagatgggagccggattgacagtatccgagatgatgtcttctaacccacaggtttgggaaagcgacaaatctcgtttacggatggtgcacattgatgaacccggtattcgcaccgtgcaaattgctggtagcgatccgaaagaaatggcagatgcagcacgtattaacgtggaaagcggtgcccagattattgatatcaatatgggttgcccggctaaaaaagtgaatcgcaagctcgcaggttcagcccttttgcagtacccggatgtcgttaaatcgatccttaccgaggtcgtcaatgcagtggacgttcctgttaccctgaagattcgcaccggctgggcaccggaacaccgtaactgcgaagagattgcccaactggctgaagactgtggcattcaggctctgaccattcatggccgtacacgcgcctgtttgttcaatggagaagctgagtacgacagtattcgggcagttaagcagaaagtttccattccggttatcgcgaatggcgacattactgacccgcttaaagccagagctgtgctcgactatacaggggcggatgccctgatgataggccgcgcagctcagggaagaccctggatctttcgggaaatccagcattatctggacactggggagttgctgcccccgctgcctttggcagaggttaagcgcttgctttgcgcgcacgttcgggaactgcatgacttttatggtccggcaaaagggtaccgaattgcacgtaaacacgtttcctggtatctccaggaacacgctccaaatgaccagtttcggcgcacattcaacgccattgaggatgccagcgaacagctggaggcgttggaggcatacttcgaaaattttgcgtaaacagaaataaagagctgacagaactatgttcgaacaacgcgtaaattctgacgtactgaccgtttctaccgttaactctcaggatcaggtaacccaaaaacccctgcgtgactcggttaaacaggcactgaagaactattttgctcaactgaatggtcaggatgtgaatgacctctatgagctggtactggctgaagtagaacagcccctgttggacatggtgatgcaatacacccgtggtaaccagacccgtgctgcgctgatgatgggcatcaaccgtggtacgctgcgtaaaaaattgaaaaaatacggcatgaactaattcaggttagctaaatgcttgattaaaaaggcgctactcggcatggggaagcgccttttttataggtgtcacaaagggagtgaccatgagaacaggatgtgaaccgacccggtttggtaatgaagctaagaccattattcacggtgatgcccttgccgaacttaaaaagctacctactgaaagcgtcgatctgatctttgccgacccaccgtataacatcggtaaaaattttgatggtctgatcgaagcctggaaagaagatctgtttatcgactggctgtttgaagtgattgcagagtgccaccgcgttctgaaaaagcagggcagcatgtacattatgaacagtacggaaaacatgccctttatcgatctccagtgccgcaagctttttaccatcaaaagtcgcatcgtctggtcatatgacagttctggagtacaggcgaaaaaacactacggctccatgtacgaacccatcctgatgatggtgaaagacgcaaagaactacacattcaacggtgatgctattctggtagaagccaaaaccggatcgcagcgcgcgttgatcgattatcgcaaaaatcctccacagccatacaatcatcaaaaagtaccgggtaacgtctgggattttccgcgcgtgcgttatttaatggatgaatatgagaaccacccgacgcaaaaaccggaagccttactgaaacgcattattctcgcctcttccaacccaggcgatatcgttctcgacccgtttgccggtagctttactaccggtgccgtagccatcgccagcggacgaaaattcattggtattgagatcaacagcgagtacatcaaaatggggcttcgacggctggatgtcgcgtcgcattactccgcggaagaactggcgaaagtgaaaaaaagaaagacgggcaaccggtcaaaacgatgccgggttagcgaagttgaccccgatctcattgcaaagtaaaggaagtgtaagcctggttttcagattattcatttcgtgtatatttcctgccagacttggttaaacatgcacaggctcaggtaatgattcgcaagtattggtggctcgtcgttttcgctgtcttcgtttttctgtttgatactttactgatgcagtggattgaactgctggcaacagaaacagacaaatgccgtaatatgaactcagttaatccactaaaactggttaactgtgacgaactgaattttcaggacagaatgtgaatttacatgacacttaattcattcgtttgatgaattaatttcgttatgttttcatctggcatgaacattcttaatacgttatcgaccagcgcgggtgcttgtttataaagatcataacccgccatattcattaaccagttttgaacaattccgctgaaggcaccatcaataataatcatcacaacatctaaatcgaggttatttgctacacaaccttgttgctgacacgcctgcaatacttcgcggagagtctgcggattaaagcccatcttttcgcgtatcactccctcggccagcatctcatcattaaattcacatttgtgatataagattttcagcaacgcctgctggcggggaattttggcaatatattgcaagccgacaatcaatttttcacgcaattgttgaaacgggtcatgctctaatccagccgtcaagtgttcctggattaactcccgcaatgaaggctgttgcaaccacatctcattaaacagttgggtcttgttctcgaagtgccagtagatagcgccacgcgtaacgttagcggcatcggcaatgtcgttgagcgtcgtcttgcttacgccatgttgcgcaaactgggcgatggcagtttcaatcagttcttgccgggtcttcagagcttcggctttggttctttttgccatgattaattattcaggaaataaatatattcgacacagggtgagaaaatagcgaaggttaatctatcatctaatgtgtatttatacgagagggtaacattgagttgctataaatcgtcaaataaataatatatattatttacctaaaatacattcgccacatgaatatatatttcaatttacgaggttttaattctgcctctttcaacccgcgtcaaaataaaacagtagaatattaatctttttttgtgtttatgtgccttgagacgccagtattcataactattccttacatcgacgaatgataatttgtaggatagcaaactgtatttttctttctgcgagttaacgcgttgcctttctgggtaaataacgcgcttttggttttttgaggaatagtaatgacgaaacatgccaggtttttcctcctgccctcctttattctgatctccgcggctttaatcgccggttgtaacgataagggagaagagaaagctcacgtcggtgaaccgcaggttaccgttcatattgtgaaaacggccccgttagaagttaagactgaattaccaggccgcaccaatgcttaccgtatagccgaagttcgcccacaggttagcgggatcgtactgaatcgtaatttcactgaaggcagcgatgtacaagcaggccagtccctgtaccagatcgatcccgcgacctatcaggcaaattatgacagcgcgaaaggcgaactggcgaaaagtgaagccgccgccgccatcgcgcatttgacggtaaaacgttacgttccgctcgtgggtacgaaatacatcagccagcaggagtacgaccaggccattgctgatgctcgtcaggccgatgccgccgtgattgccgcaaaagccacagtcgaaagcgctcgcatcaatcttgcttataccaaagtcactgcgccaattagcggacgtatcggcaaatcgactgtgaccgaaggcgctcttgtcactaatgggcaaacgactgaactggcgactgtccagcagctcgatcctatctacgttgatgtgacccaatccagcaacgattttatgaggctgaagcaatccgtagagcaaggaaatttgcataaggaaaacgccaccagcaacgtagagttggtcatggaaaacggtcaaacctatcccctgaaaggtacgctgcaattctccgatgtgaccgttgatgaaagcaccggctccataaccctacgtgctgtcttccctaacccgcaacatacgcttttgccgggtatgtttgtgcgtgcacggattgatgaaggcgtccaacctgacgccattcttatcccgcaacaaggcgttagccgcacaccgcgtggtgatgcaaccgtgctgattgttaacgataaaagtcaggttgaagcgcgccctgtcgttgccagtcaggcgattggcgataaatggttgattagtgaaggactgaaatctggcgatcaagtcattgtcagcggcctgcaaaaagcgcgtccgggagagcaggttaaagccactaccgatacccccgcagatactgcatcgaagtaaggtaatctgacatggcaaacttttttattcgacgaccgatatttgcatgggtgctggccattattctgatgatggcgggcgcactggcgatcctacaattgcccgtcgctcagtatccaacaattgcaccgcctgcggtttctgtttcagcaaactatccgggcgctgatgcgcagaccgtgcaggatacggtgacgcaggttatcgaacagaatatgaacggtatcgataacctgatgtatatgtcctccaccagcgattccgccggtagcgtgacaattacccttaccttccagtccgggaccgatcctgatatcgcgcaagtgcaggtgcagaacaaactccagctcgccacgccgttgctgccgcaggaggttcagcagcaggggatcagtgttgaaaagtccagtagcagctatttgatggtggcgggctttgtctctgataacccaggcaccacacaggacgatatctcggactatgtggcctctaacgttaaagatacgcttagccgtctgaatggcgtcggtgacgtacagcttttcggcgcacagtatgcgatgcgtatctggctggatgccgatctgctaaacaaatataaactgacaccggttgatgtgattaaccagttgaaggtacagaacgatcagatcgctgccggacagttgggcggaacgccagcgttaccagggcaacaattgaacgcctcgattattgctcagacgcggtttaaaaatccggaagaattcggcaaagtgaccctgcgcgtaaacagtgacggctcggtggtacgcctgaaagatgtcgcacgggttgaacttggcggtgaaaactataacgttatcgctcgtatcaacggaaaaccggcggcgggcctggggattaagctggcaaccggcgcgaatgctctcgataccgcgaaagccattaaggcaaaactggcggaattacagccattcttcccgcagggaatgaaggttctctacccttatgacaccacgccattcgtccagctttctattcacgaagtggtaaaaacgctgttcgaagccattatgctggtgttcctggtgatgtatctgttcttgcagaatatgcgagcaacgctgatccccaccattgcggtacccgtggtgttgttagggacgtttgccatcctcgccgcttttggttactccatcaacacactaacgatgttcgggatggtgcttgccatcgggctgctcgtcgatgatgcgatagtggtggtggagaacgtcgagcgcgtgatgatggaggataagctcccgccaaaagaagcgacggaaaaatcaatgtcgcaaattcagggcgcactggtgggtatcgcgatggtgctgtcagcggtatttattccgatggcattcttcggcggttctactggggcaatttatcgccagttctctatcaccatcgtttcggcaatggcgctttctgttctggtggcattgattcttacccctgcgttatgtgcaacgctgcttaaacccgtctctgctgagcatcacgaaaataagggcggtttcttcggctggtttaataccaccttcgatcatagcgttaaccactacaccaacagcgtcggcaaaatcctcggttccacaggacgatatttactgatctatgcgctgattgttgcaggaatggtggtgttgtttttacgtcttccgtcttccttcttacctgaagaggatcagggtgtctttctgaccatgattcagttacccgctggcgcgacgcaagagcggacgcaaaaagtgttggatcaagtgacggattactatctgaagaacgagaaagcgaacgttgaaagtgtctttacggttaacggctttagcttcagcggccaggcacaaaacgccggtatggccttcgtcagtctgaaaccgtgggaagagcgtaatggtgatgaaaacagtgcggaagcggtaatccatcgtgccaaaatggaattgggcaagatccgcgacggttttgtcattccattcaatatgccagccattgttgaactgggcacggcaacgggtttcgactttgagttaattgatcaggctgggctgggtcacgatgccctaacccaggcccgtaaccagttgcttggtatggctgcgcaacatcctgccagcttagtcagcgtgcgtcctaatggcctggaagacaccgcgcagtttaaactggaagttgaccaggaaaaggcgcaggcattaggtgtttcactttctgacatcaatcagaccatttcaacggcgctgggtgggacttacgttaacgacttcatcgaccgtggtcgtgtgaaaaaggtgtatgttcaggcggatgccaaattccgtatgctgccagaagatgtcgataaactttatgtccgcagcgccaacggcgaaatggtgccattctcggcctttaccacttcacattgggtgtatggctctccgcgactggaacgctacaacggtctgccgtcaatggagattcagggggaagccgcgccaggaaccagttccggcgatgccatggcgttgatggaaaaccttgcgtcaaaattacctgcgggcattggttatgactggacgggtatgtcgtatcaggaacgcttatcgggaaaccaggctcccgctctggtagcaatttcctttgtggttgttttcctgtgccttgctgcactctatgaaagctggtcaattcctgtctcggttatgttggtagtgccgttagggattgtcggcgtgctactggcggcaacactctttaatcaaaaaaatgacgtctactttatggtgggcttgctaacgacaattggcttgtcggccaaaaacgctattttgatcgttgagttcgctaaagatctcatggagaaagagggtaaaggtgttgttgaagcgacactgatggcagtacgtatgcgtctgcgtcctatcctgatgacctctctcgcctttattctcggcgtattaccgctagctatcagtaacggtgccggcagtggcgcgcagaacgctgtgggtatcggggtaatgggaggaatggtctctgcaacgttgctggcaatcttcttcgtaccggtgttctttgtggtgatccgccgttgctttaaaggataaatcagaaacataaaggcgctttcgggtgcctttattatttccagtgaaacccataaaaattaataagatattcttctgctcactctttaaaagctttctatagttcccgctcccttcactatttttacaattcacataatttgtcattattcattccgcaagatttataacctccggtgataaaatggcattcagctcgttaataagagagttaacttattaagcgttagcgtttattactgaggtaacaccatgaaaagattaattcctgtggcattgctcaccgcattgctggcgggctgtgctcacgattcgccctgcgttccggtttatgacgatcagggtcgtctggttcacaccaatacctgtatgaaaggcacgactcaggataactgggaaacggctggggctattgccggcggggcagctgctgttgctggcctgacgatggggatcatcgctctatcgaaataactgaacagggcgcggagttccgcgctctttttaacgatacagtatctctccataagataaaatattgctatattctgctgggtaattccctgctgatttagcatgttacatcgcgttatttcgctgctttcgaaataacgcatcaatttaattttcacacttcccaccagaaatatactcacgctaacaatcattattctgcttagtaaaacacgcgtaaatattttgcgccaaaatgtggcgcatgtttcattttcgcaccattgcggggcgctgtttttattatttcctgtctacactcagcttattgcgacgcgaaatcgtgcgcaaaagctggcactacttttgcttataagaggatggccacagacaggtaaaagacgtttcccaaacgtcctataacgataattttcgcctcacaggaagcattatgaaaaagatgatgatagccacactggctgccgccagcgtgctgcttgccgttgcaaatcaggcgcatgctggcgcgacgcttgatgccgttcagaaaaaaggttttgtgcaatgcgggatcagtgatggattacctgggttctcttatgccgatgctgacggtaagttttcaggtattgatgttgatatttgtcgtggtgttgccgctgctgtatttggtgacgacacgaaagtgaaatataccccgctcactgcaaaagaacgcttcaccgctttacagtcaggggaggtggatttgctctcccgtaatacgacctggacttcatctcgcgatgccgggatgggaatggcatttaccggcgtcacttattacgacggcattggcttcctgacgcacgataaagcggggctaaaaagcgcgaaagaactggatggcgctaccgtctgtattcaggcgggtactgataccgaactcaacgtcgccgactacttcaaggcaaacaatatgaagtacacaccggtgactttcgatcgctctgacgaatcagcgaaggcactggaatctggtcgctgcgatacgctggcctcggatcaatcacaactgtatgccctgcgcatcaaattaagcaacccagctgaatggattgtcttaccggaagttatctcaaaagaaccgcttggtccggtagttcgtcgtggcgatgatgaatggttctcgattgtacgctggacgcttttcgccatgctgaatgctgaagagatgggcatcaattcccagaacgtcgatgaaaaagcggctaatccagcaacgcctgatatggcacatctgctgggtaaagaaggcgattacggcaaggatctgaagctggataataaatgggcctataacatcatcaaacaggtgggtaactactcggaaatttttgagcgtaacgtaggttcagaaagcccgctgaaaattaaacgtgggcaaaataatctctggaataacggcggtattcagtacgcaccgcccgtgcgttaagtcggtgtgaggtaacgagcgtcgctacggcggcgctctcttcagcgttatgctttccgaggtttctatgtctcatcgccgctcaaccgttaaaggctcactctcttttgccaaccctacggttcgcgcctggttattccagatccttgccgttgttgctgttgtcggcattgttggttggttatttcacaacactgtaacgaatctcaataatcgtggcattacttcaggttttgcctttctggatcgcggtgctggcttcggtattgtccagcatttgatcgattaccagcagggcgacacctacggacgcgtttttattgtcggcttactcaatacgctactggtttctgcattgtgtattgtgttcgcttctgttttgggcttctttatcggtctggcgagactttcggataactggctgctacgaaagctttccacaatttatattgagatcttccgtaatattcccccgctgctgcaaatcttcttctggtactttgccgtgttgcgcaatttgcccggaccacgccaggctgtgagcgcgtttgatctggcctttttgagcaatcgtgggctttatattccgtcaccgcagctgggagacggatttattgcgtttatcctggctgttgttatggctatagtcctttctgttgggctattccgctttaataaaacataccagataaagaccggacaactgcgccgcacctggccgatcgccgcagtgttgatcattggtttgcctttactggcgcaatggctttttggcgcagcactacactgggatgtcccagccctacgaggctttaacttccgcggcgggatggttttaattcctgaactggcagccttaacgctggcactttcggtttatacatctgcatttatcgccgagattatccgcgctgggatccaggcagtgccttatggtcaacatgaagcggctcggtcactgggattacccaacccggttacgctacgccaggtcattattccccaggcattgcgggtgattattccaccgttaaccagccagtatctcaacatcgtcaaaaactcctctcttgccgccgctattggctatcccgatatggtttcgctgtttgccggcaccgtgctgaatcagacggggcaagccatcgagacgatagccatgaccatgtcggtctatctgattatcagcctgactatctcgctgctgatgaatatctataaccgccgcatcgcgatcgttgaacgctaaggagtcatgatgacaaaagtattgctgtctcatcccccgcgcccggcgagccataactcaagccgcgcgatggtgtgggtgcgaaaaaatctgttctccagctggagcaatagcctgctgactattggctgcatatggttgatgtgggaactgatcccaccgttgctgaactgggcatttttgcaggctaactgggttggctcaacgcgtgccgactgcacaaaagccggtgcctgttgggtcttcatccacgaacgatttggtcagtttatgtatgggctttacccacacgaccaacgctggcgaattaacctcgcattactgattgggcttgtgtcgatcgcaccaatgttctggaaaatactcccgcatcgcggtcgctatattgcggcctgggcggtgatttacccactgattgtctggtggctgatgtatggcggtttttttgctcttgagcgggttgaaacccggcaatggggcgggctgacgctaactttaattattgcatcagttgggattgcgggggcgctaccgtggggaatcttactggcgttaggtcgccgctcccatatgccgattgtgcgtatcttatcggtcatttttatcgaattctggcgcggcgtgccgctgattaccgttctgtttatgtcttcggtcatgctgccgttgtttatggcagaaggcaccagtatcgacaaattgatccgcgcgctggttggcgtgatcctgtttcagtcagcatatgttgcggaagtcgtgcgaggtggattacaggcgctgcctaaagggcaatatgaagcggcagagtcgctggcgttgggttactggaaaactcaggggctggttattctgccacaggcgttgaagctggtaattcctgggctggtaaataccatcatcgcactcttcaaagataccagcctggtgatcattatcgggttgttcgatcttttcagtagcgttcagcaggcaaccgttgatcccgcctggttgggtatgtcgacggaagggtatgttttcgccgcgctgatctactggatcttctgtttcagcatgtcgcgctatagccagtatctggaaaaacgttttaacaccgggcgtacaccgcattgaggacactatgagccaaattttactgcaacctgctaacgcgatgattacgctggaaaacgtcaataaatggtatggacaattccatgttttgaaaaatataaatttaaccgtgcaaccgggagaacggatcgttctgtgtggcccttcaggttccggtaaatcgacaaccattcgttgtattaatcatctggaagaacatcaacagggacggatcgtggtagatggcatcgaacttaatgaagatatccgcaatattgagcgcgtcaggcaggaagtgggaatggtctttcagcatttcaatctcttccctcatctgaccgttttacagaactgtaccctggcaccgatttgggtacgcaagatgcctaagaaagaggctgaagatctggcggtgcattacctagagcgggtgagaattgccgaacatgcgcataagtttcccggacagatttcaggtggtcagcagcaacgcgttgccattgcgcgttcgctgtgtatgaagccgaaaattatgttgtttgatgagccaacgtcggcgctcgatcctgagatggtgaaagaggtgctggatacgatgattgggctggcgcagtcgggtatgacaatgctgtgtgtaacacatgagatggggtttgcacgaaccgtcgctgaccgggtgatttttatggatcgtggggagatagtggaacaagctgcacctgatgagttttttgcgcatcctaaatcagagcgtacgagggcatttttatcgcaggtaatccattaattgaatgttagttcgaaaagcaaaaaggccatcctttcggatggcctttcgcttgatttgatgtctggcagtttatggcgggcgtcctgcccgccaccctccgggccgttgcttcgcaacgttcaaatccgctcccggcggatttgtcctggttgggagagtgttcaccgacaaacaacagataaaacaaaaggcccagtcttccgactgagccttttgttttatttgatgtctggcagttccctactctcgcatggggagaccccacactaccatcggcgctacggcgtttcacttctgagttcggcatggggtcaggtgggaccaccgcgctactgccgccagacaaattcttttctaatctgccgaactttaacctaaaaagtggtgctgatacccagagtcgaactggggacctcacccttaccaagggtgcgctctaccaactgagccatatcagcacgctaaatttgatgcctggcagttcccctacgtcttcggcctagtcgggagacccacactaccatcggcgctacggcgtttcacttctgagttcggcatggggtcaggtgggaccaccgcgctactgccgccaggcaaattctgttttatcagaccgcttctgcgttctgatttaatctgtatcaggctgaaaatcttctctcaatccgccaaaacaccttcggcgttgtaaggttaagcctcacggttcattagtaccggttagctcaacgcatcgctgcgcttacacacccggcctatcaacgtcgtcgtcttcaacgttcctttaggactctcaaggagtcagggagaactcatctcggggcaagtttcgtgcttagatgctttcagcacttatctcttccgcatttagctaccgggcagtgccattggcatgacaacccgaacaccagtgatgcgtccactccggtcctctcgtactaggagcagcccccctcagttctccagcgcccacggcagatagggaccgaactgtctcacgacgttctaaacccagctcgcgtaccactttaaatggcgaacagccatacccttgggacctacttcagccccaggatgtgatgagccgacatcgaggtgccaaacaccgccgtcgatatgaactcttgggcggtatcagcctgttatccccggagtaccttttatccgttgagcgatggcccttccattcagaaccaccggatcactatgacctgctttcgcacctgctcgcgccgtcacgctcgcagtcaagctggcttatgccattgcactaacctcctgatgtccgaccaggattagccaaccttcgtgctcctccgttactctttaggaggagaccgccccagtcaaactacccaccagacactgtccgcaacccggattacgggtcaacgttagaacatcaaacattaaagggtggtatttcaaggtcggctccatgcagactggcgtccacacttcaaagcctcccacctatcctacacatcaaggctcaatgttcagtgtcaagctatagtaaaggttcacggggtctttccgtcttgccgcgggtacactgcatcttcacagcgagttcaatttcactgagtctcgggtggagacagcctggccatcattacgccattcgtgcaggtcggaacttacccgacaaggaatttcgctaccttaggaccgttatagttacggccgccgtttaccggggcttcgatcaagagcttcgcgttaccgctaaccccatcaattaaccttccggcaccgggcaggcgtcacaccgtatacgtccactttcgtgtttgcacagtgctgtgtttttaataaacagttgcagccagctggtatcttcgactgatttcagctccatccgcgagggacctcacctacatatcagcgtgccttctcccgaagttacggcaccattttgcctagttccttcacccgagttctctcaagcgccttggtattctctacctgaccacctgtgtcggtttggggtacgatttgatgttacctgatgcttagaggcttttcctggaagcagggcatttgttgcttcagcaccgtagtgcctcgtcatcacgcctcagccttgattttccggatttgcctggaaaaccagcctacacgcttaaaccgggacaaccgtcgcccggccaacatagccttctccgtccccccttcgcagtaacaccaagtacaggaatattaacctgtttcccatcgactacgcctttcggcctcgccttaggggtcgactcaccctgccccgattaacgttggacaggaacccttggtcttccggcgagcgggcttttcacccgctttatcgttacttatgtcagcattcgcacttctgatacctccagcatgcctcacagcacaccttcacaggcttacagaacgctcccctacccaacaacgcataagcgtcgctgccgcagcttcggtgcatggtttagccccgttacatcttccgcgcaggccgactcgaccagtgagctattacgctttctttaaatgatggctgcttctaagccaacatcctggctgtctgggccttcccacatcgtttcccacttaaccatgactttgggaccttagctggcggtctgggttgtttccctcttcacgacggacgttagcacccgccgtgtgtctcccgtgataacattctccggtattcgcagtttgcatcgggttggtaagtcgggatgacccccttgccgaaacagtgctctacccccggagatgaattcacgaggcgctacctaaatagctttcggggagaaccagctatctcccggtttgattggcctttcacccccagccacaagtcatccgctaatttttcaacattagtcggttcggtcctccagttagtgttacccaaccttcaacctgcccatggctagatcaccgggtttcgggtctataccctgcaacttaacgcccagttaagactcggtttcccttcggctcccctattcggttaaccttgctacagaatataagtcgctgacccattatacaaaaggtacgcagtcaccccataaaagaggctcccactgcttgtacgtacacggtttcaggttctttttcactcccctcgccggggttcttttcgcctttccctcacggtactggttcactatcggtcagtcaggagtatttagccttggaggatggtccccccatattcagacaggataccacgtgtcccgccctactcatcgagctcacagcatgtgcatttttgtgtacggggctgtcaccctgtatcgcgcgcctttccagacgcttccactaacacacacactgattcaggctctgggctgctccccgttcgctcgccgctactgggggaatctcggttgatttcttttcctcggggtacttagatgtttcagttcccccggttcgcctcattaacctatggattcagttaatgatagtgtgtcgaaacacactgggtttccccattcggaaatcgccggttataacggttcatatcaccttaccgacgcttatcgcagattagcacgtccttcatcgcctctgactgccagggcatccaccgtgtacgcttagtcgcttaacctcacaacccgaagatgtttctttcgattcatcatcgtgttgcgaaaatttgagagactcacgaacaactttcgttgttcagtgtttcaattttcagcttgatccagatttttaaagagcaaaacttcgcagtgaacctttgcaggtacactctgaagtattttttatttaatcactacagagatggtggagctatgcgggatcgaaccgcagacctcctgcgtgcaaagcaggcgctctcccagctgagctatagccccataacatgtagttaaaacctcttcaaatttgccgtgcaaatttggtaggcctgagtggacttgaaccaccgacctcacccttatcaggggtgcgctctaaccacctgagctacaagcctgtagaggttttactgctcattttcatcagacaatctgtgtgagcactgcaaagtacgcttctttaaggtaaggaggtgatccaaccgcaggttcccctacggttaccttgttacgacttcaccccagtcatgaatcacaaagtggtaagcgccctcccgaaggttaagctacctacttcttttgcaacccactcccatggtgtgacgggcggtgtgtacaaggcccgggaacgtattcaccgtggcattctgatccacgattactagcgattccgacttcatggagtcgagttgcagactccaatccggactacgacgcactttatgaggtccgcttgctctcgcgaggtcgcttctctttgtatgcgccattgtagcacgtgtgtagccctggtcgtaagggccatgatgacttgacgtcatccccaccttcctccagtttatcactggcagtctcctttgagttcccggccggaccgctggcaacaaaggataagggttgcgctcgttgcgggacttaacccaacatttcacaacacgagctgacgacagccatgcagcacctgtctcacagttcccgaaggcaccaatccatctctggaaagttctgtggatgtcaagaccaggtaaggttcttcgcgttgcatcgaattaaaccacatgctccaccgcttgtgcgggcccccgtcaattcatttgagttttaaccttgcggccgtactccccaggcggtcgacttaacgcgttagctccggaagccacgcctcaagggcacaacctccaagtcgacatcgtttacggcgtggactaccagggtatctaatcctgtttgctccccacgctttcgcacctgagcgtcagtcttcgtccagggggccgccttcgccaccggtattcctccagatctctacgcatttcaccgctacacctggaattctacccccctctacgagactcaagcttgccagtatcagatgcagttcccaggttgagcccggggatttcacatctgacttaacaaaccgcctgcgtgcgctttacgcccagtaattccgattaacgcttgcaccctccgtattaccgcggctgctggcacggagttagccggtgcttcttctgcgggtaacgtcaatgagcaaaggtattaactttactcccttcctccccgctgaaagtactttacaacccgaaggccttcttcatacacgcggcatggctgcatcaggcttgcgcccattgtgcaatattccccactgctgcctcccgtaggagtctggaccgtgtctcagttccagtgtggctggtcatcctctcagaccagctagggatcgtcgcctaggtgagccgttaccccacctactagctaatcccatctgggcacatccgatggcaagaggcccgaaggtccccctctttggtcttgcgacgttatgcggtattagctaccgtttccagtagttatccccctccatcaggcagtttcccagacattactcacccgtccgccactcgtcagcgaaacagcaagctgtttcctgttaccgttcgacttgcatgtgttaggcctgccgccagcgttcaatctgagccatgatcaaactcttcaatttaaaagtttgatgctcaaagaattaaacttcgtaatgaattacgtgttcactcttgagacttggtattcatttttcgtcttgcgacgttaagaatccgtatcttcgagtgcccacacagattgtctgataaattgttaaagagcagttgcgacgcggctttcagctcactgtcgcgaggtggcgtatattacgctttcctctttcagagtcaaccctgaatttcaggatttttttctcttcgttgttccgaccatcctgtgaagtgtttcacgttgtcgtctcaacggaggcgcattatagggatcccaattttttgcacaagtatttttttgatctttttttctgtttgttgttttttcaccctttttgctgcaatcgcacacaaaacggtgcttttttgcatactaaaagacttgcacaaggccaataatgcccccaaagtcattagtaaatcatttattgctgaggtaagtatgtctgatgttttacgcccataccgcgatctttttccacaaatcggtcagcgcgtaatgatcgacgatagcagtgtcgtgattggtgacgttcgtctggctgatgatgtggggatctggccgctcgttgtgattcgtggagatgtacattatgtacagatcggagcacgcaccaatatccaggatggcagtatgttgcatgtcactcataaatcctcgtacaacccagatggcaacccattaaccattggcgaagatgtcactgttggtcacaaggtgatgctccacggctgcaccattggcaatcgagttttggttgggatgggctcaattttacttgatggcgcaatagtagaagatgatgtgatgattggtgcgggtagtctggtcccacaaaataaacggctggagagcggatatctgtatctcggtagccccgtcaaacagatccgcccgttaagtgatgaagagaaggctgggttacgctattccgcgaataattacgtgaaatggaaggacgaatatctggatcagggtaaccagacccagccttgatcatcttcactttgttcctgaattaagttttccgcttcttcttccaggtcccagcgatgctgacgaaaactcgctaaccactgttctggcgtatctccagtaaagcgatacgccagactctcgccagagatcgcgcatgtcagttgcataccattcacgagagcgggaaaacatacacattttttattctcgtcccactcttccctgtccggaaactggatggcctgattcacgcggacaattcctcctgcaattgctttataactggttctacgtcaggcagaacaccgtgccagagaagaaaggcatgagccgcctgtgccaccagcattcctaaaccatcagcattacgctttgagcctcgctgctcacaccatgccagaaaaggagtttttcctttctgatagaacatgtcatagcaataaatgcctggatgaatgagcgatgacgggatcgccggaatatcaccactgatgccactggatgttgcattaataatgagatcaaactcatgaccttccagttcgtccatactcaacgcctgaatactgccagtgtgcgcaaacaatttagccaactcttccgcgcgggataccgtccgattagttattgtcaccgcacagtccagggaaaggagtggcagtagtacgccgcgagatgctccaccagcgccgataagcagaatacgtaaaccagggcggataaaagacagacgttccagatcgcttaacaagcctacaccatcggtattgtcacccagcaggcgtccatcttctaaccgcatgagggtattaacagcaccagccaacgctgcccgttcagtaagctcatccgctctggcaaaagcctcttctttaaaaggcaccgtcacattcgcacctttaccaccagcactaaagaaagcgttcagtgtgttgatgaaatcattgatgggtgccaacacgcgcccatagggatgttcaatattcagttgctgagcaaattgctgatgaatgaatggcgatttgctgtgggctatcggattaccaaaaacagcataggtttccattatgttacccctgtcgaaacagttcacccgtcagggcatcgcggatttctgaaggatttaaacgcccccccgtttcaccaggcacaaccgggaacgccgcgccaaattgtgcgcgaacttcgtctactgttcgacaaggtggcaatccactcaagttggcactggtagaaaccagcggtttaccataagcctggcacaaagcaaccaccaacggatggtcggtgactcgtacagcaagcgaatcaaagcggcccgtcaaccagcgcggtgttgtcgcaggcgcgggaaagacaaaggtgacaggacctggccagcgggaaaaaatggtttcacgctgcacgtcagtcaacatggtgtcatcaatatagggtttaagctgctcgtaatttgctgcgattaaaatcagccccttatcaaccggacgctgttttaactccaacagtcgcatcactgctgtttcgctatcaggatcgcacccaacaccgaaaacggcttccgttggataggcgatgacacgttcttcattgagaacatctatcgcagctgcgatagcgtctctttgcaggttattattcacgttattattccgccgaaaccggctttccacattgtttactggcacaaaagtgttttacaccctgcgcggttttcttttcgatgagtagcggataatgacactcagggcattctccagctatgggtttgaagttaatggcaaattgacactccgggtagcgatcacaagagtgaaatgttttgccataacgggagcggcgctggaccagatggcccgtccgacattgggggcatgtaattgctgtttcgtccggtttatcgataagttcggtatgttcgcattcagggtagttaatgcaaccaataaacataccaaagcgtccctggcgtaataccagatttgcgccacatgcagggcaaacctgcccctccagaactttgacgatatgtccatccgctgaagatttcagaggacggacgtagtcacacgccggatactgtgagcatccaagaaacggaccgtgtttcccggatcgaataaccagttcagccccgcactttgggcaggactcattattacgcaccgtgaacagtgctgatttcgccataacaacttatgctgaattaaagaaatgattaatgcagcataccttcattcacttcaaagagtaattcttccatttgctggtacgcattttcgcagcccggaatattgaacaacaccatcaggatcacccatttcagatcatccagttcgaactctgcgttatccagcgcgagcactcgctctatcaccatttcacgagtttcaaggttgagcacctgaatctgctcaaggaaaagcagaaacccacggcagctggcatccagtcgttcacactcttccggtgtataaatacgcatggagagaggatccgaggccagttgcatcggttctgccaacccttcctgataatcagcaagtttttccagccatagcagggcattgtagatatcttctcgctcaaaacctgcgtcggtaagatcctgttcaagtttgtcttgatccacacgcaactcagcttctgtgtgaatataggtttcaaacaaatacattagtacgtcgaacatggcatgccctcctcaatcggacatagccgccgggtacagctgcgatccatcctgctaactccagttcgagtagttgagtaactacctctggcacaggttggccggcacgttcagcgacgacgtcaacaggtgttacctcatctcctacgttagccaggagctcaggaaatggcaatgccacgtcttgctgatctggtgaataaaatgaattttcaggggcgtctggcaaccagtgcaatccaaattgcaagttttccagaatttcttccggttccgtcacaagaatcgcaccttgttttattaaccagtgaggcccttcgcttcccggattccctattggacctggcaaggcaaaaacttctcgcccctgctcaagcgcacaacgtgctgtcaccagcgaaccactacgcaaagccgcttccaccaccagtacacctttacttagaccactgataatgcgatttcttcgtgggaaattgtaagcaaggggtggaacatcgaggggaaattccgagacgagagcgcccccctgttcaagcagactggcagccagtcgggcatgacggcggggatgaatggtattaagtccattccccaatacagcaatgctgacgccatttacctgtaaggctgctttatgcgctacaccatcgattccacgcgccagtccactcgtaattgtcactccacgcgtcgccagagtttcgcaaaataatcgtccccatcgctcgccataccatgaatgcgcccgactccccactacggcaagctgaaatgaatgcagcgcgtgcagttctccttcaacaaacagtgcgccggggtaatctgtcgtcgccagaagttgaggaggataaaattcgctgtccgcaggaattaaatgatggttgggttgctccaaccaacaaagtgagctttcgatactctttcgtggaaatgaaagaaagcgttgtgcctgccgcaatgtaagccctgtttgctgcaatacaaccgcatcaatatgcgactgttttgccacccagtgagcgatacggaccatatcatcgccgtacaagctgctgatactcattaaacgcagccaaatttctgtatcgaccatccttatctccctgccataagcagccttagcaatctttgcgattggtcagtgatgctgtcaatcagagggggatttgtctagaatagaagaaataatctttctaactcctgaacacatctctggagatttatgtcagttttgcaagtgttacatattccggacgagcggcttcgcaaagttgctaaaccggtagaagaagtgaatgcagaaattcagcgtatcgtcgatgatatgttcgagacgatgtacgcagaagaaggtattggcctggcggcaacccaggttgatatccatcaacgtatcattgttattgatgtttcggaaaaccgtgacgaacggctagtgttaatcaatccagagcttttagaaaaaagcggcgaaacaggcattgaagaaggttgcctgtcgatccctgaacaacgtgctttagtgccgcgcgcagagaaagttaaaattcgcgcccttgaccgcgacggtaaaccatttgaactggaagcagacggtctgttagccatctgtattcagcatgagatggatcacctggtcggcaaactgtttatggattatctgtcaccgctgaaacaacaacgtattcgtcagaaagttgaaaaactggatcgtctgaaagcccgggcttaaggataagaactaacgtgtcagaatcactacgtattatttttgcgggtacacctgactttgcagcgcgtcatctcgacgcgctgttgtcttctggtcataacgtcgttggcgtgttcacccagccagaccgaccggcaggacgcggtaaaaaactgatgcccagcccggttaaagttctggctgaggaaaaaggtctgcccgtttttcaacctgtttccctgcgtccacaagaaaaccagcaactggtcgccgaactgcaggctgatgttatggtcgtcgtcgcctatggtttaattctgccgaaagcagtgctggagatgccgcgtcttggctgtatcaacgttcatggttcactgctgccacgctggcgcggtgctgcaccaatccaacgctcactatgggcgggtgatgcagaaactggtgtgaccattatgcaaatggatgtcggtttagacaccggtgatatgctctataagctctcctgcccgattactgcagaagataccagtggtacgctgtacgacaagctggcagagcttggcccacaagggcttatcaccacgttgaaacaactggcagacggcacggcgaaaccagaagttcaggacgaaactcttgtcacttacgccgagaagttgagtaaagaagaagcgcgtattgactggtcactttcggcagcacagcttgaacgctgcattcgcgctttcaatccatggccaatgagctggctggaaattgaaggacagccggttaaagtctggaaagcatcggtcattgatacggcaaccaacgctgcaccaggaacgatccttgaagccaacaaacaaggcattcaggttgcgactggtgatggcatcctgaacctgctctcgttacaacctgcgggtaagaaagcgatgagcgcgcaagacctcctgaactctcgtcgggaatggtttgttccgggcaaccgtctggtctgatagtccactcttctaagcccggtcttgccgggcgtttttatacttatgaaaaaacaacgtaatttacgtagcatggcggcccaggccgttgaacaagtcgtcgagcaagggcaatcattaagcaacattctgccaccgctccagcaaaaagtttccgataaagacaaagcacttcttcaagagttgtgctttggcgtactgcgtacgctttcgcagttagactggctgattaataagttaatggcccgtccgatgaccggcaaacagcggaccgtgcattacctgattatggttggtttgtatcaactgctttatacccgcattccacctcatgctgcgctggctgaaacggttgaaggcgctatcgcaattaagcgtccgcaacttaaagggttgataaacggtgtattacgccagttccagcgtcagcaagaagagttattagccgagtttaatgccagtgatgcacgttatctgcatccttcctggttgctgaagcgtctgcaaaaagcgtatccagagcagtggcaatccatcgtcgaagccaataaccagcgtccgccaatgtggctgcgtattaatcgtacgcatcattcccgcgacagctggcttgcattgctggatgaagcaggaatgaaaggtttcccgcatgcggattaccctgatgctgtacgtctggaaacacctgcacctgttcatgcgctacctggttttgaagacggatgggttaccgttcaggatgcatcagcacaaggttgcatgacctggcttgcgccacaaaacggtgaacacattttggatctttgtgccgcccccggcggtaaaacaacgcatatccttgaggtggcaccagaagcgcaggttgttgcggttgatatcgacgaacagcgcctctctcgggtttacgacaatttaaaacgccttggtatgaaggcgaccgtgaaacaaggtgatggccgttacccttctcaatggtgtggcgagcaacagtttgatcgcattttattagatgcgccttgttcagcaaccggtgtgattcgtcgccatccagatattaaatggttacgtcgcgatcgcgatatcccggaactcgcgcaattgcagtctgaaattctcgacgccatttggccgcatttaaaaaccggtggaactctggtctatgccacctgttcggtgttaccggaagagaatagcctgcagattaaagcctttttgcaacgtaccgctgatgccgaactttgcgaaacaggaacaccagagcaaccgggtaaacaaaatctacctggtgccgaagagggcgacggcttcttttacgctaagctaatcaaaaagtgatgagataacgggtcgcgactgatgaaaattatcattctgggtgccggccaggttggcggcacactggcggaaaacctggttggcgagaacaacgatattactgttgtcgataccaacggtgagcgtctgcggaccttacaggataaatttgacctgcgggtcgtgcaggggcatggctctcatccacgcgtattgcgggaggcaggtgccgacgacgccgatatgctggttgctgtaaccagttcagatgaaaccaatatggttgcctgccaggtagcctactcacttttcaacacccctaatcgcatcgctcgtatccgctcaccagactacgtgcgcgatgccgataagctatttcattcagatgctgtgccgattgatcatctgatcgcaccagagcagttggttatcgataatatttaccgactgattgagtatcccggcgcattgcaggtggtgaacttcgctgagggtaaagtcagcctggctgtggttaaagcctattatggcggcccgctgattggtaatgcactttcgaccatgcgcgaacatatgccacatatcgatactcgtgtggcagcaattttccgccacgatcgccccattcgtccgcaaggttcgaccattgttgaagctggtgatgaagtgttctttattgccgcttcacagcatatccgcgcggtgatgagtgaattacagcgactggaaaaaccgtataagcggatcatgctggttggtggcggtaatatcggtgcagggctggcgcgtcgtctggaaaaagattacagcgttaaactcatcgaacgtaatcagcagcgcgctgccgaactggcggaaaagttacagaatacgatcgtcttttttggtgatgcgtcggatcaagaactactggccgaagaacatatcgatcaagttgatctgtttattgccgtcaccaacgatgacgaggccaatatcatgtccgccatgcttgccaaacgtatgggtgcgaaaaaggtgatggtattgatccagcgtcgcgcttatgtggatctggttcaggggagcgttatcgatattgcgatttcaccacaacaagcaactatttctgcgttgcttagccatgtgcgaaaagcagatattgttggtgtttcctcattgcgccgcggcgtagcagaagctattgaagccgttgctcacggtgatgaaagcacctcacgcgttgtcggcagagtcattgacgaaatcaagctaccgccaggaacgattattggagcggtggtacgtggaaacgacgtgatgattgccaatgacaatctgcgcattgagcaaggcgatcacgtaattatgttcctcacagataaaaagtttattaccgacgtcgaaagactcttccagccaagccctttcttcttgtaattaataaggcgtctaatgacgccttattattttcctttgattatcaaggattaattaaattcattcctggcaggaaaatggcttaacatttgttagacttatggttgtcggcttcatagggagaataacatgagcattattaaagaatttcgcgaatttgcgatgcgcgggaacgtggtggatttggcggtgggtgtcattatcggtgcggcattcgggaagattgtctcttcactggttgccgatatcatcatgcctcctctgggcttattaattggcgggatcgattttaaacagtttgctgtcacgctacgcgatgcgcagggggatatccctgctgttgtgatgcattacggtgtcttcattcaaaacgtctttgattttctgattgtggcctttgccatctttatggcgattaagctaatcaacaaactgaatcggaaaaaagaagaaccagcagccgcacctgcaccaactaaagaagaagtattactgacagaaattcgtgatttgctgaaagagcagaataaccgctcttaacaagcgcctgaaagcagaagaccagtggtaaaaaagtgatttactttcttgccactggcctcccagttcccccgattgccatgttttccttttcgcatgtaactgcctttccccttcttatttttctctacgcgctgtcggaataagggatcatgtagtaatgcttctatcgcattatcctttatctgccctttagtatgctgatatcgactcataaaaactccagttggttatttaacggcgcgagtgtaatcctgccagtgcaaaaaatcaacaaccactcttaacgccactcgccccttgttcaagagcttcaagaatcgaacaataaacactgctatgagcagtcccacaacaggcatcgttaaggccttgcaaggaacgctgcatactctgcaactcggctatccgtgcttcgacttcctgcaatctttcctgcacaatgccttttgactcctgacaggtatggtgttcaggatcgatgcggatcgacagcaactcgcggatcgactccagactgaaacctagttgtctggcatggcggataaatttcaatcgctggagatcgctttcggtatataggcgaaacccaccttcagtacgcacttcatgctccatcatctgctgtttttcgtaataacgaatcgtgtcgggtgttacttccgccatttttgccagctcaccaatgcgatacatacatactccactagttatcgttgattttgtccaacaacttgtcagcataatcgccgcgtaaaaaatcggtactcaatccagcttgtcgcagcttcaattccagtaatgacaatcgacggctaacctcttgatattgcggatcatcgtgacggatacctttgagaatatccagaagctgaattgcttctctccgttgctcaagttctggcggtaagcaaccggcattcttcagcaagcgataccccgcacgtaattccggtggcacgtgagaatcatcatccagtatcaatggttcgccgctacctgccaggttatcaaactcacctttcgcttgcgcttctgctatatggcgctctgcccactggtcaagtaaccacataaatactccaggggatgaacaaaaagagtacagctattgtagataagtggggatactacgggtataaaaaaacccgccggggcgggtttttttacgttgcttcagattactctgcagcagcttctgctttctctgaacgatcaaccagctcgatgtaagccatcggcgcgttgtcgcctgcacggaagccacacttcagaatacgagtgtaaccaccggcacggctcgcgaaacgcgggcccagttcgttaaacagttttgccacgatctcgttatcacgagtacgggcgaatgccagacgacgattagcaacgctatcagtcttggcaagagtaatcagcggctcaactacgcggcgcagctctttcgctttaggcagagtcgtcttgatgatttcatgacgaaccagtgaacctgccatattgcggaacatagcctggcgatggctgctgttgcggttcagttgacgaccactcttacgatggcgcatgaccttatccttctcagtaaaaccttaacctgtgatccggttactcgtcagcgatgcttgccggtggccagttttccaggcgcatgcccagagacagtccacgggaagccagcacgtctttaatctcagtaagagattttttaccaaggttaggcgttttaaggagctcaacctcggtacgctgtaccagatcaccgatatagtggatagcttctgctttaaggcagttagcagagcggacagtcaattccagatcgtcaacagggcgcagcaggatcggatcgaactctggtttctcttctttcacttcaggctgacgtacatcacgtaagtcaacgaaagcttccagttgttcagccagaatggttgccgcacgacgaatcgcctcttcaggatcgattgtgccgttggtttccatttcgatgaccagcttgtccaggtcggtacgctgttctacacgcgctgcttcaacattgtaggcaatacgctccacagggctgtagcatgcgtcgaccagcagacggccgattgggcgctcatcttcttccgaatgaattcgggtagaagccggcacataaccacgaccgcgctgaactttgatacgcatgctaatagacgcgttctcatcggtcaggtggcagatcacgtgctgcggcttgacgatttcgacatcaccgtcgtgggtgatatcggctgcagtcacagggccaatgccagatttattcaaggtaagaataacttcatctttgccctgaactctcaccgccagccctttcaggttgagcaggatttccaggatatcttcctgaacgccttctttggtgctgtactcatgtagtacaccatcaatctcaacctcggtcaccgcgcaacccggcatcgatgagagcagaatacggcgcagtgcgttacccagagtatggccaaagccacgctctaaaggctcaagggtcaccttggcgtgcgtcgaactcacttgctcgatatcaaccaggcgcggttttagaaactctgtcacagaaccctgcattgtgtcctctctttggtactaagctttacttggagtaaagctcgacgatcaggtgttcgttaatgtccgcagacagatcagaacgctccggcttacgcttaaacgtaccttccatcttgccagcatcaacttccagccaggttggcttttcacgctgctcagccagctccagagcggctttcacgcgagactgcttcttcgctttctcacgaatgcttacaacgtcattcggactaacctgataagaagcgatgttaacaacacgaccgtttaccataattgctttatggctaaccagctgacgtgcttctgcacgagtggcaccgaagcccatacggtatacaacgttgtccagacgaccttccagcagagccaacaggttttcaccggtgttgcctttcagacgtgctgcttctttgtagtagttacggaactgacgctccagcacaccatagatacggcgaactttttgcttttcacgcaactgcacaccatagtcagacagacgcggtttacgcgcaccgtgctggccaggagcttgttcaattttacacttggtatcgatcgcgcgaacgccagacttaaggaataagtcggtgccctcacgacggctcagcttgagcttaggacccaaatatcttgccattttctttctccaacaaacctggaaaacgaggcgttatacgcgacgttttttcggcggacgacaaccgttatgagggatcggagtcacatcagtaatgttagtgatgcggaaacctgcggcgttcagagcacgaatagtagattcgcggcctggacccggacctttaaccataacttccagattcttgatgccgtattctttcacggcgtcagcgcaacgctctgctgcaacctgagctgcaaacggagtggatttgcgagaaccacggaaaccggaaccaccggctgttgcccaacccaacgcgttaccctgacgatcagtgatagtcacgatggtgttgttgaaagaagcatggatatgagccacgccgtcagagacttgttttcttacacgtttacgtgcacgaattggtgcctttgccattattcaatcaccccgattatttcttgatcggtttgcgcggacccttacgggtacgtgcgttggtcttggtacgctgaccgcgaaccgggagaccacgacgatgacgcaaaccgcgatagcaaccaagatccatcaggcgcttgatgctcatgctgatttcacggcgcagatcaccttcaacgacaaatttggcaacttcgtcacgcagcgtgtcgatttgtccttcagacagctcactgatcttaacatcttcagcgatacccgctgcagccaggatggctttagaacgggtcttgccgacgccataaatcgaagttaatgcgattacggcatgcttatgatcaggaatgttaatgcctgctatacgggccactatgcactcctactatttaatatgtacgttccatgctgaaaagcccgttttcaggatactcaaatggaaacgcacagacatacaaaagattggctggctaatctagccagctcaacccaactttgcaagaaaaatatgcgaaaaaatcagccttggcgctgtttatgcttcggctcggcactgcaaatcacacggatgacaccatcacgcttaacgattttgcagttacggcataatttcttgacggaagcacgaactttcatttttactctccgtaacttctcgggcgaccaattatcggccgtagcctttcaggttcgccttcttcaatgcagactcatactgactggacatcatcagagtttgcacttgagccataaagtccataatcacgacaacaacgataagcagtgaggtcccaccgaagtagaacggtactttcattgcatcacgcatgaactccgggatcaggcagataaaggtaatatacagcgcaccaaccagggtcaggcgggtcattactttatcgatatacttcgccgtttgctctcccggacgaattcctggtacaaatgcaccggacttcttcaggttatctgctgtttcacgcgggttgaaaaccaacgccgtgtagaagaaacagaagaagatgattgcagacgcatagagtaacacataaagcggttgcccaggctgcaaatacagcgaaattgttgtcagccagttccaaccagtaccgcccccgaaccatgacgcgatggtcgccgggaacagaataatactggaagcgaagattgccgggattacccccgccatattcactttcagcggtaaatgtgtgctctgtgcagcatagacacgacgaccttgctgacgtttcgcgtagtttaccacaatgcggcgttgaccacgctcaacaaatacaacaaagaacgtcactgcaaatactaatactgcaaccaacagcaacacgaggaagtgcaggtcgccttgacgcgcttgctcgatagtatgggcaatggctggcgggagtcccgcgacaataccggcgaagataatgattgaaataccgttgccgatacctcgttcagtaatctgttcgcccaaccacatcaggaacatggttcctgtgaccagacttacaacagcggtgaagtagaatgcaaagcccgggttaatcaccaggccttgcataccaggcatattcggcagaccggtagcaataccgatcgactggaatattgccagcaccagagtaccgtagcgggtgtactggctgatcttacgacgaccagactccccttctttcttaatttctgccaacgttgggtgaaccaccgtcagcagctggataatgatcgacgccgaaatatacggcatgatccccagagcaaagatagaagcacggctgagagcaccaccagagaacatgttaaacatctcaatgatggtgcctcgctgttgctcaagcagtttggcaagtacagcggcatcaataccagggatcggaataaaagagccaatacggaacacaatcagcgcaccgataacaaacagcagtctgcgtttcagctcgcctaagccacctttggcactttgaaaatctaatcccggttgtttagccatctgctacttattcctcgattttaccgccagcagcttcgatagcagcacgagcgcctttagtaacacgcaggccacgaacagttaccggagtcgttacttcgccagccaggatcactttcgcgaactcgatctggataccgataatgttagccgctttcagcgtgttcaggtctactacaccgccttctactttagccaggtcagacagacgaatttcggctgtaatcgctgctttacgagaagtgaagccgaatttcggcagacgacggtacagaggcatctgaccaccctcgaaaccgcgacgtacgccaccgccagaacgagacttctgacctttgtgaccacgaccaccggttttaccgaggccagaaccgataccacgacccaggcgtttacccgcctttttggagccttcggccggagacagagtatttaaacgcatctcttactcctcaactttaaccatgaaggaaaccgcgttgatcataccgcgaatagcaggagtatcctcgcgctctacggtgtgaccaatacgacgcagacccaggccaagcagcgttgccttgtgtttcggcagacgaccgattgcactgcgggtttgagtaattttaatagtctttgccatggtttatttccccagaatttcttcaacggatttaccacgcttggcagcgaccatttctggagaattcatattttccaggccatcaatagttgcacgaaccacgttgatcgggttggtggaaccatatgctttagccagaacgttatgaaccccagcgacttccagaacggcgcgcattgcaccaccggcgatgataccggtaccttcggaagccggctgcatgaatacgcgagaacccgtgtgaacacctttaacagggtgttgcagagtgccgttattcagcgcgacgttaatcatattgcgacgggctttttccatcgctttctggatcgctgctggaacttcacgcgctttaccgtaaccaaaaccaacgcgaccgttaccatcgccaacaacagtcagagctgtgaaggagaaaatacgaccacctttaacggttttagatacgcggtttaccgcgatcagcttttcctgcagttcgccagcttgtttttcgatgtgagccatcttacacctctaccttagaactgaaggccagcttcacgggcagcatctgccagtgcctggacacgaccatgatattggaacccggaacggtcaaaggatacatctttgatgcctttttccagagcgcgttcagcgacagctttacccacagctgcagccgcgtctttgttaccggtgtacttcagttgttcagcgatagctttttctacagtagaagcagctaccagaacttcagaaccgttcggtgcaattacctgtgcgtaaatgtgacgcggggtacgatgtaccaccaggcgagttgcgcccagctcctggagcttgcggcgtgcgcgggtcgcacgacggatacgagcagatttcttatccatagtgttaccttacttcttcttagcctctttggtacgcacgacttcgtcggcgtaacgaacacccttgcctttataaggctcaggacgacggtaggcgcgcagatccgctgcaacctggccgatcacctgcttatcagcgcctttcagcacgatttcagtctgagtcggacattcagcagtgatacccgcaggcagctgatggtcaacaggatgagagaaacccagagacaggttaatcacattgcctttaaccgctgcacggtaacctacaccaaccagctgcagcttcttagtgaagccttcggtaacaccgataaccattgagttcagcagggcacgcgcggtaccagcctgtgcccaaccgtctgcgtaaccatcacgcggaccgaaggtcagggtattatctgcatgtttaacttcaacagcatcgttgagagtacgagtcagctcgccgtttttacctttgatcgtaataacctgaccgttgatttttacgtcaacgccggcaggaacaacgaccggtgctttagcaacacgagacattttttcctccgattaggctacgtagcagataatttcgccaccaagaccagcctggcgcgctgcacgatcagtcataacacctttagaggtagaaacaactgcgatacccagacccgccataactttcggcagctcatctttacgtttatagatgcgcagacctgggcggctgacacgctgaatgctttctacaacagctttgccctggaaatacttcagagtaagttccagttcaggcttggtgtcgccttcaactttaaaatcttcaataaaaccttcttccttcagcacgttggcgattgccactttcagcttggaggaaggcatggtgaccgcagctttgttcgcggcctgaccgttacggatacgggtcagcatatccgcgatcggatcttgcatgctcatctgtctttactcccgtgattcaattggtgacaattaccagctagcctttttcagacccgggatttcaccgcgcatagcggcttcacggaccttaatacggctcaacccgaacttccgcaggaaaccatgcggacgacctgtttgacggcagcggttacgctgacgagacgggctggaatcacgcggcagagtctgcagcttgagaacagcgttccaacgatcttcgtcggaagcgttcacatcagagatgatcgctttcagttcagcgcgtttcgcgaagtatttatcagctaaagctacgcgttttacttcgcgtgctttcattgattgcttagccatttagtaaccctaccttacttgcggaacgggaagtcaaaggcagccagcagagcgcggccttcttcgtcagatttcgcagtagtggtaatggtaatatccaaaccacgaacgcggtcgactttatcgtagtcgatttctgggaagatgatctgctcacggacacccatgctgtagttaccacgaccgtcgaaagacttagcggacaggccacggaagtcacggatacgaggtacagcaatagtgatcaggcgctcaaagaactcccacatgcgttcgccacgcagagttactttacagccgatcggatagccctgacggattttgaagcctgcaacagatttgcgtgctttggtgatcagcggtttttgaccggagattgctgccaggtctgctgctgcgttatccagcagttttttgtcagcgatcgcttcaccaacacccatgttcagggtgatcttctcgacccgagggacttgcatgacagaattgtagttaaactcagtcatgagttttttaactacttcgtctttgtagtaatcatgcagtttcgccatcgtactactccaaattacttgatagtttcgctgttagacttgaagaaacggacttttttaccgtcttcgaatctaaagcctacacggtcagccttgccggttgccgcattgaagattgctacgttggaaacctgaatagcggcttctttttcaacgatgccacccggttggttcagggccggaaccggcttctgatgtttcttaaccaggttgataccttcaacaatgaccttgccggaagacaggacattcttaactttaccgcgtttacctttatctttaccggttaacacgataacttcgtcatcacgacggattttcgctgccatgattcgctccttagagtacttctggtgccagagagataattttcatgaacttctcactacgaagctcacgagttaccggcccaaaaatacgcgtaccgataggctgctcgctgttgttgttcagaagaacacaagcattaccatcgaagcgaatgacagaaccgtccgggcgacgaacacccttcttggtgcgcaccactaccgccttcagcacatcaccttttttgaccttaccacgcggaattgcttctttgatggtgatcttgatgatgtcgcctacgcctgcgtagcgacggtgcgagccacccagaaccttgatacacattacgcgacgtgcaccggagttgtcggcgacgttcagcatagtctgttcttggatcattttagtgctccgctaatgtcaactactactgagacccgaaaatcaggtcgttaaaaatccccatatcgagggcgcggcattataacaccgcttcaaggatatgggtagaaaaaataaacggctcatttctgagccgtttattcgtatcgagagagtgtactgtattacagaaccgctttctctacaacgcgaaccagcgtccaggatttagtcttggacagcggacggcattcgcggatttcaaccacgtcaccgataccgcattcgttgttctcgtcatgtacgtgcagtttggtcgtacgcttgatgaatttaccgtagatcgggtgtttcacaaaacgttcgatagcaacaacaatggatttctccattttgtcgctaacaacgcgaccttgcagagtacggattttatcggtcattacgcacccgccttctcgttcagtaaagtcttaacgcgtgcgacatcgcgacgcacttgcttcaacaggtgagactgttgcagctggccacttgcagcctgcatacgcaggttgaactgctcacgcagcaggttcagcagctcggtgttcagctcttcaacgctcttctcacgcagctcttttgctttcattacatcaccgtcttagttacaaaggtggttttaatcggcagtttcgctgctgccagcttgaatgcttcacgggccagctcttccggaacaccgtccatttcatacaggactttacccggctgaatcaaggcaacccaatactccacgttacctttacctttacccatacgcactgccagcggcttttcagtgatcggtttgtccgggaacacacggatccagatcttaccttgacgcttaactgcacgggtcatagcacgacgtgctgcttcgatctgacgggcagtcagacgaccacggccaacagctttcagaccgaagctgccgaagctaacatccgtaccctgcgccagaccgcggttacggcctttgtgcattttacggaattttgtacgctttggttgtaacatcagcgacgctccttatttacggcctttacgctgctgctttttaggctgagcagccggtttttccggttgttcaacagcagccataccacccaggatctcgcctttgaagatccacactttaacgccgattacaccgtaagtggtgtgcgcttcagaggtgttgtagtcgatgtcagcacgcagagtgtgcagcggtacgcgaccttcgcggtaccattcggtacgtgcgatttccgcgccgcccagacggccgctaacttcaactttaatacctttagcacccagacgcattgcgttctgtacagcacgcttcatagcacgacggaacataacgcgacgttccagctgagaagtgatgctgtcagcaaccagttttgcgtccagttcaggcttacgaacttcggcgatgttgatctgtgcaggaacgccagcgatgtccgctacgaccttacgcagtttttctacgtcttcaccttttttaccgataacgatacccgggcgagcagtgtgaatggttacacggatgctcttagccggacgctcgataacgatacgagatacggacgctttagccagttccttagtcaggtactgacgtactttaaaatcgctgtccaggttgtcagcgaattctttggtgttcgcaaaccaggtagagttccatggttttacaatacccaggcgaataccattaggatgtactttctgacccattgctagtctccagagtctcagcgatcggacacaaccacagtgatgtggctggtgcgcttcaggatgcgatctgcacgaccttttgcacgcggcataatgcgcttcatgctcgggccttcgtctacgaaaattttcgtaactttcagatcgtcaatgtcagcgccatcgttgtgttcagcgttagcaatggcagattccagaactttcttgaccagtacagccgctttcttgttggtgtaggtcaaaatatccagagcctgcgacactttcttaccgcgaatcaggtcagcaacaaggcgaaccttctgagcagaagaacgagcatggcgatgtttagcgatagtttccatctcttcctcctaccttatttcttcttcgcttttttatcagcagcgtggccgcgataagtacgagtcggtgcgaattcacccagtttgtgaccaaccatttcgtcggttacaaataccggaacgtgctgacgaccattatggacagcgatggtcaaaccgatcatgttaggaaagatcgttgaacgacgggaccaagtgcgcaggggcttcttgtctccgctttccaccgctttctctaccttcttcagcaagtgcaggtcaataaaaggacctttcttgagagaacgtggcatggcttatcctctaaaattatttgctacggcgacgtacgatgaatttatcagtacgcttgttgctgcgggtcttcttacctttggtctgaacgccccacggagttaccgggtgcttaccaaagttacgaccttcaccaccaccatgtgggtggtctaccgggttcatcgcggtaccgcgaacggtcggacgaacaccacgccagcgtgcagcacctgctttacccagaacgcgcagcatatgctcagcattgccaacttcgcccagagttgcacggcagtctgcttctactttacgcatttcaccagaacgcagacgcagggtgacataagcaccatcacgagcaacgatctgaacgtaagtaccagcggaacgtgccagctgaccgcctttacctggtttcatttctacgttatgaacagtagaaccaaccgggatgttgcgcatcggcagggtgttacctggtttgattgcagcatcaacgccagactgaatctggtcgccagctttcaggcctttaggggccaggatgtaacggcgttcaccgtctttgtacagaaccagcgcgatgttcgcggaacggttcggatcgtactcaagacgttcaacaactgccgggataccgtctttgttgcgtttgaagtcaacaatacggtaagcctgcttgtggccaccaccgatatgacgagtggtgatacggccattgttgttacgaccaccggatttgctgtttttttccagcaacggagcaaaaggtttgcccttgtgcagctcagggttaaccactttaactacgtggcgacgacccggagatgtcggtttacatttaacaactgccattgtattactcctccgacttactcagcgccgccaacgaagtccagattctggccttctttcagggtgacgtaagcttttttccagtcgctacgacgaccgatacgctgtccgtgacgtttaactttccctttaactaccagggtgttaacgacttcgacttcgacttcaaacagtttctgcacagcagctttgatttctgctttggtcgcgtctttagcaactttgagtacgatggtgttggatttttccatcgcagtagacgctttttcagaaacgtgcggtgcacgcagcaccttcagcagacgttcttcacgaatcatgccagcatctcctcaacttgcttaacagcatcagcagtcattacgactttgtcgaaggcgatcaggctaaccgggtcgataccagttgcatcgcgtacgtcaaccttgtgcaggttgcgcgcagccaggaacaggttttcgtccagctcaccggtgatgatcagcacatcttccagagccatgtctttcagtttctgtgccagcagcttagttttcggcgcttctacagagaacttctcgacaacgatcagacgatcctgacgtaccagttcggacaggatgcttttcagcgcgccgcggtacatcttcttgttaactttttgactgtggtcctgcggacgagcagcaaaggtcacgccaccagaacgccagatcgggctcttgatagaaccagaacgcgcacggccggtgcctttctggcgccacggttttttaccggaaccagttacttcagcacgagtcttctgagcacgagtaccctgacgagcaccagctgcataagcaacaacaacctggtgaaccagcgcttcgttgaaatcacgaccgaaggtagtttcggaaacagtcagcgcgctctgcgcgtctttcaatactaattccattgctatctccttacgccttcacagctggtttaacgatcaggtcgctaccggttgcacccgggacagcacctttaaccagcagcaggttgcgctcagcgtcaacgcgtactacgtcaaggctctgaacggttacacgttcgttacccatctgacctgccattttcttgcctttgaacactttgcccggagtctggttctgaccgatagaacccggaacgcggtgagacaaggagttaccgtgagtagcgtcctgggtacggaagttccagcgcttaacggtacctgcgaaacctttacctttagaggtgccagttacgtcaacttttttaacgtcagcaaacagttcaacgctaatgctctgacctacagtgaactcttcgccttcagccaggcggaattcccacagaccacggccagcttctacgccagctttagcgaagtggccagcttcaggcttggtcacacggttagcttttttagcaccggtggtcacctgaatagcacggtagccatcgttagccaggtctttaacctgagtaacgcggtttgcttcaacttcgattacggttactgggatagaaacgccgtcttctgtgaagatacgggtcatacccacttttttaccgactaaaccaatcattgtttcaacctctcaatcgctcaatgacctgattaacccaggctgatctgcacgtctacaccggcagccagatccagacgcatcagagcatcaacggttttctcggttggctcaacgatgtcaaccagacgcaagtgagtacggatttcgtactgatcgcgcgcgtctttgttgacgtgcggagagatcagaacagtgaagcgctctttgcgtgtcggcagcgggatcggaccacggacctgcgcaccagtgcgcttggcagtctcgacgatttccgcggttgcttgatcgatcagacgatgatcaaacgctttcaggcggatacggattctttggttctgcatgagaccagagctccaattattttataaacgaaaatgattactcctcagacccattacgattgatgggagagtgtaaccgttcttacgtagctccccgattgggagcattgttaggtagccaaattcggctaactgaggttcagattgaacctgctgtcaactacgacaagcccgcgcattatacatacttaaccaccgaacgcaagcgtattgctagtaaagtaaacagccttcgggttatctctcaagttcgttcagtgcatttttgacacgctctcttaaaccggctttctcttcgctttcttccacagtattttcttcgtcttcagaagaagagggggcattctcaaccgcgacgcctgggtcatcttcctcctcgacggattcgacgacggggagtggctgttttttgaagaaatagtgttgtgttgattgtttaaaagcgggcgtttcagcctctacagtgacttcggcttttactatccaaagcacccatagctgcctggcatacccaccaaccagcaccattcctgcaaaccacaggcaaatcagtaataaacaaattacatatattatggtgctgtgtttttgtcgggagaagataccagggtgacctgtttctttctgctcacgcgcggcgatatagaattcaaacatgtcatttccccttcactgttgtttccggggaaatatttgcttcatcccgatataagtaggcactctcccctgccacctgccagagatgtactaacgttgaaaagccaacaacaccgtcagttttcaagtggtggcttttttgaaattgctttattttttctaccaacaagggacgccactccgccgaaggttctgtcgaaatatgcaatgcgcggtttaacatcgtttccagccagagaatctcttcctcgctgctatcacgcgtaatggtactctccccttccggcgacattttccacaacagaagataatcacccgtccataccgactcaaaccatttatgtgtcagcgtccacgtttgctgacctacgaggacatcaacgctagcctcaccgacgcgaacgaccacaacaggcaattttttgtccccgactttaagcgatgcgatccagggcaaattctgatctaccaatgtttgtaaagaagcattcccacttttacgccagccccgctcttactgcctgatcgcaccaggccgaatcagctgggacctcgtacccccatacgccgtataacacgcttagcgcctcactatcgcgcatcaccacatgagcaatatccttagtcatatcttgtttaactactggcgttacgggtatcagccacgcaggaacgggtaacgtagctgtaaaagaggacagcagtagccaaccacaggtaagagcgataatggttccactcatcaccacggcaagctgcattttccgggggcggttatcacccaatatgcggtaaatcattcgccattgttttgctgtgaaaacgctggtctgctcggcttgctgtaataagcgaattgtttcgccggcaagcgccagctttctgcgatcgccccgacataataaagctatccgtttcagaactctggcggttaaaaggagatcgggttggtcaatattctgaccttcaaggatgcttgccttaagttcgtgctccgtcagacgtcctatcgagacaagttcaatgccctgttttttaaaatcacgttcgacttttcgatcgggtctgccgatcagcaaaaattgaccgtcaggaataagagatattgcgcgttggagatcatcaagtatgcggcggtgattcaggtgagcattttcaataataataagagggcagcgactatcagttcgatgaagcgcatgcagtaattgccccgccatctcatctcgcgtccaggcgctgtcacggcagccctgttcagccgcgttatcgtcggtaacgatccatgcggccttaccttgccaggaaacaacgaggcttaaagtaatcacacggcgatgtttatctttttgcagttgctgcgccagccaggtttttccacttccagcctcacccaacaaatagcatagacgccaggtttgacgtttctcacacaaccaggaaagaataacttctcttctcgtagacatagaacttcctgttttaattattgattatccttaatcataaaaataatgtatgtatttattaattaaatacatattactaatataaataaattttgcttgattcatgcaagcggcattaatactatttatactaacgtcaatatacaacccacccaatctattttattagaacatacatcgtgcccacactacgtttccccttccatctggcgaatcataataaagatgctgccatcaatatattgattatatttataagcatagggtcgattatttttaatgtgaattatttccatacaactatagttaaaaatggacagatcattaatcaaccaacaaacgcatttcagtctgatttcagccttgccgctttatggcgtaacgaaaatcatgctggggtaaaagatgcaaatcccgtggcagttaatcaggaaacacctaagctctctatagcgcttaatggcattgtactcacatcgaatgatgagacttcttttgtcttaattaatgaggggagcgaacaaaagcgatactccctcaacgaagcccttgagtcagcgccgggaacgtttattagaaaaataaataaaaccagcgttgtgtttgaaactcacgggcattacgaaaaagtaactctccatccagggctacctgacatcatcaagcagcctgattcagaaagtcaaaatgtactcgctgattatattatcgccacgcctatacgtgatggagaacagatatacgggcttcgattgaaccctcgtaagggcctcaatgcatttaccaccagcttgctacaaccaggggatatcgccctcaggatcaataatctttcgctgacccaccctgatgaggtttcacaggcattaagtttactgctaactcaacaaagtgctcagtttacaattcgtcgcaacggcgtaccccgcttgataaatgtttccgtcggggaacttacaggaatgaatggactgcgtcatgaaaggactcaataaaatcacctgttgcttgctggcagcactactcatgccttgtgcaggacacgctgagaacgaacaatacggcgcgaacttcaataacgccgatatccgccagttcgtggaaatagtgggtcagcatcttggcaaaacgatcctgatcgacccttcggtacagggaaccatttccgtacgcagtaatgatacgtttagccaacaggagtactaccagttctttttaagtattcttgatctttacggttattccgtgatcacgctggacaatggttttctgaaagtggttcgctcagctaatgtaaaaacatcgccagggatgattgctgacagttctcgtccaggcgtaggtgatgagttggtcacccgaattgtaccgcttgagaacgttcctgctcgtgacctggcccccctgctccgccagatgatggatgcgggtagcgtcggtaatgttgtgcattatgaaccctccaacgttcttattctgaccggtcgtgcctccaccattaataaactgattgaagtcataaagcgcgttgatgtcatcggcacagagaagcagcaaattattcatctggaatatgcgtcagcggaagatctcgccgagattcttaatcaattaatcagcgaaagccacggtaaaagccagatgccagcactcctctccgcgaagattgtggcggataagcgaaccaactctcttatcatcagtggaccggaaaaagcacgccagcgcatcacttcattactgaaaagccttgatgtcgaagagagcgaggaaggaaatacccgggtttattacctgaaatatgctaaagccacgaatctggtggaagtgctaaccggtgtttccgaaaagctgaaagatgaaaaagggaatgcgcgtaagccctcctcttctggcgcgatggataacgtcgccattaccgccgatgaacagactaactctctggtcattaccgctgaccagtccgtccaggaaaaactcgccacggtaattgcgcgtctggacattcgccgtgcacaggtgctggttgaggcaatcatcgttgaagttcaggatggaaatggactaaacctcggcgtgcaatgggcgaataaaaacgttggcgcacagcaatttaccaataccggattaccgatttttaacgctgcgcaaggtgtggctgattataaaaagaatggtgggatcaccagcgcgaatcctgcctgggatatgtttagcgcctacaatggcatggccgcaggcttcttcaatggcgactggggagtactgcttaccgcgctggccagtaacaataaaaatgacatcctcgccaccccaagcatcgtaacgctggataataaactcgcgtccttcaacgtggggcaggatgtgccggtgctatccgggtcacagaccacttcaggggataacgtctttaataccgtcgaacgcaaaacggtggggacaaaactcaaagttactccgcaggtcaatgaaggcgacgcggtgttgctcgaaatagagcaggaagtctccagcgttgactcttcctctaactcgacgctcggcccgacgtttaatacccgtactattcaaaacgccgtgctggtcaaaaccggtgaaacggtggtcctgggcggattgctggatgatttttctaaagagcaagtgtcaaaggttcctctgcttggcgatattcctttagtggggcaactcttccgctatacctccaccgagcgcgctaaacgcaacctgatggtatttatccgtccgacgattatccgtgacgatgatgtttatcgctcactgtcaaaagagaaatacacccgttaccgtcaggagcaacaacagcggatcgacgggaaatcaaaagcgctggttggctcggaagatttgccggtgctggatgaaaacacgttcaacagtcacgcccctgcgccatcgtcacggtgaggcattcatatgagaattcactcaccgtaccccgccagttgggcgctggcacaacgaattggttatctctattcagagggcgagattatttatctcgccgatacgccattcgagcggttactcgatattcaacgtcaggttggccagtgccagaccatgaccagcttgtcacaggctgattttgaagctcggctggaagcggtattccatcagaataccggtgagtcgcaacagattgcgcaggatatcgatcaatccgtcgatcttctctcgctttcggaagagatgcccgcaaatgaagatctcctgaatgaagattcagcggcaccggttatccgcttgatcaatgcgattttgagtgaggccatcaaagaaaccgcctctgatatccacattgaaacctatgaaaaaacaatgtcgatccgttttcgcatcgacggcgttttgcggacaattttacagccaaacaaaaaactggcggcactgcttatctcccgaattaaggtcatggctcgtcttgatatcgccgaaaaacgtattccacaggatggaagaattagtttgcgtatcgggcgacgtaacatagatgtccgcgtatccacactgccgtccatctatggtgaacgcgccgtactccgcctgctggataaaaacagcctccagctttcattgaacaacctggggatgacggcagcggataagcaggatttagaaaatctcattcagcttccgcacggtattatcctggtgacagggccgacaggctccggtaaaagcaccacgctctacgccatcctttcggcgctgaatactcccggccgcaatattctgacggtagaagatcccgtggaatatgagctggaaggcattgggcaaacgcaggtgaatacccgtgtggatatgtctttcgctcgcggcctgcgcgccatacttcgccaggacccggatgtcgtcatggtgggggaaattcgtgatacagaaaccgcgcagattgcggttcaggcctcgctcaccggccatctggtactctcaacactccacactaacagtgcatcaggcgcagtgacccggctccgcgacatgggcgtcgaatcattcctgctttcgtcttccctggcagggattatcgcgcaacgtctggttcgtcgcctgtgtccgcaatgccgacaattcacgcccgtatcaccccaacaagcgcagatgtttaaatatcatcagctcgcggtgacaacaattggcactcccgtaggctgccctcattgccatcaatccggctatcaggggcgcatggcgatccacgaaatgatggtggtgacgccggaattacgggccgctattcatgaaaatgtggatgaacaagcactggagcgactagtccggcaacaacacaaggccttaatcaaaaatggcctgcaaaaagtgataagcggtgacacctcctgggatgaggttatgcgcgtcgccagtgccacgctggagagcgaagcatgaattatcgctatcgcgccatgacccaggatggtcaaaaattgcaagggatcattgatgctaacgatgaacgtcaggcacgactgcggctgcgtgaagaagggcttttcctgctggatattcgcccccaaaaaagttcgggagtaaaaacacgtcgcccgaggatcagccatagtgaactgacgcttttcacccggcagttggcaaccttaagcgcagcggcattacccttggaagagagccttgccgtaatcggtcaacaaagcagtaataaacgactgggtgacgtgttaaatcaggtacgcagcgccatccttgaagggcatcccctttccgatgcattacagcattttcccacgcttttcgattcgctctatcgtaccctggtaaaagcgggcgaaaagagcgggctgctggccccggtgttggaaaagctggctgattacaatgaaaaccggcagaaaatccgcagcaagctcattcagtcactgatctacccctgtatgctcactacggtggcgattggggtcgtgattattctcctcactgctgtcgtgcccaaaattaccgaacagttcgtgcatatgaagcagcaactgccgctgagtacacgcattcttttaggtctgagcgacacgttgcaacgtaccggcccgacattattagcgacagtgtttattgtcgctgtaggtttctggctctggttaaaacgcggcaataaccgccaccgttttcatgccatgttgctgcgcgttgcgctcatcggcccgctgatttgcgccattaacagcgcacgctatctccgcactttaagtattttgcaatccagcggcgtccctctgctggatgggatgaatttgtccaccgaaagcctcaacaacctcgaaattcgccagcgtctggcaaatgcggcagagaacgttcgccagggtaacagcattcatctttcgctggaacaaaccgcaattttcccgccgatgatgctctacatggtggcctctggcgaaaaaagcgggcagctcggcacattaatggtcagagccgcagataaccaggagacactccaacaaaatcggatcgccttaacgctctccatcttcgagccagcactcattattacgatggcactgatcgtcctgtttattgtcgtgtcggtactccaacctcttcttcaacttaactcaatgattaattaaggaaagcatatgcgcgcaacggataagcaacgcggttttacattactggaaattatggtggtgatcgtcattatcgacgtacttgccagcctggtggttcctaacctaatgggcaataaagaaaaggcggataagcaaaaagccgtcagcgatattgtggcgctggaaaacgcccttgatatgtacaaactcgacaatcatcactatccaaccacaaatcaggggcttgaatccttagtagaagcgccgacactgccaccgctggccgcaaactataacaaggaaggttatatcaagcgtctgcctgccgatccctggggcaatgattatgtcctcgttaatcctggtgaacatggtgcatacgatctgctttcagcagggcccgatggtgaaatgggaaccgaggacgacatcaccaactggggtttgagcaagaagaaaaagtaagtcagcgatgaatcagcaacgcgggtttaccctgctggagatgatgctggtgctggcgctggtcgctatcacggcaagcgtggtgctcttcacatatggccgggaggatgtcgccaacactcgtgcgcgcgaaacagcggcgcggtttaccgctgcacttgaattagccatcgaccgcgccacgctcagtggtcagcctgtcggtatccatttctctgattcagcatggcgcattatggtaccgggcaaaacaccatcagcctggcgctgggttccattacaagaagatgccgcagacgagagccaaaatgactgggatgaagaactctcaattcatcttcagccatttaaacctgatgacagcaaccagccacaggttgtgattctggccgacggacaaatcacgcccttctctttgttgatggctaacgccgggaccggtgagccgctcctgacgttagtctgttcaggctcatggcccctggatcaaacgctcgccagagatacccgcccatgaacaaacaatcagggatgacactgcttgaagtcttactggcgatgagtattttcaccgctgttgctctgactttaatgagcagtatgcaagggcaacgaaatgccatcgagcgaatgcgtaacgagacgctggcattgtggatagcggataaccagcttcagtcacaagattcattcggcgaggaaaacacgtccagttctggcaaagagttaataaatggcgaagagtggaactggcgcagcgatatccactcaagcaaagacggcacgcttctggaacgcaccataacggtgacattacccagcggtcagacaacctcgcttacgcgttatcaaagcatcgataataaatccgggcaggcacaagatgattaatcgccagcagggtttcacattgctggaggtcatggcggcgctggcgattttctcaatgcttagcgtgctggcgtttatgattttttcgcaagcttccgagttgcatcaacgctcacagaaagaaatccagcagttcaatcagctacagcgcaccatcaccattcttgataacgatctcctgcagctggtcgcccggaggaatcggagtacggacaaaatcatggtgttgggtgaagaagctatttttaccacgcaaagtcgcgatccgctggctcctctcagtgaagcacaaaccttactcactgttcactggtatctgcgaaatcatacgctctaccgtgctgttcgtacttctgtggatggcaggaaggatcaacccgcccaggcgatgctggaacatgtcgagagctttcttctggaaagtaacagcggggaaagccaggaacttcctctctcagtcacgttacatctgcagactcagcaatatggggggttacagcgccgttttgcattacctgagcagttagcgagagaagagtcgccagctcagacgcaggccgggaataataaccatgaataatgaacaacgcggcgtcgcgctgctcattgtactcatgttactggcgctcatggctgctctggcagcagacatgacgctcagttttcacagccagcttcagcgaacccgccaggtaaaccatcatctgcaacggcaatatgatattgaactggcggagaaacttgcgcttgccagcctcacccaggacgttaaagataacgacagacagaccacgttgcagcagtactgggcacagccacaacagttgcagctggaagatggcaatacagtgaagtggcagttacgcgatgcccagcactgttttaatctcaatgcgttagcaaaaatctctgacgacccgctggcttcccctgatttccccgcccaggtattcagtgcgctgctgattaacgccggtatcgatcgcggaaacaccgatgagatcgtgcaatcaatcgctgactatattgatgtcgatgactcaccacgctttcacggcgcagaagatagcttttaccaaagccagacgccgccccggcatagtgccaatcagatgctttttctgactggcgaattacgtcagataaaaggcataaccgaaaacatctatcagcggcttatcccgtatgtctgcgttctcccgaccacggaacttagcatcaatcttaatatgctaacggagaacgatattccgctcttcagagcgttattcctcaataacatcacggatgctgacgctcgggtcttattgcaaaaaaggccgagggaaggctggctaaccacggatgcatttctttactgggcgcagcaggatttctccggtgtgaagccactggttgctcaggtgaaaaggcatctctttccctatagccgctattttacgctgagtacggaaagtatcagcgacgaacaatcccagggatggcaaagccatatttttttcaaccgtaaacagcagagcgcccaaatctatcggcgtacgctgcaactctactaatcataaggatcgtgatgcctgaatcgttgatggtcatacgttcttcctcgacgctgcgtaagcattgggaatggatgacgttctccgcagatagcgtatcttcggtacatacgctcacggacgatcttccgctggagtcgctggccgatcagcccggtgccggaaatgttcatcttttgatcccaccagagggccttttatatcgttccctcacgctgcccaacgccaaatacaaactcaccgcacaaacattacaatggctggcagaggagacgttacccgacaacacccaggactggcactggacggttgtcgataaacaaaacgaaagtgtcgaggtgataggcattcagtcggagaaactcagtcgctatcttgagcgtttacatactgccggactcaacgtgacgcgggttttgccagatggctgctatcttccctgggaagtagatagctggactctggttaaccagcaaacaagctggctcattcgcagtgccgcacatgccttcaacgaactggatgaacactggttacagcatcttgctgcccagtttccgcctgagaatatgctttgttatggtgtagtacctcacggcgttgcagcggccaatccacttatccagcatcctgaaataccatcactgagtttgtattctgccgatattgcattccagcgctatgacatgctgcatggtatttttcgtaaacagaaaactgtaagcaaatcgggaaaatggctcgcccgcctggcagtaagctgtctcgttctcgccattctttcttttgttggcagccggagcatcgcgctctggcatacgcttaagattgaagatcaacttcagcaacaacagcaagaaacctggcaacgttatttcccgcagatcaaacgcacccacaattttcgtttttactttaagcagcaactcgctcagcaatatcctgaagctgtgccgttgctctatcatttacaaacacttctgctggaacaccctgaactgcagttaatggaggcgaactatagccagaagcaaaagtcgctgaccttaaaaatgagtgctaagagtgaagctaatatcgatcgtttctgtgagttaacacagtcctggcttccgatggaaaaaacagaaaaagatccggtcagtggtgtatggacagtaaggaactcagggaaatgattaaatcatggtgggcagaaaaatccacatcggaaaaacagatcgttgcggcactggcggttctctcgctcggcgttttttgttggcttggggtgataaaaccgatagatacctacattgcagagcatcagtcccacgcgcaaaaaattaagaaggacatcaaatggatgcaggatcaagcgagcacccatggtttactcggtcatcctgcgcttacgcagcccatcaaaaatatccttctcgaggaagcaaaacgtgagaatttggctatcacgctggaaaacggcccggacaatactctgacaattcatcctgtcacagctcccctcgaaaacgtctcccgctggctcactacggcacaggtaacatacggtattgttattgaagaccttcagtttactcttgccggaaacgaagagatcaccctcaggcatttgtccttcagggagcaacaataatgacaatgctactgccgctcttcattctggttggttttattgcaggttattttgttaatgccatcgcctatcacctctcgccgttggaggataaaacggcgttaacgtttcgccaggtattggttcatttcaggcaaaaaaaatatgcctggcatgatacagtgcccctgatactttgtgttgctgctgctatcgcctgcgccctggcacctttcacgcccatcgtgactggcgcactctttctctatttctgtttcgtactcacgctcagtgttattgattttcgcactcagctcctgcccgacaaactcaccttaccgctgctctggcttggcttggtatttaatgcgcagtatggattaattgatttacatgatgcggtttacggcgcggtagcgggctatggggtgctgtggtgtgtttactggggcgtctggttagtttgtcacaaagagggattgggctacggtgatttcaagctactggccgctgcaggcgcatggtgtggctggcaaacgttgccaatgatactgctgattgcctcgctgggtggcattggttacgccatcgtttcacaacttctgcaacgccggactataaccactatcgcattcggcccgtggcttgcgctcggcagcatgataaacctggggtatctggcctggatctcttattaaccgggagggttctccctcccgacacggctcaaccttcttcgcggatctgtgcttgcagataattttgcaggcccatcttctgaatcagatcaagttccgtttccagccagtcgatatggccttcttcatcacgcaaaatttctatcatcatatcgcggctgacgtaatcatgaacgctatcggcataaccaattgcctcacgcaaattcttcgcgccatccagctcaagtgccagatcagaacgcagcatttcctcaacatcttcaccaatgttcagtttgcccaggtcctgtaagtttggaagaccttccagaaaaagaatgcgctcaatataacgatcggcgtgtttcatctcatcaatggattcatgatactccacatcattgagacgtttgagaccccagtttttaaacattcgggcatggagaaagtactgattgattgcgacaagctcatttcccaacagtttgttgagataatttataactttagtatcacctttcattttttgactccttcgcttccactctttgaagagtagaacggcttacgagtaagtcaaaaaacacactccgtttatgcggactccttaaactccggcagctgcattaattcatcctccatcacttcacgcgcggcccggacacatttaccgcactgattgccgaccggaataaatttttttaattgctggaacgagtgaggggaaaactggcgcacagcctgacgaatttttttatcgctgataccattacaaagacaaacgtacatagagactcccgtatactttcttcaaaaataaatgaaaatagttcttatttcaattacggaaagactcttttttaagcaaagaatagaaatatgaataaaaataatgggctaccaaaagtagcccattgacaaaaaatgcggcgatactggaaggtatcgccaacacatttattgcttagtaaacggcgcgaagatttcgctaaatgcgtacttcggtgcctgttctttagtcaggccgtggaattccggagacaggttagtgccgcccggcaggtcgcgcgcgattgaccagataccaaccataccgagattacgcttctgcgcatcctgcatgaccagacgagcatcagagagatagaacacctcgccctgaacgtcgttcacgccaaccatcggcgtggtacccatcatagcgtcaatttctgcatcgctcttattgggatggaggcctttcaattgtgaatgcaggttggcaatcgcagacgttgcacacttaccgtgaatgttctggccttcggtatttgcagactgacaaatcgcgttaccgtagtccattgtcatcacgttcacacccgccagctcaacacctttcgctttggcatcgctcaggacattcatcccttccggcgtcaggccagtcggcagaattggcaaggtgtaccagatagcaatatctttgccttctgacttccatttatcctgcactttcttcacagcaaggttacgacgttcaatagatgcctgatccgcaacccaggtgccttcgatatcgaagtccaggactttgaggttcaggttatcaacgatgtcataataatgctgcatcagatcgtctacgttcttacaggaagcagccagcggagcgttgttagcaccaccgatagacagcatcacatcgccgccagcctcacgcagagctttgattttgctgtactgagcgtaattctgcataccgtaagcggtaccccatgtcggcagacaggtgttcgcatctttactcaccacaaacgccagcgtgaagtggttgacgttatgattcttagccagcgcagccagatccgggatcgtattcagcgtaaagtcgacatacggtgcataaacgtgtttcggccacgctttcttcggcgtacctacgcgctctttggttccggtccagtcaacaaaaacacgccacgggttgctgtcagaaggagaaactttctgcactttactctgagaaatgtagttcacaccgttaaagcgaatcagcgtatcgctggcataaagcgtttctggattaaactgcggcgcattattcagctcttcgttgctatagctctgagccttacctaacggcttccacgggcggctattgctaccggtggcgttttggttcgccaccagagcagggttgtcactttgcgtccagaacagcgcttcataagcctgcccatcaacaacaacgcgatcacctttcacgtacacagtggatgcggaccatgctttcgccggttcgtatttcttccacgggttatcgccgcccgggacaaagccccatgcgtcttgatcgacagaagttttataatgtgcatcgttataatctacgatgctgtccgcgctgtacgctttgctggcctggaaaccatccgcaacaatgacgccgccgttatcaatttcacaggtagtcgggttaccgtactgactcaattccgcagcggtagctgtacgctcgagacgccatgggttattggagttttcagcgctggtaccccgtgggcaatctttagacccaacccaccaggcgttcttgtaaacattaccattgaaaataacatggtaaatttcgctaccttcctggccgctccacgcttgcaatgagtaatcgttaacgctatccgctggtgttgatggctcgctgttatccggagttggggtcaccggtgtttccggagttggatcaaccggagtcacagcaccgccattattatccggcttaacggaacaggagccagggttaccatactggctgatttctgttgccgttgccgcgcgaacataacgccatgggttactggcatcgttttctttcgcatcgcctgggcaatttgccgcgcctacccaccaggcgttcttataaatgccgccgttatagataacgtaccatgtagaagaaccttcctgacctttccaggctactacagcatagttgtcgtttgacttatcagctggggctggctgaacatcaggagccggtttaacgtccggtgccggtttcacatccggtgaaggctgtggtgctgaagtacaggactgtggattactggtttctgagatttccgttgccgtagcggcacgaacataacgccatgggttgctggcatcattgcttttcgcatcacccggacagttagaagaggctacccaccaggcatttttatataccgcaccattaaagacgacataccaggtctgaccgccctgctgtttattccaggcaactacagaagaattagacggaacagtgccctgtgctggtgtagccgaaccgccattagccggcgtattggatgcaggcgtatttgaatttgaagaagatgagctgccgctcttttcgcaggaaagtgtattgccaaactgactaatttcagcagctgttgcggtacgctttaaacgccacgggttagttgcatcatttgctttcgcttttcccgggcaatttgtagaagaaacccaccaggcattttcataaattttgccatcgaaaataacctgatatttattaccaccttgttggttattccatgcttccattgccaatgctggcagagcggaacacaccagccccataccaatcatagatttagtaaatatatttaatttcattataatcccttgtgacgtaaaaactgcaaaacaaaagtcctacgcaggaattatttacgttttacgagaacccttcaatatgaattaaagtgcggcattaaaaataagaaaaaagcctgacaaatgaagaattttaaaaacagaaacattcatatttaaaatgttaaattgaattgatattttaaatatgaataatttattcgttctgacagtacgaataagatatgccgtcaacaaatgcaaaaagggcgccgaagcgcccttttcaattcaaaactaattaacgtgtaattagcccagaactttagcaacaacgcccgcgccaacggtacggccgccttcacggattgcgaaacgcagaccgtcgtccatcgcgatcgggtggatcagggtaacaaccattttgatgttgtcgcccggcattaccatctctacgccttccggcagttcgatggtaccagtcacgtcagtagtacggaagtagaactgcggacggtagcctttgaagaacggagtatgacggccgccttcatctttggacagaatgtacacttcagattcgaacttggtgtgcggcttgatggtgcccggcttagccagtacctgaccacgttcgatttcttcacgtttgataccacgcagcagaacacctacgttctcaccagcacggccttcgtccagcagtttgcggaacatttcaacgccagtacaggtagacttctgagtctctttgataccaacgatttcaacttcttcaccaactttgatgataccgcgttctacacgaccggtaacaacggtaccacgaccggagatggagaatacgtcttcgatcggcagcaggaacggcttgtcaatcgcacgctctggttccggaatataagaatccaggaagccagccagttccaggattttcgcttcccactctgcgtcgccttccagcgctttcagagcagaaccacgaacgatcggagtgtcgtcgcccgggaagtcgtactgagacagaagttcacgaacttccatttcaaccagttccagcagctcttcgtcatcaaccatgtcgcatttgttcaggaacacgatgatgtacggaacgcctacctgacgacccagcaggatgtgctcacgagtctgcggcatcgggccgtcagtcgcagcaactaccaggatcgcgccgtccatctgagcagcaccggtgatcatgtttttaacatagtcggcgtgccccgggcagtctacgtgtgcgtagtgacgggtcgggggtgtcgtattcaacgtgagaagtgttgatggtgataccacgagctttttcttccggcgcgttatcgatctggtcgaatgcacgagcagcaccgccgtaggttttagccagtacggtggtgattgcagcggtcagagtagttttaccgtggtcaacgtggccgatagtaccaacgttaacgtgcggttttgtacgttcaaatttttctttagacacggctatattccttactatagtgctctccccttcaggagagagcacgggactttggtattaacccttaggcttatttaccacgggcttcaattacggcctgagcaacgttactcggcgcttcatcatacttcaggaattccatagtgtatgatgcacgacctttggtcagagaacgcagctgagttgcgtatccgaacatttcagacagcggtacttcagcgtggatcttaacgccagtaacttcagattcctgacctttgagcataccacgacgacggctcaagtcaccgataacgtcaccggtgttctcttccggagtttctacttcaaccttcatgatcggctcaagcagaactggtttcgctttcttaaagccttctttaaaggcgatagaagcagccagtttaaacgccagttcagaggagtcaacgtcatggtaagaaccgaagtgcagacgaatacccatgtctactaccgggtagcctgccagcggacctgctttcagctgttcctggatacctttatcaacggccgggatgtattcgccagggattacaccacctttaatgtcgttgatgaactcgtagcctttcgggtttgaacccggctccagcgggtacatgtcgataacaacatgaccatactgaccacgaccaccagactgtttcgcgtgtttaccttcaacatcggtaactttctggcggatagtttcacggtaagcaacctgcggtttacctacgttcgcttcaacgttgaattcacgcttcatacggtcaacgatgatgtcgaggtgcagttcgcccatacccgcgatgatggtctggttagattcttcgtcagtccatacacggaaagacgggtcttctttagccagacggcccagagccagacccattttttcctggtcagctttggttttcggttcaactgcgatggagattaccggctcagggaattccatacgttccagaatgatcggcgcatccgggtcacacagggtgtcaccagtggttacgtctttcagaccgatagcagcagcgatgtcgcccgcgcgaacttctttgatctcttcacgtttgttagcgtgcatctgaacgatacgaccgaaacgctcacgtgcagctttcacggagttcagtacggtatcaccagagttaaccacaccggagtaaacacggaagaaggtcaggttaccaacaaacgggtcggtagcgattttgaacgccagtgcagagaacggctcgtcatcacttgcgtgacgttcagccggagtgtctttaccgtcgtccaggataccgttgatcgcaggtacgtcaaccggggatggcaggtaatcaattaccgcatccagcatcgcctgaacacctttgttcttgaacgcagaaccacaggttaccaggatgatttcgttgttcagaacgcgctgacgcagagcacctttgatttctgcttcagtcagttcttcaccacccaggtatttttccatcagctcttcagaagcttcagctgcggattcgatcaggttctggtgccattcgttagccagttcaaccatgtctgccgggatatcttcgtattcgaaggttacgccctggtcagcgtcgttccagttgatagctttcattttcaccaggtcaacaacaccggtgaaatgttcttcagcaccaatcgccagctgcagcggaaccgggttcgcgcccagacgggttttgatctggttaacaactttcaggaagttcgcacccatgcggtccattttgttaacgaacgcaatgcgcggaactttatatttgtttgcctgacgccatacggtttcagactgcggctgaacaccaccaactgcgcagtaaaccattaccgcaccatcgagaacacgcatggaacgttctacttcgattgtgaagtcaacgtgccccggggtgtcgatgatgttgatgcgatgcggctcatactgcttagccataccagaccagaatgcagtagtcgcagcggaagtgatggtaataccacgttcctgctcctgctccatccagtccatggttgcagcgccgtcatgaacttcaccgattttatggtttacaccggtgtagaacagaatacgttcggtagtagtggttttaccggcgtcgatgtgcgcactgataccgatgttacggtagcgtgcgatgggtgttgtacgagccatttgtttcctcgtttatcttttaggcgttcaatttaagtagcccaaagcgggctgcttactggaagcgcccgcctggtgactaaaactccgaagggattaccaacggtagtgtgcgaacgccttgttggcttcggccatacggtgaacgtcttcacgtttcttaactgcagtacctttgttttctgcagcatcagaaagttcgttcgccaggcgcagagccatggatttatcaccgcgtttacgagcagcttcaacgatccaacgcattgccagagcattacgacgaaccggacggacttcaactggtacctgataagtagaaccaccaacgcggcgagacttaacttctacagtcgggcgcacgttttcgagagctacttcgaatgcttccagttcagatttaccagagcgctgagccagggtctccagcgcgctgtatacgatagattcagcagtagattttttaccatctaccatcaggatatttacaaatttagccagcagttctgatccgaacttcggatccggcagaattttacgctgaccaatgacgcgacgacgtggcatggaaatactccgttgttaattcaggattgtccaaaactctacgagtttagtttgacatttaagttaaaacgtttggccttacttaacggagaaccattaagccttaggacgcttcacgccatacttggaacgagcctgcttacggtctttaacgccggagcagtcaagcgcaccacgtacggtgtggtaacgaacacccgggaggtctttaacacgaccgccacggatcaggatcacggagtgctcctgcaggttgtgaccttcaccaccgatgtaggaagtcacttcgaaaccgttagtcagacgaacacggcatactttacgcagcgcggagttcggttttttaggagtggtagtatatacacgagtacatacgccacgtttttgcgggcatgcttccagcgcaggcacgttgcttttcgcaactttgcgagcacgtggtttgcgtaccagctggttaactgttgccattaaatagctcctggttttagcttttgcttcgtaaacacgtaataaaacgtcctcacacaatatgaggacgccgaattttagggcgatgccgaaaaggtgtcaagaaatatacaacgatcccgccatcaccaggccatctggctggggtgcttaaccgtaagtctgacgaaatcagtatagtcaatgagaatgatgtcgttcgaaatttgaccagtcaaaccgcgggcaataaggtcttcgttcagggcatagaccttaatgggggcattacgcagactttcaaggtagcggttaccgtcaactgcggcagttacgccatcttgcaataatagcagttcgtctccttcactgagcagacgcagcagcgcagcaaaatccgtcagccagggtgagcgatgtaatgtgtgcagcataaacgcctcaaaacctcaaaataacatcgtagttggcgagttcgcggcgtaaggcatctgcttcgagcggcgtggcttcgacaacaaagggtgtctgcggatctaacccgcgttcgcgcagtgaagccgcacaaacccagcactgttcaatgtcgtacagacccaacaatttaaaagtggcaatgtaatcacgcgccagcactgcatcgggcttttgtcctggcagcagctgaaaaacgccatcagctataaagaagacagccagatcgtcagttaatgcggaagttgccagtaaagcatctaaaccttcccggcctgcggctgtaccatgaggtgcagtagaaaaaacaaacgcaattcgtttcatcagaactgtaccaccctgtcacaggtcagcgaggcttccgccagcgccccaagtccgcttaaggtaaatccctgctgaaggtttgacgaagccagccccagtcttccggcctccgtttcatcaacaacgccacggcgtaatgctgccgctacgcagatattcagcgccacaccatgttgcgcattcagttgttgccaggcccgtacgaggtcaaattcgtcacttgccggagaggtcaattggttagcgttatagaccccttcccgatagaaaaagacgctgcttaactcatggccatctgctatcagcgcctgcgcaaactgaaaagcactactcgcctgttgcgtaccgtatgctggcccggtcaccacgatggcaaaacgcattacttatcttgcccctggaaatcaccgctcttgaactggcggatgtagagatagacagtgtgtttggagatgttcaggcggtcagcaacctggttgatcgcatctttaatatcgaagatccctttctcgtagagattcagcacgatctgacgatttttggcgttattagaaacattgcgatcggcattcacttcttcgatggtgaactccagcgtttgggtaaccagatcttcaacagaagaggcaaagttgacgcttgaaccgacatccggggtttctggcggcacaaaggtgctcataatctgcgagaagggaacatcaagattcatattgatgcacagcagaccaattacacgctgttcgcggttacgaatcgcgatagtcagggacttcattaatacgccgcttttggcgcgagtaaagtagcatttagaaacgctgctatccgctcccgtcatatcgtgcagcatacgtagcgccaggtcagtaattggcgaaccaatcttccggcctgtatgttcaccgttagcaatgcgaatggctgaacattttagatcctgcaaagagtgcaaaacgatttcacagtgggagccaataagcatcgctaacccgtccaccaccgcttcgtaggatttcagaatatcaaaatcggtctggtcgaaaggacgttgatccagtaaatccaactcactggtttcgttggttaaaagcgacctggacatgaaaaaaaacactccttttcaggagcctgtcgttaacttttcagggcaggctcattaatgatgcgggtaactaaattaatacagcggaggttccgctttccagcactaattatatccggcctgtaataaaaaaaccgccgcctggtcaggcggcggttcttaatgcttattttttagcagaatctgcggctttcgcatcagcttccggctttgcatcagccttcggcgctggtttcacatccagcagctctacgtcaaacaccagggtagaattcggtgggatccccggaacacccgctttgccgtaagccagttctggtggaataaccagtttgatcttaccgcctttcttgatgttcttcagaccttctgtccaacccgggataacaccgtccagacggaaagaaagcggttcaccacgggtgtaagagttgtcgaactctttaccgtcgatcagcgtacctttgtagttcactacaacagtatcgctgtctttcggtgcttcgcctttaccggcttctactacctgataaaccagaccagttgaagaggttttcacacctttctctttggcaaatttctcgcggtactctttaccttttgcttcgttatcagccgcgtctttttccatcttcgcctgagcagaagacttcacgcgagcttcgaatgcttgtagagtctgttcgatctcttggtcggagagtttgctcttatcagcaaatgcatcctgaacaccagcgatcagctgatctttatccagtttgatgcccagtttttcttgttcttttagagagttttccatgtaacgacccagcgaggcacccagtgcataagctgatttctgatcgtcatttttgaacgctgctttgctgtcagcagctgtagcaggttttgcagcttcagcagcaaaagtgattggtgcatgcagggcaacggccattgtggtcgccagcagcgttactttaaacagtgatttcatccatatctccaggatcggggcatctcaccccagggttaactattatcagaagggtactataaagcgttgtcgaacaaatctacatacagacacgccctattatcatctattttcagactctttttgtttaaattagtttcgatgaccgcgaaatgagtgctgtctcgggcagcaaagttaagtagaatccgcggcgaccattcgacaaaagaggtgaatcatgcaggatttatcattggaagcacgcctggcagagctggagagccgactggcttttcaggaaatcaccattgaagaactgaacgtcacggtgaccgctcatgaaatggagatggcgaaactgcgcgatcatctgcgtctgctgaccgagaagttaaaagccagccagccgtcgaacatcgcgtcgcaggctgaagaaacgccaccgccacattattgaggcgtaaaaaaagcggggattccccgcttttttgtcactttttcggtattagtggcaaccgcaaccgccgttgcctttaccgccacagcagccttcgccaccgtgttcatgaccgtgatcgtggccatgaccgccgcagcaaccgtcgtggtcgtgatcgtggtggtgatcgtgcgcgccgtgaacgtgaccatgagccagttcttcttcagtcgcttcgcgaatcgccacaacttcaacgttgaatttcaggttctgaccggccagcatgtggttaccatcaaccacgacgtgatcgtcttcaaccgcagtgatttcaaccggtaccggaccctggtcggtttcagccaggaaacgcatacctacctgcagttcatcaacgcccataaatacgtctttaggaacacgttgcaccaggttttcgtcgtactgaccgtaagcgtcgttcgcgccaacagcgacatcaaatttgtcgccaacttcatgaccttccagcgccgtttccaggccagagatcagggaaccgtgaccatgcaggtagtccagcggcgcactcaccggagactcatcaaccaacacaccgtcttctgtacgtacctgataggccaggctgaccaccaggtcttttgctactttcatgatatctcctgagcatgggaagaatagtggcgcagattgtagcggaattctgcagccgtgtactcactagcttaaaaaaactcggcgcatatcgctagtccggatgaaaaatcccgatcacttgctcatctttgcgaacgtgatcgcgggcttctttgtctgcttctcgcatctgatgtccgcacttaacacattcaacaatatcaatattattttcgcgccacatcgccattgaatcctgcgcctgacaggccgggcattttgcgcccgcaataaaacgttttcggattgccatctttaccctctactcaaattcatcccagccgtccagctggcgtcgttcttgttgcatttcacgctggaaaatctcttccagttcgcgtcgggcttccctggcgcgagaaatttgtacggtatcggcatgcattgggatgagctctcgcagcatccgcatatccaggcggcgaaaatgcagttgcgctcgctgtgcctgatgcggatgcatgccaagcgtgaccagcgtcttgcgccccagctctaacgcactggagaatgtttcacgggaaaactgcgtcacccctgcctgtaataactcatgcgcttccacacgtccgcgcgctcgcgcaagaatatgcaaatgcggaaagtgctgttggcatatttccaccagcttcatggtgtcttccggctcgttacaggtaatgacgatagactcagcggcctctgcacccgcagaacgtaaaagatcgacctgcgtggcgtcgccgtaataaactttgtagccgtatttacgcatcaggttaacggcgctgatatcccgctccagcacggtaatgcgcattttatttgccatcagcaaacgaccaatcacctgaccaaaacgcccgaagcccacgacaatgacctggggtttatcatcgttgacccacggtttttcgtcttcttcttccggtccgttaaactggcgggatagccatttatccaccagcttcatcagcaacggcgtggtcatcatggaaagcgtcaccgtcaccagcaacaacgccatctggtcgccctggaataagcgttgtgaagaagcggtagaaaagaggacaaaggcaaactcaccaccctgactcaacacgccagcaaactgcatccgctctgagctacgcacgccatacaatcgcgccagcagatacagcacgagaattttcaccgccaccagcacaaccacgcttatcactacccacaacagatgggtataaagcaccccgaggttgagtgacatgccgacagagataaagaacaaaccgagcagcaagcctttgaagggatcgatagccgtttccagttcatggcgatattcactttccgccagcagcacgcccgcaataaatgtaccgagcgccatcgacagccccagcgcatccataaacaatgcggaacccaacaccagcagcagcgtcgcggcggtgaacacttcccgcacgccagaagctgcaataaagcggaataccggacgcagtaaatagcgcccaccaatcagcatgccgacaaacgccagcaccttcatgccgaccttcatccagtcgaaatgttcgtctgccgaccccgccaacaacggcactaacgccagtgctgggattactgccagatcctgaaacagcagaaccgaaaacccgagctggccggattcgctgcgattcatccctttctcacgcatcaattgcaacgccattgcagttgaagacatcgcaaggccaatgccaccgaccaccgccgcctgccaggcgaaatccgtcagcatcaataatcccgccagcaacgccgcgcttaacagcacctgtgccgcgcctacgccaaaaatcgaacgccgcagttgccaaagtttggagggattcaactcaaggccgatgataaacatcaggaataccacgccgagttccgaaaagtggaggatctcatcgacgtcgctaataaaccccagcccccacgggccaattgcaatccctgccagcaaatatcccaacacagcgccaatacccagccgcgatgccagcggcaccgcagccaccgccgcgaagagaaacagcactcctgcgagtaaaaaatcggaaccttccatcagcggcctcctggagacagcggatttgccagccagtcaccgtaggctctggcgtggctcgccagctcctgtgcgctttgccgtctcgcccagtaaataatgatgggacttaaccaatgcatccggcacatgcccgccgccagttcaaaggggcgcagcacatcgctcatcgggtagcgattcagcgcgtcataacggtaagcactttccggctcgccggtggtaatcacgctacgccagtactttcccgccagttggtttcctcccggcccgctggcaaaaccacgacttaatacccggtccagccactctttcagtagcgccgggcagctataggtataaagaggatgctgaaagacaatcacctcgtgctcgcgcagtaatgcctgctcacgggggatatcaataaaaaaatcgggatagtgcgcgtaaaggtcgtgcacggtaacattgctgagctgcgtggccggtttaagcagtacccggtttgccaccgagtcctgagattccggatgggcatacagcagcaaaactttcgctggctgagacatcatccccctcccggtatggtttttgtgtatagtcgctgttttgggctaccattgcgcccggtgcggcagctcgcccatacattacattatcataatgataagttaacatagtctgaacatacggcaccttatgattgttttctcctcgttacaaattcgtcgcggcgtgcgcgtcctgctggataatgccaccgccaccatcaaccctgggcagaaagtcggcctggtgggtaaaaacggctgtggtaaatctaccctgctggcattgctgaaaaatgaaatcagcgccgacggcggcagctacacctttccgggaagctggcaactggcgtgggtgaatcaggaaacgccggcgttaccgcaagcggcgctggaatatgtcattgacggcgaccgtgaatatcgtcaactagaagcgcagctacacgacgccaacgaacgtaacgacgggcacgccattgcgaccattcatggcaagctggatgctattgacgcatggagtattcgctcccgtgctgccagcctgctgcacggcctcggtttcagcaatgaacaactggagcgcccggtaagtgatttttccgggggctggcgtatgcgtcttaaccttgcccaggcgctgatttgccgttcagacttgctgctgctcgacgaaccgactaaccacctcgatctcgatgccgttatctggctggaaaaatggctgaagagctatcagggcacgctgatcctgatctctcacgaccgcgacttcctcgatccgatcgtcgataaaattattcatatcgaacaacaaagcatgttcgagtacaccggcaactacagttcgtttgaagtacagcgcgccacccgtctggcgcagcaacaagcgatgtacgaaagccagcaggaacgcgtagcgcatctgcaaagttatatcgaccgtttccgtgccaaagccaccaaagcgaagcaggcccagagccgcattaagatgctcgagcgtatggagctaattgcccccgcgcacgtcgacaacccgttccgctttagcttccgcgcgccggaaagcctgccaaatccgttactgaagatggaaaaagtcagcgcgggctatggcgatcgcattattctcgactcgattaaactgaacctggtgcccggctcgcgtattggtctgttaggccgcaatggcgcgggtaaatcgacattaatcaaactgttagccggtgaacttgcgccagtcagcggtgaaattggtctggcgaaagggatcaaactcggctacttcgcccagcatcaacttgaatacctgcgcgccgacgaatcacctattcaacatctggcacgtttagcgccgcaggagctggaacaaaaactgcgtgactacctcggcggctttggtttccagggcgataaagtaaccgaagaaacgcgccgcttctccggtggggaaaaagcccgcctggtgctggcattaattgtctggcagcggccgaatctgctgctgctcgacgaaccgactaaccaccttgacctcgacatgcgtcaggcactcaccgaagcattaatcgagtttgaaggcgcgctggttgtcgtttcgcacgaccgtcatttgctgcgttccaccactgacgatctctacctggttcacgatcgtaaagtcgaaccgttcgacggcgatctggaagattatcaacagtggttgagcgacgtacaaaagcaggaaaaccagaccgacgaagcgccaaaagagaatgcgaacagcgcccaggcacgtaaagatcagaagcgtcgggaagctgagctgcgtgcgcaaacccagccactgcgtaaagagattgcccgtctggaaaaagagatggagaagctgaacgcgcaactggcgcaggcggaagagaaactcggcgacagcgaactgtatgaccagagccgtaaagcggagttgaccgcctgcctgcaacagcaagccagcgccaaatccggcctggaagagtgcgaaatggcatggctggaagcccaggagcagcttgagcagatgctgctggaaggccaaagcaactgatggcgcagataacgacgaccgatgccaatgaattcagcagcagtgctgaattcatccccatgcgcggctttagcaattgtcatctgcaaaccatgctgccgcgtctgtttcgtcgtcaggtgaaattcaccccgtactggcagcggctggagttgcccgacggcgattttgtcgatcttgcgtggagtgaaaaccctgcacaggcgcaacataaacctcgtctggtggtgtttcacgggctggaaggcagtctcaacagcccttacgcccacggtctggttgaggcggcgcaaaagcgcggctggctgggcgtggtgatgcattttcgcggatgcagcggtgaaccaaaccgtatgcaccgcatttaccattcgggcgaaaccgaagacgccagttggtttttacgctggctgcaacgcgaatttggtcatgcgccaacggctgccgtcggctattcgctcggcggtaatatgctggcctgtttgctggcaaaggaaggcaatgatctcccggttgatgcggcggtgattgtctctgcgccgtttatgctggaagcctgtagctatcatatggaaaagggcttttcccgcgtttatcagcgttacttgctgaacctgttaaaagccaatgccgcgcgcaagctggcagcctaccccggaacgctgccgattaatctcgcgcagttaaaatcggtacgtcgcatccgtgaatttgacgatctcatcaccgccagaattcacggctacgccgacgctatcgactattatcgtcagtgtagcgccatgccgatgctgaaccggatcgccaaaccgacgctgattattcacgccaaagacgatccgtttatggatcatcaggtgatcccgaaaccggaaagtctccccccgcaggtggagtatcaactgactgaacatggcggtcatgttggctttattggcggtacattacttcatccgcaaatgtggctggagtcacgcattcctgactggttaacaacgtatctggaggcgaaatcatgttgattccgtggcaagacctctcccccgaaacgctggaaaatttaattgaaagctttgtgttacgtgaaggcaccgattatggtgaacatgagcgtacacttgaacagaaagtcgccgacgtcaaacgccagctacagtgcggagaagcggtgctggtatggtcggagctgcacgaaacggtcaatattatgccgcgcagtcagtttcgcgaataacctgcaaccgtcggcggacgagataataatgatagctaagtcatggagttactatgtctgccaaacatccggtcattgcggtaacaggatccagcggcgcggggaccaccaccaccagcctcgcgtttcgtaaaatattcgcgcagttaaatctgcatgcagctgaggtggaaggcgacagttttcaccgttacacccgcccggaaatggacatggcgatccgcaaagcgcgcgacgccgggcggcatatcagctacttcggccccgaggctaacgacttcggcctgctggaacaaaccttcattgaatacggtcagagcggcaaagggaaatctcgcaaatatctgcatacctacgacgaagccgtaccgtggaatcaggtaccggggacattcaccccctggcaacctttaccggaacccactgatgtactgttttatgaaggtttacacggcggcgtagtcacgccacagcataacgttgcgcagcatgtggacttactggtcggcgtggtgcctatcgttaaccttgagtggattcaaaaactgatccgcgacaccagcgagcgcgggcactcacgagaagcagtgatggactcagtagtgcgttcaatggaagactatatcaactacatcacaccgcagttttcccgcacccatcttaacttccagcgcgttcccaccgtcgacacttcaaacccgttcgcggcaaaaggtatcccgtcgctcgatgaaagctttgtggtgatccattttcgtaatctggaagggatcgatttcccctggctgctggcgatgttgcaaggctcattcatttcccacatcaatacgttagtggtaccgggcggcaaaatgggtctggcaatggaattaattatgctgccgctggtgcaacgattgatggaaggaaagaaaatcgagtaactctgctattacgccggataaaatactatccggcttcacaacgggatagttaagtcacgcggcaaccacttcatacgagtgagtaatattcaccgctttttccagcatcaacgccactgaacaatatttctcggcagagagatcaaccgcacgcgcaaccgctgcgtctttcaggtcgcgaccggtgacgataaaatgcagattaatgtgcgtaaacaggcgtggtgcctcttcgcggcgttcagaggtcaattttacttcacaatcgaccacatcctgacgccctttttgcaggatcgaaaccacatcgatggcactgcaaccacccgccgccatcaacaccatttccatcggacttggtgctttatcgcctgagttgccgtccattaaaatctgatgaccagaggcggattcgcccagaaaagttaacccttcgacccacttcactcgcgcttgcatttttgctactccactgcgtcaattttcctgacagagtacgcgtactaaccaaatcgcgcaacggaaggcgacctgggtcatgctgaagcgagacaccaggagacacaaagcgaaagctatgctaaaacagtcaggatgctacagtaatacattgatgtactgcatgtatgcaaaggacgtcacattaccgtgcagtacagttgatagccccttcccaggtagcgggaagcatatttcggcaatccagagacagcggcgttatctggctctggagaaagcttataacagaggataaccgcgcatggtgcttggcaaaccgcaaacagacccgactctcgaatggttcttgtctcattgccacattcataagtacccatccaagagcacgcttattcaccagggtgaaaaagcggaaacgctgtactacatcgttaaaggctctgtggcagtgctgatcaaagacgaagagggtaaagaaatgatcctctcctatctgaatcagggtgattttattggcgaactgggcctgtttgaagagggccaggaacgtagcgcatgggtacgtgcgaaaaccgcctgtgaagtggctgaaatttcgtacaaaaaatttcgccaattgattcaggtaaacccggacattctgatgcgtttgtctgcacagatggcgcgtcgtctgcaagtcacttcagagaaagtgggcaacctggcgttcctcgacgtgacgggccgcattgcacagactctgctgaatctggcaaaacaaccagacgctatgactcacccggacggtatgcaaatcaaaattacccgtcaggaaattggtcagattgtcggctgttctcgtgaaaccgtgggacgcattctgaagatgctggaagatcagaacctgatctccgcacacggtaaaaccatcgtcgtttacggcactcgttaatcccgtcggagtggcgcgttacctggtagcgcgccattttgtttcccccgatgtggcgcagactgatttatcaccccgatatcaactatgcacttcgacaaacgctggtgctatgtttgcccgtggccgttgggttaatgcttggcgaattacgattcggtctgctcttctccctcgttcctgcctgttgcaatattgcgggccttgatacgcctcataaacgttttttcaaacgcttaatcattggtgcgtcgctgtttgccacctgtagcttactgacacagctgctactggcaaaagatgttcccctgccctttttgctgaccggattaacgctggtacttggcgtcactgctgagctggggccattgcacgcaaaattgcttcctgcatcgctgctcgccgccatttttaccctcagtttggcgggatacatgccggtctgggaaccgttgctcatctatgcgttgggcactctctggtacggattgtttaactggttttggttctggatctggcgcgaacaaccgctgcgcgagtcactaagtctgctgtaccgtgaactggcagattattgtgaagccaaatacagcctgcttacccagcacaccgaccctgaaaaagcgctgccgccgctgctggtgcgccagcaaaaagcggtcgatctaattacccagtgctatcagcaaatgcatatgctttccgcgcaaaataatactgactacaagcggatgctgcgtattttccaagaggcgctggatttacaggaacatatttcggtcagtttgcatcagccggaagaggtgcaaaagctggtcgagcgtagccatgcggaagaagttatccgctggaatgcgcaaaccgtcgccgctcgcctgcgcgtgctggctgatgacattctttaccatcgcctgccaacgcgttttacgatggaaaagcaaattggcgcactggaaaaaatcgcccgccagcatccggataatccggttgggcaattctgctactggcatttcagccgcatcgcccgcgtgctgcgcacccaaaaaccgctctatgcccgtgacttactggccgataaacagcggcgaatgccattacttccggcgctgaaaagttatctgtcactaaagtctccggcgctacgcaatgccggacgactcagtgtgatgttaagcgttgccagcctgatgggcaccgcgctgcatctgccgaagtcgtactggatcctgatgacggtattgctggtgacacaaaatggctatggcgcaacccgtctgaggattgtgaatcgctccgtgggaaccgtggtcgggttaatcattgcgggcgtggcgctgcactttaaaattcccgaaggttacaccctgacgttgatgctgattaccaccctcgccagctacctgatattgcgcaaaaactacggctgggcgacggtcggttttactattaccgcagtgtataccctgcaactattgtggttgaacggcgagcaatacatccttccgcgtcttatcgataccattattggttgtttaattgctttcggcggtactgtctggctgtggccgcagtggcagagcgggttattgcgtaaaaacgcccatgatgctttagaagcctatcaggaagcgattcgcttgattcttagcgaggatccgcaacctacgccactggcctggcagcgaatgcgggtaaatcaggcacataacactctgtataactcattgaatcaggcgatgcaggaaccggcgtttaacagccattatctggcagatatgaaactgtgggtaacgcacagccagtttattgttgagcatattaatgccatgaccacgctggcgcgggaacaccgggcattgccacctgaactggcacaagagtatttacagtcttgtgaaatcgccattcagcgttgtcagcagcgactggagtatgacgaaccgggtagttctggcgatgccaatatcatggatgcgccggagatgcagccgcacgaaggcgcggcaggtacgctggagcagcatttacagcgggttattggtcatctgaacaccatgcacaccatttcgtcgatggcatggcgtcagcgaccgcatcacgggatttggctgagtcgcaagttgcgggattcgaaggcgtaatgcaggctaaaccatcggataaggcattcacgccgcatccgacatcttttgcctgatgcttcgtatttacgccccaaccaccttcgccaccgcgtgggcgaaacgttgcatcccttcatcgatatccgcatcttccaccaccagcgacggtgcaaaacgcatcacatccggtccggcattcagcaccattacgccagcctctgcgcccgcatacaggaaatcacgcgcccgacctttgtactgtggtttcagctctgcgccaatcaacagccccataccgcgaatatcgctaaatacatcgtactgctgatcgatcttctgcagatggtcaacaaaacgctggcgtttcgcctgaatgccttccagcacttcaggggtattgatgatatcaaacgccgcccccgctactgcacaggccagaggattaccgccgtaggtggaaccgtgagaaccaggatgaaacgcagaagcaatttccgccgtggtcagcatggcgctaatcgggaagccgccgcctaacgctttcgcagaggtcagaatatccggcgtaacgccgtagtgcatgtaagcaaacaaatcgccggtccgccccatcccgcactgcacttcatcaaacaccaataatgcctgatgttgatcgcacagctcgcgcaagccctgcaaaaactctggcgtcgctgccgtcacaccgccctcgccctggatcggctcaaccaccaccgcacaggtgtgatcatccatcaccgctttcactgcatggagatcgttaaagggaacgtggatgatgtctgccggtttcggcccaaagccgtcggaatattttggctgcccacccaccgaaacggtaaacagcgagcgaccatgaaaagcgttatggaaggcaataattttggttttgaacgggctatgacgcacacaggcgtaatggcgtgccagtttaaaggcggtttcgttagcttccgtgccggagttcataaacaccacgcgttcggcaaacgttgcctcaatcagtttacgcccaagacgcagcgccggttcattggtgaaaacgttactgatatgccacagagtttcgccctgggtttttaacgcgttcaccagcgcaggatggcaatggcccaacgccgtaactgcaatgccacccgcgaaatcgacatactccttgccttgctgatcccagattcggctgccctgaccttttaccggaataaactctgccggagcataaatcggcaggatcacttcatcgaaagtcgcgcgtgtaattgctgtttgttcaattgccatctcatgatcaccctgttacgcataaacaaatgtgaaattataaccacaaaatatgcataaaaaatcactaaatggcaatcagaaatcagcgatgcaggaaattagccagcagttgatgtccttgttcgctaagaatactttctggatggaactgcacaccttccagatcccactggcgatggcgaatccccataatctcgcgggtttcgctccaggccgtcacgtcaaagcacgctggtaatgagtcaggttccaccaccagcgaatggtagcgtgtcacggtaagtggatttgccagcccccgaaatacgccctcaccgttatgtgtaatcggcgaggttttgccgtgcatgacctttgcggcgcgcacaactttaccgccaaatgcctgcgccattgcctgatgaccgaggcagacgccaagaatcggcaagcgcccggcatagtggcgaataacgtcaagggagatcccggcttcatctggcgtacaggggccaggtgagatgacaattttttgtggtttaagggcgtcgatatccgccagcgtcaacgcatcgttgcgcttaaccagcacatccgcccccagttcacaaaagtactggtagaggttccaggtaaaagaatcgtagttatctataagcaggatcatggcggctccggtacaaaagaaccgcgctattttactcagattccccggcttcgcttaccactttgctaaatatcatctgcagtgcggtgagatcccccattgccccactctgatttgcctgattccaggcctctttttcgataccctgccagctcagttgatatccggcatgaatcgccagttgctcgaagaagatccgctgtgccagaccacttcccacccggaagggatgcagcacgttgatttcacaatagtaatgcgccagccgctcgacgaacttcgctttctccaggccaaccagataaccttcttcctccagatcctgcatcagggcattgccctctttttcgatataagcaaagtggcagaacggcgtatcaccctgataaatatcaacttcacgcagttgccctgcccagtcgaaaatatcctgatacagctggcgatggatagttcgcaaatgcggtaaaccgcgcaccagcggaccaagctcaatggtcgcagcacgcagcgccgtcatttcgtaagcggcctgttccagccgctgctgctggcggatgttcagccggttacgcatgatatcaaggcctggataaagatacggatcgcgcccttcgccgaatttatcgctcatagtgactcctcagctcttcaaggcgcgctaaagcctctgcggcagtaagagtgactaaaggcatctcgacgccttcaagacggcgactggcctgaaaattacgattacgctgaagctcccagagacgggacttttgcttatcggtgagtttcttcacttgatgcctccctgaacgtgtccatttgccacaagtataagcggcaaatccgggttacgccgggagagcagaagcgcgggcaagattgcccgcgcgagaaatcattacggcaggactttagcggaaaggataactaccggttttgacggcacattctggtacggaccaacgtcatgagtcggcacctgggaaatcttatcggcaacgtccatgcctttcaccactttaccaaataccgcgtaaccgaaatcacgctgaccatggtcaaggaaggcgttatcggcaacgttgataaagaactggctggtggcgctgtctttgtcagcggtacgtgccatcgcgatggtgccacgcgtgttgcgcaggccgttatcggcttcatttttgattggcgggtttggttttttctgctgcatctgctcggtgaaaccgccgccctgaatcataaagccaggaatgacgcggtgaaaggtagtgttgttataaaaaccgctgttcacataatcgacaaagttttgcacagacactggcgctttttgtttatccagctccagttcgatgttaccagctgaggttgtcaacaatacgtgcgggtcccctttcgctgccattgctgcgggagaaagagcagaaagagcgaaaacagcagccatcgccgccagggtcgatttgaacatgagatttccttaacaaacagagcagaaaaaaagcaagtgaagagattctaaatagccttcaagaacaaggccatccctttacctaattttacgtatctgaaatatatgtaacctgacgatcactttttattccgtgatcaaaatcacctcttaaaatgcaatttagcaaccgattgcaataaaacatttaaacagatcacaaaatcacctaaaatcgcccgctcgcggcatatcccgctatgccattttatttttgaacgcaggccaatcatgactaacagcaatcgcatcaagctcacatggattagctttctctcctacgcactgactggtgcgttggttattgtcaccgggatggtgatgggaaatatcgccgattatttcaatctgcctgtttccagtatgagtaataccttcaccttcctcaacgccggcattttaatctctatcttcctcaacgcctggctgatggaaatcgtcccgttgaaaacgcagttacgttttggctttctcctgatggtgctggcggttgccggtttgatgttcagccacagcctggcgctgttctcggcggcgatgttcattctcggggtggtcagcggcatcaccatgtcgattggtacattcctggtaacacaaatgtatgaagggcgtcagcgcggttcccgcctgttatttaccgactccttcttcagtatggctgggatgattttcccaatgatcgccgcgtttctactggcgcgcagcattgagtggtactgggtttatgcctgcatcgggctggtggatgtcgctatttttattctgaccttcggctgtgagttcccggcgctgggcaaacatgcgccaaaaacggatgctccggtagagaaagaaaagtgggggatcggcgtactgtttctctctgttgcggcgttgtgctacatcctcggtcagttaggttttatctcctgggtgcctgagtatgccaaaggcctgggcatgagcctgaacgacgcgggcacgctggtgagtaacttctggatgtcatacatggtcggcatgtgggcgttcagctttattcttcgcttctttgatttgcaacgcattctgaccgtactggctggtctggctgcgattctgatgtacgtctttaacaccggaacaccagcacatatggcgtggtcaattctcgctctgggcttcttctccagcgcgatctataccaccatcatcaccctgggttcacagcagaccaaagtaccgtcgccaaaactggttaactttgtcctgacctgcggaaccatcggtactatgttgacctttgtggttaccggcccgatcgttgaacatagcggtccgcaggcggcactgcttacagcaaacggtctgtacgctgtcgtctttgtgatgtgcttcctgttaggtttcgtcagccgtcaccgtcagcataacaccctgacctctcattaattgctcatgccggacggcactatcgtcgtccggccttttcctctcttcccccgctacgtgcatctatttctataaacccgctcattttgtctattttttgcacaaacatgaaatatcagacaattccgtgacttaagaaaatttatacaaatcagcaatatacccattaaggagtatataaaggtgaatttgatttacatcaataagcggggttgctgaatcgttaaggtaggcggtaatagaaaagaaatcgaggcaaaaatgagcaaagtcagactcgcaattatcggtaacggtatggtcggccatcgctttatcgaagatcttcttgataaatctgatgcggccaactttgatattaccgttttctgtgaagaaccgcgcatcgcttatgaccgcgtacacctctcgtcttacttctctcaccacaccgccgaagagctgtcgctggtgcgcgaaggcttctacgagaaacacggcatcaaagttctggtcggcgaacgcgctatcaccatcaaccgtcaggagaaggtgattcactccagcgccggacgtaccgttttttatgacaagctgatcatggcaaccggttcctacccgtggatcccgccaatcaaaggttctgatactcaggactgctttgtctatcgcactattgaagacctcaacgccattgaatcctgcgcccgtcgcagcaaacgcggtgccgttgttggtggcggcctgttaggtctggaagccgcaggcgcgctgaaaaacttaggtattgaaacccacgttatcgaatttgcccctatgctgatggcagaacagcttgatcagatgggcggcgagcagctgcgtcgcaaaatcgaaagtatgggcgtgcgcgttcacaccagcaaaaacacccttgagattgtgcaggaaggtgttgaagcgcgtaaaaccatgcgttttgccgacggcagcgaactggaagtcgactttatcgtcttctctaccggtatccgtccgcgcgataagctggcaacccagtgtggtctggacgttgctccgcgtgggggtattgtcattaatgattcctgccagacttccgatccggatatctacgccatcggtgaatgcgcaagctggaacaaccgtgtatttggtctggtagcacctggctacaaaatggcgcaggtcgccgttgaccatattctcggtagcgaaaacgcctttgaaggtgctgaccttagcgccaagctgaaactgctgggcgtagacgtaggcggtattggtgatgcgcacggtcgcacgcctggcgcacgtagctacgtttacctcgacgaaagtaaagagatctacaaacgcctgattgtcagcgaagacaacaaaaccctgctcggtgcggtactggtgggcgataccagcgactacggtaacctgctgcaactggtgctgaacgctatcgaactgccggaaaacccggattccctgatcctgccagcacactcgggtagcggcaagccgtctatcggtgttgataaactgccggacagcgcgcaaatctgctcctgcttcgacgtcaccaaaggtgatctgattgctgccatcaacaaaggctgccacacagttgcggcgctgaaagctgaaaccaaagcgggtactggctgcggtggctgtatcccgctggtcactcaggtactgaacgcggaactggcgaaacagggcatcgaagttaacaacaacctgtgcgaacactttgcttattcgcgtcaggaactgttccatttgatccgcgttgaaggcattaaaaccttcgaagaactgctggcgaaacacggcaaaggctacggttgtgaagtttgtaaaccaaccgtcggttcgctgctggcctcctgctggaacgaatacattctgaagccggaacatactccgctgcaggattctaacgacaacttcctcgctaacatccagaaagacggcacctactcggtgatcccgcgttctccgggcggtgaaatcaccccggaagggctgatggcggtaggtcgtatcgcgcgtgaatttaatctctacaccaagatcactggctcccagcgtctggcgatgtttggcgcacagaaagacgatctgccggagatctggcgtcagctgattgaagccggcttcgaaaccggtcatgcctatgcgaaagcactgcgtatggcgaaaacctgcgtgggtagcacctggtgccgctacggcgttggcgacagcgtcggcctcggcgtggaactggaaaaccgctacaaaggcatccgtacgccgcacaaaatgaagttcggtgtctccggctgtacccgtgaatgttcagaagctcagggtaaagacgtgggtattatcgccactgaaaaaggctggaacctgtatgtttgcggtaacggcggcatgaaaccgcgtcatgcggatctgctggcggcggatatcgatcgcgaaacgctgatcaaatatctcgaccgcttcatgatgttctacatccgtactgccgacaaactgacgcgtaccgcaccgtggttagaaaacctcgaaggcggcatcgattacctgaaagcagtgatcattgacgacaaactggggctgaacgcacatctggaagaagagatggcgcgcctgcgtgaagcggtactgtgtgagtggactgaaacggtcaatacgccgtctgcgcagactcgcttcaaacacttcatcaacagcgacaagcgtgacccgaacgtgcagatggtgccagagcgcgaacagcaccgtccggcaacgccgtatgaacgtatcccagtaactctggtggaggacaacgcatgagccagtggaaagacatctgcaaaatcgatgacatcctgcctgaaaccggcgtctgcgcgctgttaggtgacgagcaggtcgcgattttccgcccgtatcacagcgatcaggtgtttgcgatcagcaacatcgacccgttcttcgagtccagcgtgctgtcacgcggactgattgcggaacaccagggcgagctgtgggtcgccagcccgctgaaaaaacagcgttttcgcttaagcgacggcttgtgcatggaagacgaacagttttccgtcaaacattacgaagcgcgagtgaaagacggcgtggtgcagctgcgcggttaatgttttaacgggaggcgcaatgcctcccctttttgcatggtcctgtaatgaccttcggtatattgcaggacattttttaaactttttgttttatttttttgtttttattttttaaaggataatcaaatgtttacagacactattaataagtgtgcggctaacgctgcgcgcattgcacgcctgtcggcaaataacccgctcggcttttgggtcagctccgccatggcgggcgcgtatgtgggtcttgggatcatcttgattttcacgctcggtaatttgctcgacccgtccgtacgtccgctggtgatgggcgcgacctttggtatcgccttaacgctggtgattatcgccggttctgaactgttcaccggacacaccatgttcctcacctttggggtaaaagcgggcagcatcagccacgggcaaatgtgggcaatcctgccgcaaacctggctgggtaacctggtcggttccgtcttcgttgccatgctctatagctggggcggcggtagcctgctgccggtagataccagcatcgttcactccgtcgcgctggctaaaaccactgcaccggcaatggtactcttcttcaaaggtgcattgtgtaactggctggtttgcctggcaatctggatggcgctgcgcactgaaggggcggcgaaatttatcgctatctggtggtgtctgctggcatttatcgcgtccggctacgagcactctatcgctaacatgacgctgttcgcgctctcctggttcggcaaccacagcgaagcctacacgctggcgggtattggtcataacctgctgtgggtgacgctgggtaatactttatcaggtgccgtattcatgggattgggttattggtatgctacgccgaaagcgaatcgtccggttgcggacaaatttaatcaaactgaaacggctgccggttaattactaaggggtttttacgtggatcatttgcctatattttgccaattacgcgatcgcgactgtctgattgtcggcggtggtgatgtcgcggaacgcaaagcaaggttgctgttagacgcaggcgctcgcttaacggtgaatgcattagcgtttattccacagttcaccgcatgggcagatgcaggcatgttaaccctcgtcgaagggccatttgatgaaagccttctcgacacctgctggctggcgattgcagcgacggatgatgacgcgcttaaccagcgcgtcagcgaagccgctgaagctcgtcgcatcttctgtaacgtagtcgatgcgccgaaagccgccagctttattatgccgtcgattattgaccgctcaccgctcatggtcgcggtctcctctggcggcacctctccggttctggcacgcctgttgcgcgaaaaactcgaatcactgctgccgttgcatctgggccaggtagcgaaatacgccgggcaattacgcgggcgagtgaaacaacagttcgccacgatgggtgagcgtcgccgtttctgggagaaattgttcgttaacgatcgcctggcgcagtcgctggcaaacaacgatcagaaagccattactgaaaccaccgaacagttaatcaacgaaccgcttgaccatcgcggtgaagtggtgctggttggtgcaggtccgggcgatgccgggctgctgacgctgaaaggactgcaacaaattcagcaggcagatgtggtggtctacgaccgtctggtttctgacgatattatgaatctggtacgccgcgatgctgatcgcgttttcgtcggcaaacgcgcgggataccactgtgtaccgcaggaagagattaaccagatcctgctgcgggaagcgcaaaaaggcaaacgcgtggtgcggctgaaaggtggcgatccgtttatttttggccgtggtggcgaagagctggaaacactgtgcaacgcgggtattccgttctcggtggttccgggtattaccgcagcttctggttgctctgcctattcgggtattccactcacgcatcgcgattatgcccagagcgtacgcttaattaccggacacttaaaaaccggtggcgagctggactgggaaaacctggcggcagaaaaacagacgctggtgttctatatggggttgaatcaggccgcgactattcagcaaaagctgattgaacacggtatgcctggcgaaatgccggtggcaattgtcgaaaacggaacggcagtcacgcagcgcgtgattgacggtacgctcacgcaactcggtgaacttgctcagcaaatgaacagtccatcgctaattattattggtcgggttgttggcctgcgcgataaactgaactggttctccaaccattaatttaacccgggccagagaattctggccttcttaatgactctttttatatattcagcaaataaaacatagccccttaataaatattatctgctaatgggttatattcaccgttacagcgacttacaaaattaagtcattcgctcactgacgccaattaaatattcctgtatcgttcttaacgagcagtctgcttatattcatataatcaatgaatattaattaatatataatacatagggaatgtaaatgaacaaatttattaaagttgcactggtaggtgcagtactggctacgttaactgcatgtactggtcatattgaaaaccgtgataagaactgctcttacgactacctgctgcacccggcaatttctatttctaaaatcattggcggttgcggtcctactgcacagtaagtctctgacagaaatcggctaacaccggtttaattgcccgacgccctctggattttccgagggcgtatttgtttctatgtccttcttgcccccgcccgtaaaaatattttcactttaaattcaatttgataactacatccattagccacagcgcgatcctgtgcgaaattttgtgatcttcctccacattacataacatcatatgttgttatattcatcatgcattgtcatgttaccttttaaatgactgcaaactctcccctacaacgtattggacaagaaaaaggtatcgctatgggaagccaggaactccaacgcaagctcggattttgggccgttcttgcaatcgccgtcgggacaaccgtcggctccggtatttttgtatctgtgggtgaagtggcaaaagcagcgggcacgccgtggcttacggtgctcgcgtttgtcattggcgggttaattgtgatcccgcaaatgtgcgtctatgcggaactatccaccgcttatccggaaaatggcgcagattatgtttatctgaaaaatgccggaagccgaccgctggctttcctctccggctgggccagcttctgggccaacgatgcgccgtcattgtcgattatggcgctggcgattgtcagcaatcttggctttttaacgcctatcgatccgttgctcggtaaatttatcgccgccggattaattatcgcctttatgttgctacacctgcgctccgttgaaggcggcgcagcgtttcagacgctaattaccatcgccaaaattatcccgttcactatcgtcattggccttgggatcttctggtttaaagcggagaattttgccgcccctaccaccactgcgattggcgcaacgggcagctttatggcgctgctggcggggatctctgccaccagttggtcgtataccggcatggcctctatctgttatatgaccggcgaaattaaaaaccccggaaaaaccatgccacgagcgctgattggttcctgtctgctggttctggtgctctacaccctgctggcgctggtgatttccggcctgatgcccttcgacaaactcgccaattctgaaacgccgatttccgacgccctgacctggatccccgcactcggcagcaccgctgggatctttgttgccatcacggcgatgatcgtcattcttggttcgctttccagctgcgtgatgtaccagccgcggctggaatacgcgatggcgaaagacaacctgttctttaaatgcttcggccatgtgcatccgaaatacaacacgccggatgtctccatcatcctgcaaggggcgctggggatcttcttcatcttcgtttccgatctcaccagcctgctgggttatttcaccctggtgatgtgtttcaaaaataccctcaccttcggctccatcatctggtgtcgtaaacgcgacgattacaaaccgctgtggcgtactccggctttcgggctgatgaccaccctcgccattgcgtcaagcctcattctggtcgcctcaacctttgtctgggcaccgattcccggccttatctgcgccgtcatcgttattgctactggtctgcctgcttacgccttctgggcgaagcgtagccgccagctcaacgctttgtcgtaatgttatctggagaaaataaaatgttggatattgataaaagcaccgtggactttctggtcaccgaaaatatggttcaggaagtggaaaaagttctcagccatgacgttccgctggtgcacgccatcgtggaagagatggtgaagcgcgacattgatcgtatttatttcgttgcctgcggatcgccactcaacgcggcgcaaacggcgaaacatctggcggatcgcttttccgatcttcaggtctacgccatttccggctgggagttctgcgataacaccccgtatcgcctcgacgatcgttgcgcagtaattggcgtttctgactacggtaaaaccgaagaggtaatcaaagcgctggagctgggccgggcctgcggcgcactcactgcggcgttcaccaaacgcgcggatagcccgattacctcggcggcggaatttagcattgattatcaggccgactgtatctgggaaattcacctgctgctctgctacagcgtggtgctggagatgatcacccgcctcgcgccgaacgcggaaatcggcaagatcaaaaacgatctcaagcagttgccgaatgcgctcggtcatctggtacgcacctgggaagaaaaaggccgccagcttggtgaactggccagccagtggccgatgatttataccgttgctgcgggtccgctgcgtccgctgggttacaaagaaggcattgtaacgctgatggaatttacctggacgcacggctgcgtgattgagagcggagagttccgccatggcccgctggagattgtcgaaccgggcgttccgttcctgttcctgctcggcaatgatgaaagtcgccacaccaccgaacgcgccattaactttgttaaacagcgtactgacaacgtgatcgtcatcgattacgccgaaatttcgcaagggctgcacccgtggctggcaccgttcctgatgttcgtgccaatggagtggctctgctactacctgtctatttacaaagatcacaacccggatgaacgccgctattacggtggtctggtggaatattaatccctctcccggcccggcaacgggccggatttacgcaaggagttacccgatgaaaacaggtatgtttacctgcggccaccagcggctgcctattgaacacgcatttcgtgatgcaagcgagctgggttacgacggcatcgaaatttggggcggtcgcccgcacgcgttcgcgccggacttaaaagcgggcggcatcaaacaaatcaaggcgctggcgcagacgtatcagatgccgattatcggctatacgccagaaaccaacggctatccgtataacatgatgctgggcgatgaacatatgcgtcgcgaaagcctcgacatgatcaagctggcgatggatatggcaaaagagatgaacgcgggttatacgctgatttccgcggcccacgcgggctatctcacgccacctaatgttatctggggacggctggcagagaacctaagcgaactgtgtgagtacgcggaaaacatcggcatggatctaatcctcgaaccgttaacgccgtatgaatcgaacgtcgtgtgtaatgctaatgatgtgcttcatgcgctggcgctggtgccttcgccgcgcctgttcagcatggtcgacatttgcgcgccgtatgtccaggcggaaccggtgatgagttatttcgacaaactgggcgataaattacgtcatctgcatattgtcgacagcgacggggccagcgacacgcattacattcctggagaaggcaaaatgccgctgcgggaactgatgcgcgatattattgagcggggctatgagggttactgtacggtggagctggtgacgatgtatatgaacgagcccagactctatgcccgccaggcgctggaacgctttcgcgcgctgctgccggaggatgagagatgaaaaccctggcgataatcggcgataactgcgtcgatatctacccgcaactgaataaagcgttttctggcggtaatgcggtcaatgtggcggtgtactgcactcgctacggcatacagccgggatgcattacctgggtgggtgacgatgactacggcacaaagctgaagcaggatctcgcccgcatgggcgtcgatatcagccatgtccatacgaaacacggcgttaccgcacaaactcaggtggaactgcacgacaatgatcgcgtttttggcgactacaccgaaggcgtgatggccgactttgccctgagtgaagaggattacgcctggctggcgcagtatgacattgtgcacgcggcaatctggggacatgcggaagacgcattcccacagctgcacgctgcgggcaaacttaccgctttcgacttctccgacaagtgggacagcccgctctggcagacactggtgccgcatctcgattttgcctttgcctccgcaccgcaagaagacgaagcgctgcgtctgaagatgaaagcgattgttgcccgtggcgcaggcgtggtgattgtcacgctgggtgaaaacggcagcattgcctgggatggcgcgcagttctggcgtcaggctcctgaaccggtgacggttatcgacaccatgggtgccggagattcgttcattgccggattcctttgcggctggtctgcggggatgacattaccgcaggcgatggcgcagggaacggcgtgcgcggcgaaaaccattcagtaccacggtgcctggtaggtataacgttggcgtgagcatcttcacgccaacgtgctgttacttgccggaaaacgaccctataatccgagtaattcattctttatttcagggtcgattatgtcagctacggaccgctactctcatcaactcctctacgctaccgtccgccagcggttgctggatgatatcgcgcagggggtttaccaggccgggcaacagatccctaccgaaaacgagctttgtacgcaatataacgtcagccgcattactattcgcaaagctatcagcgacttagtggcagacggcgtactgatccgctggcagggaaaaggcacctttgtacaaagccagaaagttgaaaacgccctgcttactgtcagtggttttaccgattttggcgtctcacaaggcaaggcgacgaaagagaaagtgatcgaacaggaacgggtcagcgccgcgccgttttgcgaaaagctgaacatccccggaaacagcgaagtgttccatctctgccgggtgatgtatctcgataaagagccgctgtttattgatagttcatggatcccgctgtcgcgttatcctgactttgatgagatttacgtcgaaggaagctccacctatcagttatttcaggagcgttttgacacgcgagtggtcagcgacaaaaagaccatcgatatctttgccgccacccgcccgcaggcaaaatggctgaaatgcgaactgggcgaaccgttgtttcgcatcagcaaaatcgcctttgatcagaatgacaaaccggtgcacgtctccgaactcttctgccgcgccaatcgcatcaccttaactattgataataaaagacattaaccgtaggccggataagatgcgccagcatcgcatccggcgatgctggcgcgttgaattttacatcccgtacgttcccctcaccctaaccctctccccaaaggggcgaggggaccgttcagtacggaatttagcttgacggtgctatccagcattaaatactggcaatactctcacgcaaaatccgcagcaccgtctcttcaccgctgcgattcgggttaatgcgaatcgcacaatgttctgattgtggattcgcctggcgaaacgttccggaaaggcgataaaagagcggcgggatttcatatttcgactctgcacccaccgggtaaggcaaggcaccgcgcttttgcgcctcttccagcactctggcggcaatcggctgatgaaactcgacaatcaacaccttcgactgcgcattagcaatcaccgcgcttttcacttccggcaccgcaccaccgttaagcaaagccagcaaccgttcagatacccctgcctgcaccgcgtgcatcactggcgcaaacaccagaccacgcaatacttccagcgcctgtgcgccctggatctggctaccgccggagtaaagcgtggcgcgaatacggttgataacatcagcatcgccgaccactgcaccaacaccctctggcccaaatagcttgaagcaggaaaatgtcgagacattcgcgccgcattcacagccgattcgagccaccttcatcaccgcatagttgtcatcggttaacgctggaacacctgccgcgcgcaacgttgccagcacatctgccagcacgtagctgtcctgcggctgctggcgcgtatgctgcaccagcgccgcatccggttgttgctcgtcgacgacctgcttcagtgccgacaggtcattgaaatcaacagtaataagcgtcagccccatctgctcaataataacccgtgtcgtcgggtaaacaggcgcgtcatgcaccagaagacgctgccccggtttgagcaaagccgccagcccggcgcgaatcgcgccagtccccgcgccctgcaccagcgccgcagcctgtgcgtgaaatgcatcagccagcacctgttccacacgctgggtaacgcgcggttgattcagtcctagcgttaagcctaaatcaccgccagtaagaaactcgctgccggggaaatggcgacaaatgctatccaccagcgcaaactgcttttgctgcgcctcaataatcgtcaggctttgcagaggaaacgtcttcataggtgccttccttaagccggaacgaacaggccaagccagtaaagaacattcagcagaataccggtgatcattactgccacgaccggtgccgccattttctgtaccggacggcccagggattcgttgaggaagtaaatggcaaccgcgatagagaatccggtataacccgccatcttaattgctgcgaaaatcgaaccgaccagcagcgccacttccatcagcatattcatggcgttacggatgttatccgacgcattacgcaccgacgggtagcgtcccagccatttgccgatcgaacgaagcagcaagacttccgccgaaataaccactgcgcctaataccgctgcaaccatcggattcggcgagagatagcccaccgcataaacaaaggtaaagcccgcaactgcatacacacccgttgctaacgcggtggtggcaatcaacggcacaaaccccagtccgcgcataaattctgccagaaccgcctgattaatcagcgtttgcgattgttccggcgttacgcctgcggaatatgctttctccagtgtgaagatcgacacttcactgccagcaaaaatcttcatgctggcaacggcggcaatcaatgctcccacgatggcgatatagggtaagtttttgataatccgtgacgtgcgttcttcaaacaccgaaagcccgctggcatcaatgtcattttcatcacgatgacgcaggtcgtgagttatcgcgatccccagcagcatcaccatgccaataaagatttcgatggattcagggttaagatgtgggaaatagcgcacgactaccacacgggtcatcagtaccaccacggcggcgatcagactttgcttccagccaaactggtagaaaatcgccaccagcgggaacagtgcaaaagctgaaaccaccggcgagcttaattcccccaggctacctaatacatccaccggcagcgcggtcagcagctggtttactggcaacaggcaagtaaggatcaacacgccccagatagcgccaagaccaaacgccatcaggctgtttatcgccaggacgccgaggatatcggtaggaagaaagagtaaccatgcgttgagcagcccggttttcagggtaaaagagatccccaccgaggccacaaaaccaatgctcagaccaaaagcgatactccccgcctcgcgacggttcatatagccttcaatcagttgcggcaggatcgggcggatgccgtcatgaaaaacagccgccgagcgatgcgccagaagcgatgtcatacccgtcaggcacgccaccacgataatctgaatatacagatccatagtcgtgccttttatttcagatggttaatcagcatcggaatcgcgtgttcgacgtgctcaacggaaaggccaaacgccacttttccttcagcgatcattttggcgatatgctcgtctttcgctttaatgcctggtttggcaatggtgcaacttttgttatagcctatcaccgcgatggcaatcgacaatgccgcgcccgcaccggtattacacgcgccgatgtaataatccagttgcccggatttcaccttcattgccgcttccatgtcgttgtgaatgaaaacttcaaaacagccaggagccgtcgcttcaatagtttttttaatctgctcacgctgtaagcctgcaacgccaatctttttcatgagtctgtccttattggaaaaattgagagggattttcacgtaacatcacatccacatcggcctgactgaatcctgactggcgcaattgcggaataaaggtggttagtaaatagtcatagccataaccaccgttggcttttaaatgggagcggcgcgtaatatccatcgacagcatgacgcggttcagcaacccacggtcgcgtagcgcatgaagcatcgcaatacgcttttcgtccgggtagtaactgttcttgccgatggtgtcgaactgcacgtacgcgccgagatcgatcatcttcaaaatgttgtcgaggttgtctttcagatcgcagtgaccaacggtgacgcgcgaaagatcaaccccgtgggcttgtagcaacgccagttgctccagccccatcgtgctgaacgacgtatgcgtggagatcgggcgtccggtctggttatgcgccagcgcagcggcaataaataccttctcttccagcggcgtaatctttccttcgctggtgccgatctccgcgatgatcccggctttcagctccgtgccatcgataccctgttcaatttcatcgaccatctcctgcgccagttcctgcacgctgcgggtcgccacatgttccgggaaaaacgcgtcctggtaataaccggtacaggccaccacgttgatccccgtctcgcgcattacatcaagcataaattgcgcattgcgccccatgtaacggttggtcatctcaatcacattacgcacgccccgggtcatcaggtcgttcatctcctggcaaatgaacgcatactgatcaaggcggcagtccacgttgtttttaaagccggagagatcaatatgcagatgctcatgggcgagggtgtaacccgtcggatcaaaactcatagggtgtctcctgcaaaccggagggaggaaagaaaagagcgaccattttgtggcggtggcgcgcggaaaaattcacacacggtagcccccacatcagaaagcgtggtgcgcacaccgagctgcgtagcgatcatcccttgctgataaaccagcactggcaccacttcgcgggtatggtggctgtgaccaatggtcggatcgttgccgtgatccgccatcacgaccaggcaatcatctggctgcatcgcctcaacaagccgggcaaggttacggtcaacgacctgcaaacgttcggcataacgtgcgacgtcttctgcatgaccagcgaggtcggtttcctgaatgttggtgcaaataaacgccgtcggatgggtgttaaattcgttgagggtgatatccataatccgctggctatccaccagattttgccagctcacgccataaggattgttgacgatatctgccaccttacccaccagcacggttggcacgcctgcttcatacagtttttgtggcacctgcactttttcatcgacgccatagcccatatgcacgacctggaaaccgttgtcataagcgccagaacgcggcgcattgataccaataaagcgcccttctttgctttctgcggcatcgagaatgcgttgactgtcggttaacaggccaccaaatgtaatgacccgaccgacctgtacctgctcacgcacgatacgaccaattttgattgcgtcgtcaaaagagatcacagagagattggcggtaatgttatagacctggcctaaatccgcctcgagattatcgccaatcgcaaccgcctgattgacccacagaaattgcagatcatcgccacggcgctccacctgccagccagcggaaactaatgcctgctcaacacggtcaatcacatcgcgaaaaggcatccgcagcggcggtaacgggcgcgtgcctaaaatttcctgatgccccataaaggtatcgccaccttcatgttgcagctctgccacgccccaggttgcggaatctgacggctgcatatcgcctggcgcataacccaatgcgttgattagccccagcttctccagcgttggtagctgcaaatgcggcaactggctcaggatgtgaccacaggtattcgctcccgcatcttgcggacgcaccagcgtgacatctttcattgcccctacgccaaagctatcaatcactaacaccacaaatcgcgccattacgcccccagagagtttccaagactgtcataacgaccaacgattttcggttcgccacggtgaataccggacaccagcaccacatcgctacgggtgacaaaaatctgcgtgcggaaacagagcaccactgcactgctcaccggatactcgcctgccagcggcagggtgtagtcgatactgctgtcatccacagttttgagattggtttcagtaatcttttgattttctggcgtaaacaccagcgcatgttgcgcatgaccacgacggtagtaaccgccgccgtagcagtagctgtcgccacggaaatgatgggagatttcacttaaccagagcatcgcgatacgttcaggctgatcgccctgctggtttgccggaatagtgcccgtcagcgcatgaccgggttcggcatgagtcacaccgtattccgccagcaatggcagcgaagtgcagctggtcgctgaaggcgcgttcagttgctcaagtgcaataccagatttcgccagttgatcccgtgcctgtatcagcgtgtgaagattcggtgtcggcaaaacttttccggcagcctcatcccaaagcaggcaagggaaatgggtaagtccggctaaatgcagccccggcagtttcttaatttcagcaaccacctcgtgcagcgaatgctgtacaaaaccgctctcctgccccggataaagaaaatcatcgtcgctataaactttgagcagcacaaactgcacacgtccggccttcaccgctgccgcagaaacttcccgcgctttgtcgagagtaaacacggtgatgacgtcggtgccctgttcaacggcgtcagcaacctgatgacaagggatttgtaccagatgcccctgatgcgccaccgacaaaccagcgcggcgcatgactcgcgcctctttgtaatccaccgccacaatgccgctgtaacctaatgccagcaatttttccgccagccatgggttacggccaaactgcttggtcatcagatacagttcaatgccgtaaagccgcgccgtctcaatcagtcgcttaccgttttccagtacctgatccacgtcgatcacccagctgtccggggcgatcttgccctgctgccacaaacttagtgcggcggaaatcagcgccgggttctggcgtttcaatgcttctacaaacatcttgttgcctcgtttctgttccttgaattaaatattcatttttttgaatatttaggttgtgcgacgtggatttgtcgggagcttcaaacctcttcgttagcagccatccataatccataaaggttggccagcaaatagccttcttcacacgggttaacttccagtgcgaattccttcaacaacacctgatgcaattgcacaacggcttgccagtggctggattgcgccagttctgccagcaactcgttatccagcggctctatttcttcaccacggcgactgcgcatcagtgcactcgccatatgtgtcatcgccatcgttccttgctcactgcgcaccggcagatggcactctgtttccagtacgttgacgacctgcatcatgcctttgcagatgtccttatcaataacgcctgcctcgcaaagcaggttgagtctggtttccatatcagatgcctttcgtttaataactcggttcctgttccccactcactacccgttgttgatgggcgagcagggcgtgtttatctacaacggcacgcagcagttgttgcattgggtaatcatcgactcgcgtcaggaccacggcttcggtggcctgtaaaaatcgcggatcgtctgtgagcggcgtcgcctctaatcccagcatggtcagttcgttttccgccaccacgttccagatcaccgcatcgacatcgcctttaacaatgcgttgtaaactctcgtgataagagagatcgactcgttccacatcactaccgccaaaaaaaacatcggtcatgattttctgatccgccgaacggttatccagccccacgcgcttcacgtttgcggactcgcctttacggcaaatcaactggtgctcgccaacgtaggtgtgcggccccaactccagcgcgaggcataagcctttttgcgtgagataactttccgccgctagtcgcgaaaccaccgccatgtcatacacgccattaagcagacactccacgcgaatatccgcgccacgcatgtgcgcatagtaaaaaggaatgccatcaaactgggctttcaatccgctcgccaggccttcgtacaaacgggtatagggcaagggcattgcacataccacgttgttgatatccacatgagtcagcaatgctttgttatccatctcgaccagataactgccattgcgcccacggcgttcaatccgtatcgctccgcttgattccagcgttttcaacgcggcctgcgtcaggccaacggatgaacggcattcatttgccagctcatctatggttttcaatcgattaccgcacttttcacccaacaaataacgggccagcgtcgtgatgacgacgccttcttttttgataaacgttcgacgcataataaattttcagtaaattgaatatttatatcttcaggaatttgaagataaggcgcaacagcgagatgtggaaacggcgaggcacttcacattttttcggattattgcaaatgaggataaaaaaaccgggtttccccggtttcagagtgatgataaaagcaaaattgcctgatgcgctacgcttatcaggcctacatttccttgcaatatgtgcattactttgtaggccggataaggcgttcacgccgcatccggcatgaacaaagcgcaatttgccagcaatagtgaattacggcttcgccacaaaaccaatcgcttcgtacaccgcttttagcgtacgggaagcgtgcgcgctggctttttccgcgccatctttcatcacctgttgcaggaaggcttcatcgttgcggaaacggtgatagcgttcctgcaattcagtcagcataccggaaacggcatcagccacttcacctttcagatgaccatacatcttgccttcgaactgtttttccagttctgggatgctctggcccgttaccgctgaaaggatatccaacaggttggaaacgcccgctttgttctgcacatcgtagcgaactaccggcggctcgtcggagtcagtgaccgcacgtttgattttcttcactaccgatttcggatcttccagcaggccgataacgttattgcgattatcgtcagacttggacatcttcttggtcggctccagcagcgacattacgcgcgcgccagatttcggaataaacggctccggcaccttaaagatctcgccatacagcgcgttgaaacgctgggcaatatcgcggctcagttcgaggtgctgtttctggtcttcacccaccggtaccagattagtttgatacagcaggatgtccgctgccatcagcaccggatagtcaaacagaccagcgttgatgttctcggcataacgcgcagatttatctttaaactgcgtcatgcgactcagttcgccgaagtaggtatagcagttcagtgcccagcctaactgtgcatgttccggcacgtgggactgaacaaaaatggtgcttttctcaggatcgataccacaagccagatacaaggccagcgtatccagcgtcgctttacgcagcttctgtgcatcctggcgcacggtgatcgcgtgttggtcaacgatacagtaaatgcaatggtagtcatcctgcatgtttacccactgacgcagcgcacccatgtagttaccaatggtcaattcacctgagggctgtgcgccactaaaaacgatgggcttagtcatttttcgattcctgattttcgctatgcggaagccctaatgcgggcagaaggtcatttatagactgataaattacatcaggctggctgagatcgatagcctcgccgtagttatatccgtaggttaagccaactgatgggcaacctgccgcttttgccgcctgaatatcattgcgtgagtcgccgacaaacagcatctgttgtggggcaattcccatccgctcagccaccagtaacagcgggtccggatgcggttttttgttttgcacatcatcaccaccaatcaccacgctgaagtatttggcgatatctaaggcttcgagcagcggcgcgacgaacggcgtcggtttgttggtgaccaggcctagcggcaggcctttagcctgcaacgcgcccaacgtatcggcaacgtgcgggaacaaaaacgtcccctcttcggcaacctcgccatagtagcgatcgaacagtttacgcagaatacgtacctgttcttctgccggaatgtcgtcatcaacgggcggtttacccattgttttacgctgagtcgcacgttcctgacgcgcccaggtcaatgcgcgctccatcagaacatctgcgccgttaccaatccaggtaataacgcgttcttcacctgcgacgggcaactccagcgcatacagcgccatatctaccgcagcagcaagaccaggagcactgtcgaccagcgtaccatcaagatcaaaagcgacgccgcgaatatcttcaaacttattcatgacttacctttgccagttcactgcgcatttcatcaatgacttttttgtagtctggctggtcgaagattgccgaaccggcgacgaacatatccgcgcccgccgcagcgatttcgccaatgttgttcaccttcacgccaccgtccacttctagtcgaatgtcaaagccagactcgtcgatacggcgacgtacttcgcgcagtttatccagtgtttgaggaatgaaagactgaccgccgaaaccagggttgacggacatcagcaggatcacatccagcttatccatcacgtaatccagatagctcagaggtgtcgccgggttaaataccagacccgctttacagccattttctttaatcagttgcagcgtgcggtcaacatgctcggaggcttctggatgaaaggtaatgatgctggcaccagcggcagcgaaatcaggcacaatgcgatcgacgggtttcaccatcaggtgtacgtcgataggggcggtaatgccatagttacgcaaggatttcagcaccattggcccaatcgtcagattgggaacatagtggttatccatgacgtcaaaatgcacgacatcagcgccagctgccagggcttttgcggtatcttcacccaggcgggcaaaatcagccgacagaattgagggggcaatcaaatactgtttcatccgcttctccttgagaattattttttcgcgggtgaaacgactcctggtttgtacaaagccagcagttcgtccacctttttacgtgtgccgccgttgctgcttatactgcgtcgaactttgacgacatgcaattttgcgcgctgataccactcacgcgttaacatcgtatcgtgattggagatcagcactggaatatggcgctcaaccagaccttcggcgatctccgccagatgcgcttgttgttcaagcgtaaaactgtttgtgtgatacgccgtaaagttggcggtcgcagacagcggtgcataaggcggatcgcaatagacgacggatgcatcatctgcgcgcgccatgctatcggcgtaagactcacaatagaaaaaggcattctgcgctttttcagcgaagtgatacaactctgcttccgggaaatagggttttttgtagcggccgaacggcacgttaaactcaccgcgcagattgtaacgacacaggccgttgtaaccgtagcggttcaaatataaaaacagtaccgcccgacggaacggatcctggcttttgttgaactcttcgcggaactgatagtaaacctcggcgcaatttgtttcgggaacaaacagctcgcgtgcggcctgtacgtactcatcagtacgcatcttcacaatgttatagagactgatcaggtcgctattgatatcggcaaggatataacgagaaaagtcggtgttgagaaacaccgacccggcacctacaaaaggctcaaccagacattcgcccttgggcaaatgccgtttaatatcatcaagcaggggatacttgccccctgcccacttcaaaaaagcgcgatttttcttcatgctgactaactaattacaccttctccggctgtggagaaagctccgacagcatccagcgcttcaggcaactcccgcaacgataaaccattgcgggagataaccttgattacttcagatcggcctgtacctgacgcagcggtttcgcccacgggtttttggcctggacatctgctggcaatgtagataccgcttttttcgcctcttctttcgaagcgtacacgccagaaaccaggacataccacggctgaccattacgcgtcgtttcatagacaacgtagtttttcagattctctttcttcgcccaaccgttcaggttgtcgtagttagaggaactgctcagctgcagagtgtaatggctggacggtgccgatttcaacgaaccaacattacctgcggtcttcgccccagcagcgggtgttgctgtggtttgcgccggggatgccgtctgtactggagccgtagtcgccgtctcttttggtgctggcgtagaagtcgcagccggtgccttcgtgctcgccacaggggcagctggttcagtacgcttcggcgtctgtgctaccggcttcggctccgttttcacggttgcttgcgattttttcggttcaatcactgcctgctggcgagctggacgcgtagtggccggacgttcagcggtttgcgttttcgccgtttcacgcgatgcattgccattgcgaacaggcgcgacagtcgcgggttcggtcggcaatgtggaattgaccgccacattgttcaactgttgctgattttgtggctgggtcagcgcattgttcaggtcaccctgcacttcaacacgttgttgaccatccgttgccgccggggtttgcccttgagtcggcgtagaagagatcggtggcagagaaacatcctgctgagtattttccgcagacgtggttcccggcgctggctgcaccccattcgcctgatcggtcgcattgcctgcaagatcaatactcttctcaccagacgcggtttgatcgctggaagaggtcgagggggcttttagcgcagaaccgataccgatgatcaacagcagtagaaccagaatgccgacgcccatcatcatatactgacgagaagcgggtttactggctgcttttttgcgcttacgcggacgacgctctacgcgctcttcatccacggtttcatcttcggattcgtcaatttcttcttcgatttccggttcctcattgcgctctttttgcgcacgagtcggacggcgatcgtcagtgtcatcaagttcaatatcatcaaaattgatctgcggttcgccacgttcagtacgctcagaacgttcagaagattgacgagaacgaccagtacgacgatcgctgggatcgggtttcagctcgtcttctggtttgaattcatccatttaacaccccactaaaaggttaatgcttaccacgttgcaattaacctgaagctaatagaccgcttgataagcggcctgacctttcttgttgttacgctgattgacaatcggcaatggcgttaagaacaagctcgtgcgaaacgccgctgcgaacttcactcttaccaattgccaacggaagaattaagcgcatctctcccgcaaggactttcttgtcacgcagcatatgcggtaaatacgcctgcgcggacatttcgcgcggcccattgaccggtaacccagcccgcgtgagcagggttataatacgctgcgtttcggcagaactaaactgcccgagacgttccgacgtccgcgccgccatcaccatacccgcagcgaccgcttcaccatgtaaccaattgccataccccatttcagcttcaatggcatgaccaaaggtgtgtcccagattcagtaaagcacgtaacccggtttcgcgctcgtcggcggcgacaacttctgccttcagttcacaacaacggcgaatacagtacgccattgccggaccgtccagacgcaacaacgcatccagattctcttccagccagttaaaaaacgcaccgtcaagaataatgccgtatttgatgacttctgccagccccgacgctaactcacgcgggggaagcgttttcagacagtcgagatccaccaccactgaagcaggctggtagaacgcgccaatcatgtttttaccgaggggatggttgaccgcagttttgccgccaacggaggaatcgacctgcgacagtaacgtcgtcgggacttgaatgaaacgaacaccgcgctgataactcgccgccgcgaagccggtcagatcgcccactacgccgccgccaagcgccaccagcgtagtatcgcgaccatgcggcttttgtaacaacgccgtaaagacggtatcgagtacagccaggcttttatactgctcgccgtcagggaggataacgctatcgacgttaacacccgcctgttcaagtacgccgcggaccttatcgagatacagaggagccagggtttcgttggtgaccaacatgacctgctcgcccgatttcagcggtaagaatgaagctggttcattaaacaaaccagatgcgatggtaattgggtaactacgttccccgagagtaacgacaatcctctccataacgcgacatccaccttaattactgtacccgcagacgagtgtatataaagccagaattagttgctttccagcatgtgaataatctggtttgcaaccactttagcgctttgatcatcagtacgaatggtcacgtcggcaatctcttcatacagcggattgcgttcattggccaacgcttccagaacttcacgcggcggtgtttcaacgtgcagcaacgggcgttttttatcacgctgcgtgcgtgcaagttgcttttcgatggtcgtttcaagataaacgacaacgccacgagcggaaagacggttacgcgtttcacgggatttcacagagccgccgccagtagccagcacaataccctgtttctcggtcaactcattgatgaccttttcttcgcgatcgcggaagccttcttcgccttctaaatcgaaaacccagcccacatcagctccggttcgtttctcaatctcttgatcggaatcgtaaaattccatattgagttgttgagctaactggcgcccaatagtgctttttccggcacccataggcccaaccagaaagatattgcgtttctctgccattttttcggtactactaagactattcgttaatgataaacccgcttcgctcagagagcgccgcaggacatgaactgaaacctcataagatattgcgagagtcagactgaaaattatctcaatactccagcgggtttggcaactgaataaatcacccatccctctgcatatctggtcgctgcaagcgcgctgccttgctaccaccgctctggcgataaatcaccgggtaagattagcgtaaaaaagacagcaaaatgccgcctgaatgataaatcatcatcatggaacgcaggcagcgaagagcaccaactctcaaatcggtactccttgtatgctaaatacctgcgcgcgtcaaatagatgaaacacgttcagcataaaaacattaccgcttttacggctgtttactcattggaaaccagtcgtggcgtgataaacaccactaactcgcgtcgttcatcttcttttccgtcatgacgaaataattgcccgaaccagggaatgtcgccaagcaacggtacgctatcctgacccgatttatttttacgggtaaaaatgccgcccagcgccaacgtttctccgcttttgacctcgacctgcgtttcgatctcctgcttatcaatcgccagcacttcgccatcggcctgctgtagcacctgccccggaacgttctggctgatgtgtaatttcagccggatgcggcctttttgtaacaccgtgggcgtgacctccatccccaggacggcctctttaaattccaccgacgtcgcgccactttccccgctggaaacctgatatggaatttcgctcccctgtttaatgctggcaggctgaagatgtgaggccagcagacgcggactggcgataatatccagctgctgtttttgttcgagcgcggaaagctcaagatccagcaagcgtccgttgatgcgcccaatgttaaaaccgacatgcgttgtcgccgtcgctacggagaggtcgctaccaagcgtggtgacttgcccaacgccaccagcgtgttgcgcatcggccagcgtccatttcacgcctaactcacgcaaacttttttcattaatggtgacaatatgcgccgacagctcaacctgcccgaccggcagatccatttgcgctacccactgttcaagcgcgcttaacgccgttttgttatctcgtagcaaaaggcgattggtgcgtttatcgacggtcatactccctttggcactcagtagcttctcccccgctttcgccagttctcccgcgtcggcgtattgcagggttatactgcgattttccagcggcagatttgcctgcgcccgcgcctgctccgcctcctggcgggcgatattgttattctgccaggcaatggaatgcactgagagaatgttgccttcctgccgcgttatcagtccggcgcttttcactacagtttgtagtgcctgcttccagggaacatctgttagatgtaacgacaccgtaccgctgacgtctggcgacacgaccaggttcaacttctcctgttcagccagcgcctgcaacacctgagctaccggaacgtcatccaccatcagcgtcactttttgcggctttgccgcctgtacgccgggtatcagcatcaacagtagtgcggctatccattgcttcatttgtatctccttgccgttgccacaaccattgtggcggttcgcagtttgtcccggtacccagcgttagtacgtctggcgtcagctgtaaaattgtccagccgttttccagcacatcgttttgctgcacccgtcgccatttcttttgcccgtcttttattacaccgatgatgcgctcgcctcgccctaccatcccctgatagcgccactggctaagttcgctaatccggcatagatcttccggcggtttaaaagggtcacgcataccggttaaaaggcacaatgcaatacctgccaacaaccagcgtttaaccctcatgcggcgtctccagttgtagcgtgaacaaaagatcatcaccttccacgcttaacgaaaaacggctcacgctgacgttgcgctctgccagccgtgtaaatgccgacggcactgcttcccacagcgttttcaacgccaactcgcctccctgcgcggatggatgccaggaaaccagttgcgcgccggataactgaaaatccagtggcgaaaagggcagcgttttttcctcgctgaagggagtggtgtctaccaggcgatacagtgcggcccactgctggtgatgacttgcccgtagtcgaattaatgcgtcgcgctcttcatggtgtgtcgatgacagaaaaatgagcgtaactaacatcagcaaccagaatgcccagcaaagctggcggaggcggggtgatgtggcgaaccaccagtcaaagaacatgttcatcgctaaccttccttgttaactgatactcaaattgccagcgtccctgcgcatcctgctgcgtggctccccgctgattgagatgaaaagatgcatcctggcggagtgacgtttctagtgcgtttaacgcggtaatgcttgttgtcagccccttgatctccagcgttccctgctgccagcttatcgttgtcagccaggcgtgctcgggtaaaagcgccgccagtgcttccagcgcagattgccagtcgcgggtaaattgtcgctggcgctgccgttgcgaacgctgttcgcgtaactgctgttgctccagcaaacgtggcttcgttatctgtaagctgcgggcgagttgttgttccgcctgaagcaaaactgcgtctatgcgcgcttcggcgctgcctgtcagacgcagtattagcgttatcccgacggccagcagcagaggcgcaacgaacatcagcaaccagaaacgcagaaaagcggtccggcgttgctgtcgccagggcaaaaaattaattggcgggttcatcagtacgccttcccaagcgccagccccagcgcgatggcaaagtctccacctggcggcggtagcggcggctgacgaacagaaacggcctcccagggatcaaatcagccttcgccacatatcgcgacgctttcgggatcaacggataacgctgccgccagctccttcgcgctagtcatccccaccgccagtttgcgcccccagctatagcgcgtcgcccacagccactgttcgttatcacgccaggccagacattgctgatgagaaggtaaaaaaggcaggaatcgctgtaatgcactggcatccggggtgatcgcgctcacatgaacacgcaacctttctgccagagtaagcagcgttgccagctctttgctttgcacggcagtcacgttataggcgggactgagtgagtcttcgctgtaatcgaagcgcagggagtccggatccatatccagctcgcgggccatcgtccctgacagccaggccgtttgctcccgctcaccaagggacatcgacgggcgcggaaatgaccgctgtaatgtgcgactggcgggaaacgccaacataatgtgatgacgctgcggcagttcgcgactccacggtaacaacgttttagccagctgctgcgcatcaacaatccgcccatctttgataatgtcgttctccagcggcaaccgccaccagcgttgcaaaaagcattcttttgcgccccgcacgatcgcaaccgctaccgcttcttgctgttgtaaatgcaaaccaatttgccagatcttaaatgccattgtgatgatctccttatcacccgtcactctgacgggtatatcaatgcgtctggcttgcctttatactaccgcgcgtttgtttataaactgcccaaatgaaactaaatgggaaatttccagtgaagttcgtaaagtattttttgatccttgcagtctgttgcattctgctgggagcaggctcgatttatggcctataccgctacatcgagccacaactgccagatgtggcgacattaaaagatgttcgcctgcaaattccgatgcagatttacagcgccgatggcgagctgattgctcaatacggtgagaaacgtcgtattccggttacgttggatcaaatcccaccggagatggtgaaagcctttatcgcgacagaagacagccgcttctacgagcatcacggcgttgacccggtggggatcttccgtgcagcaagcgtggcgctgttctccggtcacgcgtcacaaggggcaagtaccattacccagcagctggcgagaaacttcttcctcagtccagaacgcacgctgatgcgtaagattaaggaagtcttcctcgcgattcgcattgaacagctgctgacgaaagacgagatcctcgagctttatctgaacaagatttaccttggttaccgcgcctatggtgtcggtgctgcggcacaagtctatttcggaaaaacggtcgaccaactgacgctgaacgaaatggcggtgatagccgggctgccgaaagcgccttccaccttcaacccgctctactcgatggatcgtgccgtcgcgcggcgtaacgtcgtgctgtcgcggatgctggatgaagggtatatcacccaacaacagttcgatcagacacgcactgaggcgattaacgctaactatcacgcgccggagattgctttctctgcgccgtacctgagcgaaatggtgcgccaggagatgtataaccgttatggcgaaagtgcctatgaagacggttatcgcatttacaccaccatcacccgcaaagtgcagcaggccgcgcagcaggcggtacgtaataacgtgctggactacgacatgcgccacggctatcgcggcccggcaaatgtgctgtggaaagtgggcgagtcggcgtgggataacaacaagattaccgatacgctgaaggcgctgccgacctatggtccgctgctgcctgccgcagtcaccagcgccaatcctcaggaagcgacggcaatgctggcggacgggtcgactgtcgcattgagtatggacggcgttcgctgggcgcgtccttaccgttcggatactcagcagggaccgacgccgcgtaaagtgaccgatgttctgcaaacgggacagcaaatctgggttcgtcaggtcggcgatgcatggtggctggcacaagtgccggaagtgaactcggcgctggtgtcgatcaatccgcaaaatggtgccgttatggcgctggtcggtggctttgatttcaatcagagcaagtttaaccgcgccacccaggcactgcgtcaggtgggttccaacatcaaaccgttcctctacactgcggcgatggataaaggtctgacgctggcaagtatgttgaacgatgtgccaatttcccgctgggatgcaggtgccggttctgactggcagccgaagaactcgccgccacaatatgccggtccaattcgcttacgtcaggggctgggtcagtcgaaaaacgtggtgatggtacgcgcaatgcgggcgatgggcgtcgactacgctgcagaatatctgcaacgcttcggcttcccggcacaaaacattgtccacaccgaatcgctggcgctgggttcagcgtccttcaccccaatgcaggtggcgcgcggctacgcggtcatggcgaacggcggcttcctggtggacccgtggtttatcagcaaaattgaaaacgatcagggcggcgtgattttcgaagcgaaaccgaaagtagcctgcccggaatgcgatattccggtgatttacggtgatacgcagaaatcgaacgtgctggaaaataacgatgttgaagatgtcgctatctcccgcgagcagcagaatgtttctgtaccaatgccgcagctggagcaggcaaatcaggcgttagtggcgaagactggcgcgcaggagtacgcaccgcacgtcatcaacactccgctggcattcctgattaagagtgctttgaacaccaatatctttggtgagccaggctggcagggtactggctggcgtgcaggtcgtgatttgcagcgtcgcgatatcggcgggaaaaccgggaccactaacagttcgaaagatgcgtggttctcgggttacggtccgggcgttgtgacctcggtctggattggctttgatgatcaccgtcgtaatctcggtcatacaacggcttccggagcgattaaagatcagatctcaggttacgaaggcggtgccaagagtgcccagcctgcatgggacgcttatatgaaagccgttcttgaaggtgtgccggagcagccgctgacgccgccaccgggtattgtgacggtgaatatcgatcgcagcaccgggcagttagctaatggtggcaacagccgcgaagagtatttcatcgaaggtacgcagccgacacaacaggcagtgcacgaggtgggaacgaccattatcgataatggcgaggcacaggaattgttctgattaaaaaggcgcttcggcgccttttcagtttgctgacaaagtgcacttgtttatgccggatacggcgtgaacgcgttatccggctaacaaaatcgtgaaaactcaataaattgcagaaaccccataagcctgataaacattgtgcatcaggcaaacttcacgcatttacactcgcccctgccctttcaaccattcgcgcacgaggaacagcgcactgacattgcgcgcttcattgaagtcagggtcttccagcaaatccatcatatgcgccagcggccagcgcacctgtggtagcggctctggctcatcgccttccagtgattccgggtagagatcttgcgctaccacgatattcattttgctggaaaagtaagacggtgccatgctgagcttcttcaaaaaagtcagatcgttcgctccaaatccaacctcttcttttagctcgcggttagcggcttcgtagacgctttcacccggatcaattaatcctttcgaaaaacctaattcgtaggattcagttcccactgcgtattcgcggatcaggatcaggtgatcgtccacaatcggcacaatcatcactgcttcccggttggttggacgcattcgttcataaacacgccgcacgccattgctgaactccagatccacgctctcgacggtaaacagtcgggaacgggctacagtttcaacattcagaatggtgggtttttgtaatgatttgctcatcgtgggatctatgctgtgaaatcagcggttattgtgcgatatcggacacgctttcggcaatgtgaattgcatgttatttacatttatgtaacttaataaataatcgtcctcaaatcaaattaaaagtcaataggttgaaataactccaggaatttgctgatattccgccttcagagggtttgctatgatcagcggttactgtgatgtgcttaatgatgctcaagttaaactccacgcttgccgatagccaaccgcagaatcatgtattgtgtccggtgcgactgaccacgcctgacagactaagtaagatggggaaagcatgagcaccattgtgatttttttagctgctttgctggcctgctcactacttgcgggatggctgataaaagtgcgatccagacggcgtcagctgccctggaccaacgccttcgcggatgcgcaaacgcgtaaactcacacctgaagaacgtagcgccgttgaaaattatcttgagaacctgacgcaggtattacaggtgcctggcccaacgggagccagcgcggcaccgatctctctggcgctgaatgccgaaagcaacaacgtcatgatgctgacacacgctatcacgcgttacggcatctctaccgacgatccgaataaatggcgttactacctcgattcggtagaagtccacctgccccctttctgggaacagtacatcaacgatgagaataccgttgaactgattcataccgattcgctgccgctggttatttcactcaacggtcatacgctgcaggagtacatgcaggaaactcgcagctatgccttgcaacctgttccgtcaacgcaggcgtcgattcgcggggaagagagtgagcaaatcgagctactcaatattcgcaaagaaacgcatgaagaatatgcgctgagtcgtccgcgcgggctgcgtgaagcgttgctgatcgtcgcctccttcctgatgttctttttctgcctgattaccccggatgtatttgttccgtggctggcaggcggcgcgttactgctgctgggcgcaggtctgtgggggctattcgcgcccccggcaaaatcctccctgcgggaaattcattgtctgcgcggtacaccccgtcgttggggattgtttggcgaaaacgatcaggaacagatcaacaatatttcactcggtattatcgacctggtctatcccgcacactggcagccatacattgctcaggatctcggtcaacaaaccgatatcgatatctatctcgaccgccatgtagtgcgtcagggacgatatctttcgctgcatgatgaagtaaaaaactttccgttacagcactggctgcgcagtacgattatcgctgcgggctcgctgctggtgctgtttatgctgttattctggatcccgctggatatgccgctgaaattcactctctcatggatgaaaggcgcgcagaccattgaagccaccagcgtaaaacaactggctgacgctggcgtgcgggtaggcgatacattgcgtattagcggtacgggaatgtgtaatattcgaacttccggaacctggagcgcgaaaaccaattcaccttttttaccgtttgactgctcgcagatcatctggaacgacgcccgctcattgccattaccagaatctgaactggtcaacaaagcgacggcattgactgaagcagttaatcgccagctgcaccctaaaccggaagatgaatctcgcgtcagtgcctcattacgttcagcaattcaaaaatccggcatggtattgcttgatgattttggcgacattgtactgaagacagcggatttatgttctgccaaagatgactgtgtgcgactgaaaaatgcgctggtcaatctcggcaacagtaaagactgggacgcgctggtaaaacgcgccaacgccgggaagctcgatggcgtgaatgtgttattacgcccggtgagtgcggaatcgctggataacctggtggcaacctccaccgcgccgtttatcacgcatgaaacggcgcgagcggcacaatcactaaacagtccggcccccggcggattcctgattgtcagcgacgaaggcagcgattttgttgatcagccctggccttcggcatcactttacgactacccgccgcaagaacagtggaacgctttccagaaactggcacaaatgctgatgcatacgccgtttaacgccgagggtatcgtcacaaaaatcttcactgacgccaatggtacgcagcatattggccttcatccgatcccggatcgttccggcctgtggcgctatctcagcaccacattgctgctactgacgatgctgggtagcgccatttacaatggcgtacaggcctggcgtcgttaccagcgtcatcgcactcgcatgatggagattcaggcctattatgaaagctgcctgaacccgcaactgatcaccccttcagaaagccttatcgaataacacgtttgcgcggcaggttatgctaccctgtcgcgcaaattgcttcactctggagatttccctcatgcatatcaacattgcctggcaggacgtagataccgttctgctggatatggacggcacgttgctcgacctcgccttcgataactatttctggcaaaagctggtgcctgaaacatggggcgcgaaaaacggggttacgccacaggaagcgatggaatatatgcgccagcaatatcacgacgtacagcatacgctaaactggtactgtcttgattactggagtgagcaactgggtctggatatctgtgcgatgaccaccgagatgggaccgcgtgccgtactgcgtgaagataccattccgtttcttgaggcactgaaagccagcggtaagcagcgaattttgctcaccaatgcgcatccgcacaacctggcggtaaaacttgagcataccggtctggacgcacaccttgatttattactttccacccacacatttggttatccgaaagaggatcagcggttatggcatgcggtggccgaagctacgggtctgaaagctgaaagaacgctgtttattgatgacagcgaagcgattctcgatgctgccgcgcaatttggtattcgttactgcctcggcgtgactaatcctgattccgggattgccgagaaacagtatcaacgccatccgtcactgaatgactaccgccgcctgatcccctcgctaatgtgaaggagacgccatgaaagaaaaacctgctgttgaggttcgactggataaatggctatgggctgcccgtttttataaaacccgcgcgctggcccgtgaaatgattgaaggcggtaaggtgcattacaacgggcagcgcagcaagccgagcaaaatcgtcgagctgaatgccacgctcactctgcgccagggaaatgacgaacgcacggtgattgtaaaggcgattactgaacagcgtcgccccgccagcgaggcagccttgctgtatgaagagactgcggaaagtgtagagaaacgcgaaaaaatggcgctggcacgtaaacttaatgccttaaccatgccgcacccggaccgacgcccggacaaaaaagagcgccgcgacctgttacgatttaaacacggcgacagtgaataactgtcacctgcaagagagatgattatgccgcaacatgaccaattacatcgctatctgtttgaaaactttgccgtgcgcggcgaactggtaaccgtttcggaaaccctgcaacagatccttgagaaccacgattatccgcagcccgttaaaaacgtgctggcagaactgctggttgcgaccagcctgttaaccgctacgctgaagtttgatggtgatatcaccgtacagctgcagggcgacggtccgatgaatctggcggttattaacggtaacaataaccagcagatgcgcggtgtggcgcgcgtgcagggcgaaattccagaaaatgccgacctgaaaacgctggtcggcaatggttacgtggtgatcaccattaccccgagcgaaggcgaacgctatcagggcgtagttggtctggaaggtgataccctggcggcctgcctggaagattactttatgcgttctgaacagctgccgacgcgcctgtttattcgcaccggcgacgtagacggcaaaccggctgcaggcggtatgttgttgcaggtaatgcctgcgcaaaatgcccagcaggacgactttgaccacctggcgacgctaaccgaaaccatcaaaaccgaagaactgctgaccttaccggcaaacgaagtgttgtggcgtttgtatcacgaagaagaggtgacggtttacgatccgcaggatgtggagttcaaatgcacctgctcgcgtgaacgttgcgccgatgcgctgaaaacgctgcctgatgaagaagttgatagcatcctggcggaagatggcgaaattgacatgcattgtgattactgcggtaaccactatctgttcaatgcgatggatattgctgaaatccgcaacaacgcgtctccggcagatccgcaagttcattaatgagtatgtccggcagagagggctctgccggattttacgactaatacacctgatgcgctttgtcactcattcagattcacattcagcctttcaccatccactacaagatcgcgccacgctttaggcttcgtccccagttttccatccttcgcagctgtgagtaatttttctttcgttatttcgttcggaagtaaactcatatcaagcgcgtcccattcttttctgtctgagtcaaagccatagacaatgactctgtcatcattaaaagcaaacaggatccgctccgcctgaccatcactattcagatcttgctcgaccaggacgcaggcgtctttttcaatacaggtcatcacgttatagcgatcctggattaaggccgaccagaatgtcgcatcaggtttaacagaaccaggggcaattaacacattatcggctaatactttttccgatacctgttgctgaagatgttgctctccatctaacgccatcagcagatcccgcgcgcgtttcgggtctttcataaacccggcatcgcttttcagcgactcaagcgcagcacgtccatagcgaccgctctgctcgagcatgtagatagttacctggtctgacgtgtttttgccgctctgataacgcgccatatggctgttcacgctaatacgcatactgtccagcaccggcgaattaagaagcaccagtatcaccaacaccaataacgaaaccgcaaggttcactttgccctgaagaacaacgggattttgccctttacgccagacgatgctgacaaaataccccagcgaccacaccagtaacaccagcaccgccagcacgccctgcaagcggtcgacagtccagccgtactgagcgacccgcagccataacgcccaggcggcgacgaacacatacagcggagcaaccagcaaagcggttttaatcaggcaacgcaacggccctgtccagggaagtgacgctttttgcggatcgcggacaatagccattaagatcaattgcaaaaaggccagcgtcaacagcaacccggcggcggagatgtggcgagaaatcgcgctcaggcccgtaaacggcagggtgatgataaacatcagggttagcaatgatactaacggcagcaaccccgtggcgattaacgtgaacaacttttgaatagagtcgattaaacgtgactgtgttcgcgcgaggatcaccgccagcgcggtaaccagacctaacgtgagataaataaaccagtcggttgcaaaaaagagcgtattgaaaaacgtgatgccaacaagtttaaacaactcactccacagtaaaagcaccagccacgtcaagccattggcgagaaaaatcaccagtaatataagtacgttatgccatactgactggtaaaaatagcgatagcggctactgtcattgcggatgcgaaggctttgttgtatccacggtagcaacaacattgccatcaacagcagatagcaaccaaaatcccaaagcgccttttcagctctccaggggttcatgccatcagtttgccacttcagccagccgctcatccccagcgtggcaataaacactagcgccagccatccccaaaggcgcttctgtttaaaagagatcacggagaagagtaaaacggatgaaaacgcgacggtcgcaggcacgccataaacaatccaactgtgattttttccggaaagccaggcgatcagcaggtagcaaaccagaccctgaagtaatccggtagcaatcatcccccagcgtgttgcgggtgaaagttcaacgttatccatgttggttatccagaatcaaaaggtgggttaattatcgcatccgggcagtagtattttgcttttttcagaaaataatcaaaaaaagttagcgtggtgaatcgatactttaccggttgaatttgcatcaatttcattcaggaatgcgattccactcacaatattcccgccatataaaccaagatttaaccttttgagaacattttccacacctaaaatgctatttctgcgataatagcaaccgtttcgtgacaggaatcacggagttttttgtcaaatatgaatttctccagatacgtaaatctatgagccttgtcgcggttaacacccccaaaaagactttactattcaggcaatacatattggctaaggagcagtgaaatgcgcgttaacaatggtttgaccccgcaagaactcgaggcttatggtatcagtgacgtacatgatatcgtttacaacccaagctacgacctgctgtatcaggaagagctcgatccgagcctgacaggttatgagcgcggggtgttaactaatctgggtgccgttgccgtcgataccgggatcttcaccggtcgttcaccaaaagataagtatatcgtccgtgacgataccactcgcgatactttctggtgggcagacaaaggcaaaggtaagaacgacaacaaacctctctctccggaaacctggcagcatctgaaaggcctggtgaccaggcagctttccggcaaacgtctgttcgttgtcgacgctttctgtggtgcgaacccggatactcgtctttccgtccgtttcatcaccgaagtggcctggcaggcgcattttgtcaaaaacatgtttattcgcccgagcgatgaagaactggcaggtttcaaaccagactttatcgttatgaacggcgcgaagtgcactaacccgcagtggaaagaacagggtctcaactccgaaaacttcgtggcgtttaacctgaccgagcgcatgcagctgattggcggcacctggtacggcggcgaaatgaagaaagggatgttctcgatgatgaactacctgctgccgctgaaaggtatcgcttctatgcactgctccgccaacgttggtgagaaaggcgatgttgcggtgttcttcggcctttccggcaccggtaaaaccaccctttccaccgacccgaaacgtcgcctgattggcgatgacgaacacggctgggacgatgacggcgtgtttaacttcgaaggcggctgctacgcaaaaactatcaagctgtcgaaagaagcggaacctgaaatctacaacgctatccgtcgtgatgcgttgctggaaaacgtcaccgtgcgtgaagatggcactatcgactttgatgatggttcaaaaaccgagaacacccgcgtttcttatccgatctatcacatcgataacattgttaagccggtttccaaagcgggccacgcgactaaggttatcttcctgactgctgatgctttcggcgtgttgccgccggtttctcgcctgactgccgatcaaacccagtatcacttcctctctggcttcaccgccaaactggccggtactgagcgtggcatcaccgaaccgacgccaaccttctccgcttgcttcggcgcggcattcctgtcgctgcacccgactcagtacgcagaagtgctggtgaaacgtatgcaggcggcgggcgcgcaggcttatctggttaacactggctggaacggcactggcaaacgtatctcgattaaagatacccgcgccattatcgacgccatcctcaacggttcgctggataatgcagaaaccttcactctgccgatgtttaacctggcgatcccaaccgaactgccgggcgtagacacgaagattctcgatccgcgtaacacctacgcttctccggaacagtggcaggaaaaagccgaaaccctggcgaaactgtttatcgacaacttcgataaatacaccgacacccctgcgggtgccgcgctggtagcggctggtccgaaactgtaatgatttgaagctggagaatatctatccagtatcttatagaaagcaaaacgggaggcaccttcgcctcccgtttatttacccttcttttgtcgtgccctgcgcccgcgttaccggcactggcagccaggcgcgaatggaaagcccgccccgctcgctggtgccaagctccagcatcccgttatggttatccacgatacgctgcacaattgccagccctaatcccgtgccgctaatggtgcgcgcactgtcgccgcggacaaacggctggaacaggtgcttacgttgttccggcgcaattcccggaccgtcatcttccacctggaaccaggcgcgattcggctccgttccgctgctgactttgatccagccattgccataacgggcggcgttgaccaccatattcgccaccgcgcgtttgatcgacagcgggtgcattttcacttcaatgctgccggggtaaagcgcggtttcaatttcccgctcatagccactttcggcagcaatcacctcaccgagtactgcattaagatccgccatttccatcggcatctcctgcccggtgcgcaggtagtcgataaactgctcaatgatggcgttgcactcttcgatatctttattgatcgattctgccagatagccatcctgctcgctcatcatctcagtcgccaggcgaatacgcgtcagcggcgtgcgcaagtcgtgacttacccccgccatcagcagcgtgcggtcatccgccagttgcttaacaccagccgccatatggttaaaggcacgggtaacggaacgcacctcggacgcgccatactcacgcagcggcggcggaataatccctttaccaacctgcaaggctgcgtgttcgagatcgaccaacggtcggttctggatacgaataaacagccacgccccgcctatcgccaatagcataatcgccagcgtatagcggaacagcggagagaaatcgccctgatgaatttcggtcagcggcacgcgtacccagatattgggcgacagccaggttttcagccagacgacaggcgaacttttgttgacctcaacgcgcacttccgtcgggccgcccagttgctgcgccatctgatggcttaagaattcatagtgttgcgcccaacgcagacctgcctcttcggcagcctcgttggagtagagagagatccccagctcacggtagatctcccgacggaaagcgggaggcacaaccaactgcgtgccgtcctccagttgcagtttgtcggtcatcaacatacgcacttcgtacgcgaggactttattaaactgctggaggctcggcaaaatcgcgaagttcagcaccaccagataagtcgtcaccaggctggcgaacagcaaggtgacgatgagcaataacgtacgggcaaatgaacttcgtagcgagaagcgcaatcgcctcatgctttagagccgtccggtacaaagacgtagcccagaccccagacggtctgaatgtaacgcggatgcgctggatcttcttccaccatgcggcgcagacgcgaaatctgcacgtcgatggagcgttccattgcggaatattcacgaccacgggcaaggttcatcagcttatcgcgggagagcggctcacgcggatggctgaccagtgccttcagtaccgcaaactcaccgctggtgagcggcatcggctcgtcttcgcggaacatttcgcgcgtaccgaggttaagtttgaacttaccgaaagcaattaccgcctcttcctgtgacggtgcgcctggcagttcgttcgcctgacgacgcagcaccgcacggatacgggccagcagttcacgcgggttaaacggttttggaatgtagtcgtcagcgccaatctccaggcctacgatacggtccacttcttcccctttcgccgtcaccataatgatcggcatcgggttgctctgactacgaagacgtcggcaaatcgacaagccatcttcaccaggtaacattaaatccagtaccataagatggaaagattcacgagtcagcaggcgatccatctgttctgcattagcgacgcttcgaacctggaagccttgttcggtgagataacgttccagcagcgcacgcaggcgcatgtcgtcatcgaccaccagaatcttgtagttctcttgcattgtttgtactcccaaaggttcgcaacaatttgtaagcgtgtattcttaaaaaagctcacgttcgtcaccagctaaatctggtatgaatttcagcctaaattgttacaaagcatattaaacagcagcttaagtatacaatttattcggcgaaacattattgattctgttgatatgatcacgttatacccaatgtgcgcattatcaaacagacaaagggaatcaacgagatgaaaacgcccctggttacccgggaagggtatgaaaaactcaaacaagagcttaattatctctggcgtgaagaacgcccggaggtcacaaaaaaggtgacctgggccgcaagtctgggcgaccgcagcgaaaatgctgactatcagtataataaaaagcgtctgcgtgaaatcgaccgtcgcgtgcgctatctcactaaatgcctggaaaatctcaaaatcgtcgattactcccctcagcaggaaggcaaagtcttttttggcgcgtgggtggagattgaaaacgacgatggcgtgactcaccgtttccgtattgtcggctacgatgaaatttttggccgtaaagattacatctctatcgattccccgatggcccgcgcattgctgaaaaaagaagtcggcgatctggcggtggtgaatacccctgccggggaagcgagctggtatgttaatgctatcgagtatgtgaaaccgtaaggaagagtcttaacctcctgccgatggctggcatttttgccagccagtccgtataactatcccctgatttttgatccgaaaagatgaactcaaaccatgatgaatgattcgttctgccgcattattgcgggtgaaattcaggcgcgcccggaacaggttgacgctgccgttcgcctgcttgacgaagggaataccgtgccgtttatcgcacgttatcgtaaggaaatcaccggcggtctggatgacacgcagctgcgtaatctggaaacgcgtctgagctatctgcgcgagctggaagagagacgtcaggcgatcctcaagtccatttccgagcaaggcaaactcaccgatgatctggcgaaggccatcaacgccaccctaagcaaaaccgaactcgaagacctctacctgccctacaaacctaaacgccgcacccgcgggcaaatcgccattgaagcagggcttgagccgttggctgacctgctgtggagcgatccgtcacacacgccagaagtcgccgctgcacaatatgttgatgccgataaaggcgtggcagataccaaagccgcgctggatggcgcgcgctatatcctgatggaacggtttgccgaagatgccgcgctgctggcgaaagtgcgtgattatctgtggaagaacgcgcatttggtttctacggtggtgagcggtaaagaagaggaaggggcgaaattccgcgactatttcgatcatcacgaaccgttgtccacggtgccttctcaccgcgcgctggcgatgttccgtgggcgtaacgaaggcgtactccagctttcgctgaatgccgatccgcagttcgatgagccgcccaaagagagctattgcgagcaaatcatcatggatcaccttggcctacgcctgaacaatgccccggcggatagctggcgcaaaggcgtagtgagctggacctggcgcatcaaggtgctgatgcatctggaaaccgaactgatgggtaccgtgcgcgaacgcgcggaagatgaagcaatcaacgtctttgcccgtaacctgcacgatctgctgatggcggcccctgccggactgcgtgcaacgatgggcctcgatccgggtctgcgtactggggtaaaagtggcggtggtcgatgccactggcaaactggtagcgaccgataccatttacccgcacaccggacaagccgcaaaagcagcgatgaccgttgctgccttgtgtgaaaaacataacgttgaactggtggcgatcggcaacggtacagcttcccgcgaaactgaacgtttctatctcgacgtgcagaagcagttcccgaaagtgaccgcacagaaagtgatcgtcagcgaagctggcgcgtcggtttactcagcttccgagctggcagcgcaggagttcccggatctcgacgtttcgctgcgtggcgcggtgtctatcgcccgccgtttgcaggatccgctggcggagctggtgaaaatcgatccgaaatctatcggcgtaggtcagtatcagcatgacgtcagccagacgcaactggcccgcaaactggacgcagtagtagaagactgcgtgaatgccgttggcgtcgatctcaacactgcttctgttccgctgttaacccgcgtggcgggcctgacgcgcatgatggcgcaaaacatcgtggcctggcgcgatgagaacggccagttccagaaccgtcagcaactgctgaaagtcagccgtctggggccgaaagccttcgagcagtgcgcgggcttcttgcgcattaaccacggtgataacccgctggatgcttctaccgtccacccggaagcctatccggtggtggaacgcattctggcagcaacacagcaggcactgaaagatctgatgggtaacagcagcgaactgcgtaacctgaaagcgtctgactttactgatgaaaaattcggtgtgccgacagtaactgacatcatcaaagagctggaaaaaccgggtcgcgatccgcgtccggaatttaaaaccgctcagtttgccgatggcgtcgagacaatgaacgacctgcaaccgggtatgatcctcgaaggtgcggtgaccaacgtcaccaactttggcgcgtttgtcgatatcggcgtgcatcaggacggcctggttcacatctcttcattgtcgaacaagtttgtggaagatccgcataccgtggtgaaagcgggcgacattgtgaaggtgaaagtgctggaagtggatcttcagcgtaaacgtatcgccctgactatgcgtctggacgagcagcctggcgaaaccaacgcccgtcgcggcggcggtaatgaacgcccgcaaaacaaccgcccggcagccaaaccacgcggtcgtgaagcgcagcctgccggtaatagcgcgatgatggatgcgctggcggcggcaatgggcaaaaaacgttaaacgcccggactggcccctaaacctgcgcgataaggcgttcacgccgcatctggcaacgaacgccttgcctgacataaaagtgccggagaatatctccggcctttttattccacaaccaaactcataatatattccggcaatatttatcacttcattaacaactgaaaccttaattaaacattagccagtccgggtaattcactattcgaattatattttcgctgcgatataaccttgagccacatcaacattgagtcagattattattcaaaccaacattcgcacacattttaagtattgctgatagaaaccattctcattatcattgtgttgttgattatttaatctctcctttgttggcaaatcatctggtctcatgtcgctgtcaaacgccccatgaggtagttatccagttaatgagaaacaagtaggcacctatgcaatacactccagatactgcgtggaaaatcactggcttttcccgtgaaatcagcccggcatatcgccaaaaactgctttctcttggcatgttacctggctcctcttttaatgtggtgcgcgtcgctccactcggcgaccccattcatatcgaaacccgtcgtgtgagcctggtattacgcaaaaaagatctggccttattagaagtggaagcggtttcctgttaatacggtgataacaacaatgaaaaaattaaccataggcttaattggtaatccaaattctggcaagacaaccttatttaaccagctcactggcgcacgtcagcgtgtaggtaactgggctggcgttaccgtcgaacgtaaagaagggcaattctccaccaccgatcatcaggtcacgctggtggacctgcccggcacctattctctgaccaccatctcatcgcagacctcgctcgatgagcaaatcgcctgtcactacattttgagtggcgacgccgacctgctgattaacgtggtggatgcgtctaaccttgagcgtaacctgtacctgacgctacaactgctggaactcggcattccctgcattgtggcactgaacatgctcgacattgccgagaagcaaaatattcgtattgaaattgatgctctgtcggcgcgtctgggctgtccggtgatcccgctggtttcaacccgtggtcgcggtattgaagcgctcaagctggcgattgatcgctataaagctaacgagaatgtggaactggtacattacgcacagccgctactcaacgaagcagattcactggcaaaagtgatgccttccgacatcccgctgaaacaacgtcgctggctgggcctgcaaatgctggaaggcgatatctacagccgcgcctacgccggtgaagcgtcgcagcatcttgatgccgccctcgcccgtctgcgtaatgagatggacgatccggcgctgcacattgccgatgcgcgttaccagtgcattgctgccatctgtgatgtggtaagcaacaccctgacggcagaacccagccgtttcaccactgcggtagataaaatcgtgctcaaccgtttcctcggtctgccgattttcctctttgtgatgtacctgatgttcctgctggctatcaacatcggcggggcgttacagccgctgtttgacgtcggctccgtggcgctatttgtgcatggtattcaatggattggctacacgctccacttcccggactggctgactatcttcctcgcccagggcctgggtggcggcattaacaccgtgctgccactggtgccgcagattggcatgatgtacctgttcctctccttccttgaggactccgggtatatggcgcgtgcggcgtttgtgatggaccgtctgatgcaggcgctgggcttgccggggaaatcctttgtgccgctgatcgtcggtttcggttgtaacgtaccgtcggtaatgggtgcacgtacgcttgatgcaccgcgtgaacgtctgatgaccatcatgatggcaccgtttatgtcctgcggcgcgcgtctggctatcttcgcagtattcgcggctgccttcttcgggcagaacggtgcgctggcggtcttctcgctgtatatgctgggtattgtgatggcggtgctgactggcctgatgctcaagtacaccatcatgcgcggtgaagcgacgccgtttgtcatggagttgccggtctatcatgtaccacacgttaaaagcctgattatccagacctggcagcgtctgaaaggcttcgttctgcgtgctggtaaagtgatcatcatcgtcagcattttcctgagcgctttcaacagcttctcgctgagcgggaaaatcgtcgataacatcaacgactcggcgctggcgtccgtcagccgggtgatcaccccggtcttcaagccaattggcgtgcatgaagataactggcaggcaacggttggcctgtttacaggtgccatggcgaaagaagtggtagtgggtacgctcaacaccctctacaccgcagaaaatattcaggacgaagagttcaatccggcagaatttaacctcggtgaagagctgttcagtgcgatagatgaaacctggcagagcctgaaagacaccttcagccttagcgtactgatgaaccccattgaagccagcaaaggcgacggcgaaatgggtaccggggcgatgggcgtgatggatcagaaattcggtagcgcagcagcagcttacagctacctgattttcgtcctgctgtatgtaccatgtatctcggtgatgggggctatcgcccgtgaatcaagccgtggctggatgggcttctccatcctgtgggggctgaatatcgcttactcactggcaacattgttctatcaggtcgccagctacagtcagcatccaacttacagcctggtgtgcattctggcggttatcctgtttaacatcgtggttatcggtctgctgcgccgcgcgcgtagccgggtggatatcgaactgctggcaacccgcaagtcggtaagcagttgctgcgcagccagcaccaccggtgattgccattaatggcttcacttattcaggtgcgcgatttgctggcgttacggggccgtatggaagcggcccagataagccagacattgaacactccacagccaatgattaacgccatgctgcaacaactggaaagtatgggcaaagccgtgcggattcaggaagaacctgacggctgcctctctggcagttgtaaaagctgcccggaaggaaaagcctgtctgcgcgagtggtgggcgctgcgttaaccttactccatcgcctgttttggaaagcccggtatgcgcctgcatccgggcttttttgcgtgcggctttccataaaaatgcaactcttgcagcacggcgtaagttcctttgaaagcatctcgcagggatgaaaactcgctaatacacaggtgtggagtggcgcgtagagtcgcggcattcaaacaacaggtgaaggaacgccatgagcaaaaagcagagttccaccccacacgatgcgctgttcaaactctttttacgccaaccggacacggctcgtgattttcttgcgtttcatttaccggcacccattcacgcgctttgtgatatgaaaaccctcaagctggagtcgagcagctttattgatgacgatctgcgtgaaagctattccgatgtgctgtggtcggtgaaaacggaacaaggaccaggatacatctattgtctgattgaacatcaaagcacctcaaacaaactgatcgcatttcgcatgatgcgttacgctattgccgcaatgcaaaatcaccttgatgctggatacaaaacgttgccgatggtggtgccattgttgttttaccacggtattgaaagcccctatccctattcgctgtgttggctggattgtttcgccgatcccaaactggcaaggcagctttatgcctccgcatttccgctgattgatgtcaccgtcatgcctgatgatgaaatcatgcagcaccgacgtatggcgctgctggagttaattcaaaaacatattcgtcaacgcgatctgatggggctggtagagcaaatggcctgcttattaagtagtggatacgctaatgacagacaaatcaaagggctgtttaattacatactgcaaaccggcgacgcggtacgttttaacgattttatcgacggcgttgccgaacgttcaccgaaacacaaggagagtttaatgacaattgcggaaagattgcggcaggagggggaacaatccaaagccctgcatatagccaaaataatgcttgaatccggagtccctcttacagacatcatgcgctttaccggggtgtcagaagaagagttggctgcggcgagccagtaaatttctgtctcgccatttcaaaagttgcctacaccctctgcttcaacgccaccagcaggtgacaaaactcgaccggatgcgaaataaacggcgcatgggccgctttggcgaagatatatgattcgctgtgaggccaaagtttatccagcatcggcaccactttgcgcggcaccagaccgtcgagatagccatacaatcgcaaaaacggcatggacacgttttgcagcggctgacggagatcgaccgttttcaggatttccagcccgccattaagcacgtcaacctccggcatcggtaacgccagaacggttttcttcaacgcccgcgcatcctggcgcgccgtttcagtccccatggtttgtaacgccaggaaccgctccactgtacgctgaaaatcatcactgagttgctgctgaaatcccgccagcacgtccggttttatccccggccactcgtcacgagcactaaaacaaggtgacgacgccacggtgaccagcgcctgaacacgctcgggatgggttaaaacaatttggcttgccaccagcccgcccagactccagcctaaccaaatggctttatcaggtgcctgttgcagcacggcttcggccatatcagcaagtgacagcgcaccaaatccccggctacgcccgaagccgggcaggtcaacaaggtgcagcgtaaaatgcgagctaagttcctcgtcaatgcaacgccacacttcggcattcagtccccatccgtgcagcagcacaagatgaacattcccctgacctttggtctgccaccagatgttattcatccgctattgttctcttttgacttacaaggatgaacatatgctaacagtaccgggattatgctggctatgccgaatgccactggcgttaggtcattgggggatttgttcggtctgttcacgcgccgcccgtacagataaaacgttatgcccacaatgtggattacccgccacacactcccatcttccctgcggtcgttgcctgcaaaaaccgccgccctggcaaagactggtcacggttgcggactatgcgccgccgttaagtccgctaatccaccagcttaaattttcccggcgcagtgaaatcgccagcgccctgtcacgtctgttactattggaagtcttacacgctcgtcgcaccaccgggttgcaattgccggatcgcatcatcagcgttccgttatggcagcggcgtcactggcgtcggggatttaatcagagcgatttgctgtgtcagccgttatcacgctggttgcactgccgatgggatagcgaagccgtcacacgaacacgggccactgcgacccagcattttctcagtgcccggctacgcaagcgcaacctgaaaaatgcctttcgtcttgaattgcccgtgcaaggtcgccatatggtgattgtggatgatgtcgttaccaccggaagtaccgtcgcagagattgcgcagttgcttttacgcaatggtgcggcgactgtccaggtctggtgcctttgtcgaaccttgtagagcctcgatgatgggcgtattataaccaactaaaatagtcaactattaggccattactatgatccgtatttccgatgctgcacaagcgcactttgccaaactgctggcaaaccaggaagaagggacacaaatccgcgtatttgtgattaaccctggcacgcctaacgctgaatgtggtgtttcttattgtccgccggatgccgtggaagccaccgacactgccctgaaatttgacctgctgaccgcgtatgttgatgagttaagcgctccttacctggaagatgcagagatcgattttgttaccgaccagttgggttctcagctaacactgaaagccccgaacgccaaaatgcgtaaagtggcagacgatgcaccgctgatggagcgcgtggagtatatgctgcagtcgcagatcaacccacagcttgctggtcacggtggtcgcgtttcgctgatggaaatcaccgaagacggttacgccattctgcaatttggcggcggctgtaacggttgttccatggtcgatgtgacgctgaaagaagggatcgagaagcagctgctgaacgaattcccggagctgaaaggtgtgcgcgatctcaccgaacaccagcgcggcgaacactcctactactaagttatcccgtcttttgtagattgcccgatgcgacgctaaagcgtcatttcgggcctacgttgaacatgtgccagacgttggcgcagccttgctttggcaaatcctcggttcgtttccccgcgataatatgaccaacctctcataatttaaatttaccccgctctggtgattctcaaacgccagatgttacccgtatcattcacatgggtaccaaacatactcctgacatctgactacaataattagttttagtgggtatcagtcgtggtgccgcaatatctctgttcccgattgggataattagagtttgtcgtcagaaaattgacgttacccataacaaatgaaaggccaggtaaatcatgccattagtcattgttgctatcggtgtaatcttgttgttgctcctgatgatccgcttcaaaatgaacggcttcatcgctctcgtcctcgtggcgcttgctgttggattaatgcaaggaatgccgctggataaagttattggctccatcaaagccggtgtcggcgggacgctcggtagccttgccctgatcatgggttttggcgcaatgctgggcaaaatgctggcagactgcggtggcgcacaacgtatcgccaccacgctgattgccaaatttggtaaaaaacacatccagtgggcggtggtactgaccggttttaccgttggttttgccctgttctatgaagtgggctttgtgctgatgctgccgctggtgtttaccatcgcggcttctgcgaatattccactgctgtatgttggtgtaccaatggcagctgcactgtctgtgacccacggcttcctgccaccgcatccgggtccgactgcgattgccaccattttcaatgccgatatgggtaaaaccctgctgtacggtactattctggcaatcccgaccgtgattctcgccggtccggtttacgctcgcgtgttgaaaggtatcgataagccaattccggaaggtctctacagcgcgaaaaccttcagtgaagaagagatgccgagctttggcgtcagcgtctggacctctctggtgccggtagtactgatggcgatgcgtgcgattgccgaaatgatcctgccgaaaggtcacgctttcctgccggtagcggagttcctcggtgacccggtaatggctacgctgattgccgtgctgattgcgatgttcacctttggtctaaaccgtggtcgttcaatggatcagattaacgacacgctggtttcttccatcaaaatcattgcgatgatgctgttgatcatcggtggtggcggtgcgttcaagcaggtgctggtagacagcggcgtggacaaatacattgcttccatgatgcacgaaaccaacatttctccgctgctgatggcctggtcgattgctgccgtactgcgtatcgcgctgggttccgcaaccgttgcggcaatcactgcgggtggtatcgcggcaccgctgattgcaacgacgggtgttagcccggagctgatggttattgcggttggttccggtagtgtgattttctctcatgtgaacgatccgggcttctggctgttcaaagagtactttaacctgactatcggcgagaccatcaaatcctggtcgatgctggaaaccattatctcggtgtgcggtctggtaggctgtctgctgctgaatatggtgatttgataacactgactgccggatgcggcgtgaccgccttatccggcctacgattcgggatgaattagtaggccggataagacgcgtcaagcatcgcatccggcatcaaccgcactctacttcttcttcgctgcagctctgcggcgtctgtccaaatccttcagcaacttgttcacgccatcatcggcaaacatcgactcaagcgttgcggaaagcttgcgtcgccagtttttatactggtaactggtgccaggaatattcaccggttcggccatatccagccagtcttccggctgtagtcctaacagagcactgttactgtcggcaatgtagcgctgcaaacctcgattaagcgtcggcgtcatcgacatcaacgatgccttatgcccggcacgttttggcaggcaaccatatttatgcagagcatccagcagtccttgtttcgccagttcacgatcctgatacagaccgcgcagtaccacttcatccggatacagccccagggttttgcccagcgttagatccccgctctcccagtagccgcgtagcgtaggcaggtcatgtgtcgccgcaaccgccatcgactgctccggatacgctttcggtgcacggaacgtcttctcgtggtcgttttcgaaatagagcactttgtaggagtacacaccgctgctgcgcagcttaccgacaatctctaccggtacggtaccgagatcttcaccaatcaccatacagcgatgacgtttactttcgagtgccagaatcgagagcagatcatccaccggatagtgaacatacgcgccctgatctgccgtctcgccatacggtatccaccacaaacgcagcatcgacatcacatggtcaattcgtaatgcgccgcagttttgcatattggcacgcaacagctcgataaacggttcataggcacgcgcggtgatgatatgcgggtccattggcggtaatccccagttctgccccaacgggccgaggatatccggcggcgcgccaaccgacgctttcaggcaatatagttcacggtcacaccaggtttccgccccaccttccgctacgccaaccgccagatcacgatacaagccaatcggcatttcatagccctggcttatctcccagcaggcggcaaactggctgtaagccagccactgcaaccagagataaaaatcgacgtcatcacgatgttcttcgcagaactgacgcacttctggtgaatccacgttctgatacatctctggccatgcaggccagccccagcgcatttcgtcctctttcacttgctgggcatgtagcgcatcaaaggctgcctgccagaacaggctgtcgccctgctctgcaacaaactggcgaaacgcggtcatctgctcatcatcacgttgcgcgaaacctttccacgccattcgtaatgctgtcatttttagggcggtaaccgtggagtaatcgacccagtcggcatcgcgcgcctgttgcagcgtctgttgcgtggtcggcaactgccaccaggcctgagcctcttcgctaagatggaaatcttcaacggcgttaacgtcgatataaatcacattcagccaacggcgagaagacgggctgtatgggctggcactctccggatttgccggatagagcgcatgaatcgggttcaggccgatgaacgacccgccacgttttgccacatccaccagcatcgctttgagatcgccaaaatccccaataccccagtttttttccgatcgcagcgtataaagctgaacgcaggcaccccacagcttttgtttattcagcaacgcctgcggttcgtaacagcgtttcggggcgacaatcacccggcaatgcgcgcgctggtcgtcctgggtgagtgtcagcgtgtgataaccttccggcagcttcgtcggtagattgaacgctttgcccccagttacatggcctttgtactgcgttccttcttcggtggtcagcagccagctatattcgccgctgccctccaccaccatcggcatttttttgccgctggtataaaccatgacattcgggactggcgttaccgccactttcgtggcggtacgttgatgcatcgcgtcaagcaaacgccgtttggtttcggcgctaatcgactgcggtttaccgtgggcattgatgtaattggggctaatccccgccgccagcgcggcattatccagacgtttgctttccatcgagcttccttagcgttttgcctgccagatacgagcctgataatcgcgaatagagcgatccgagctaaacataccgcagcgggcggtattgaggatcgccgcgcgagtccaggcctcctggtcgcggtacagcacatccacctgcttttgtgcctctacataagctgcgaaatccgccatcaccagatacggatcgccgccctgtttgccgatactgtgcagcatctggtcgaaggcatgcttatcgccgtcgctgtatttgccgctttccagctctttcaatactgcgtccagcaccttatctttcttccgccatttcaccgggtcgtagcctttggccagaattgccttcacttgttccacggtatgaccaaaaataaagatattttcttcaccgactttctcggcgatttcaacgttcgccccatccagcgtaccgacagtaagcgcaccattgagcgccagtttcatattgccggtaccggaagcttctttacctgcagtcgaaatttgttcggagatatccgccgccgggatcagtttttccgccgccgaaacgcaataatccggcaggaacaccaccttcaacttatcgccaaccagcggatcgttgttgatcacgtcagccactttgttgatcgcaaagataatattcttcgccaggtagtagcccggtgccgctttcgcgccgaagaggaagacgcgcggtacgcgatcagcctgcgggttttcacgaatttctttgtacaacgccagaatatgcagcagattcaggtgctggcgtttgtactcatgcagacgtttgatctgaatatcgaaaatcgcctgtggattgatctcaataccggtacgaactttcacaaactccgccagacggactttattcgcctgcttgatctcgcgatattgctgacggaatttcgcatcatcagcgaatttttccagattgatcagctgatcgagatcgttagcccactctttttgcagtgatttatccaacagagccgccagtgccgggttgcactgtttgatccagcgacgtggggtaataccgttggtgacgttatggaatttgttcggccatagctggtgatattccgggaacagatctttcaccaccagatccgagtgcagcgccgcaacaccgttcaccgcgaaaccgccaaccacacacaggttcgccatatgcacttgtttgtcgtgcaccaccgccagtttggcccacactttttcatcgcccggccaggttttctctaccagcgttttaaagcgagtattaatttcgttaataatctgcatgtggcgcggcagtaagcctttcaccagtttcacatcccagcgttccagcgcttctggcatcagggtatggttggtgtaagcgaaagttttgctggtaatggcccaggcgtcatcccagctcatctggtgctcatcgatcagcacgcgcagcagttctggaatcgcgatagttgggtgggtatcgttcagctgaataacttcgtaatccgccagttcgtgcagtttacgccccgccagatgatggcgacgcaaaatatccgctaccgaacaggcacactggaagtattgctgcatcaggcgcagctttttaccggcagtatggttgtcgtttggatagagaactttggtcagtttttccgcattgatgccctgctgttcggcacgcaagaaatcaccgtcgttaaatttagtcagatcaaacggatgcgcgtgcgtcgcctgccacagacgcagcggctgcgccacgccattacgatagccgacaacggggagatcccacgcttgaccggtaatggtaaactccggctcccagcgtccgtctttcgtcactttaccgccaatccctacctgcacatccagtgcttcgttgtggcggaaccacgggtagttactgcgatgccagtcatccggcgcttcaacctgtttgccatcgacaaaagactggcggaacaaaccatattgatagttcagaccgtaacccgtcgcagactgaccgacagttgccattgagtcgaggaagcacgccgccagacgtcccagaccaccgttacccagcgccgggtcgatctcttcttccagcaggtccgtcagattgatgtcataagccttcaacgaatcctgtacatcctgataccagccgagattcaacaggttgttgcccgtcaggcgaccaatcaaaaactccattgagatgtagttaacatgtcgctgattcgccaccggcttggcgaatggctgagcacgcagcatttcggccagtgcttcactcactgctagccaccactggcgaggagtcatttcagccgcagaatttaagccataacgctgccactgacgtgaaagcgcttcctgaaattgcttatcgttaaaaataggttgtgacataggaataggttgtgacataggagttccacttttcttagattttcaacacaacgttatcgctagtttgccaggctcgatgttgaccttcctcatcctgcgggggattaggcagggaggagttgcggggatgagcaaggaaatgtgatctcaaccacttaaagctagtgcaaaccacaggattagcatcaaatcaatgcaatacagcgcagaaaatctgtatctaagtgcaaaaaatggccgttgcgtattttcaaaaagcggaaggtaactctataaattaagtaaaggagtgaaacagtttcataagtaaaatatccagtgtgctccatctcattcttaatagatttattaagatcatctttttagatggcactttcatcaggaatgaagaagaaacccttgcttaaatgaatctgatgaacataagggaaaccagtattcacgctggatcagcgtcgttttaggtgagttgttaataaagatttggaattgtgacacagtgcaaattcagacacataaaaaaacgtcatcgcttgcattagaaaggtttctggccgaccttataaccattaattacgaagcgcaaaaaaaataatatttcctcattttccacagtgaagtgattaactatgctgattccgtcaaaactaagtcgtccggttcgactcgaccataccgtggttcgtgagcgcctgctggctaaactttccggcgcgaacaacttccggctggcgctgatcacgagtcctgcgggctacggaaagaccaccctcatttcccagtgggcggcaggcaaaaacgatatcggctggtactcgctggatgaaggtgataaccagcaagagcgtttcgccagctatctcattgccgccgtgcagcaggcaaccaacggtcactgtgcgatatgtgagacgatggcgcaaaaacggcaatatgccagcctgacgtcactcttcgcccagcttttcattgagctggcggaatggcatagcccactttatctggtcatcgatgactatcatctgatcactaatccagtgatccacgagtcaatgcgcttctttattcgccatcaaccagaaaatctcaccctggtggtgttgtcacgcaaccttccgcaactgggcattgccaatctgcgtgttcgtgatcaactgctggaaattggcagtcagcaactggcatttacccatcaggaagcgaagcagttttttgattgccgtctgtcatcgccgattgaagccgcagaaagcagtcggatttgcgatgacgtttccggttgggcgacggcactacagctaatcgccctctccgcccggcagaatacccactcagcccataagtcggcacgccgcctggcgggaatcaatgccagccatctttcggattatctggtcgatgaggttttggataacgtcgatctcgcaacgcgccattttctgttgaaaagcgccattttgcgctcaatgaacgatgccctcatcacccgtgtgaccggcgaagaaaacgggcaaatgcgcctcgaagagattgagcgtcaggggctgtttttacagcggatggatgataccggcgagtggttctgctatcacccgctgtttggtaacttcctgcgccagcgctgccagtgggaactggcggcggagctgccggaaatccaccgtgccgccgcagaaagctggatggcccagggatttcccagcgaagcgattcatcatgcgctggcggcaggcgatgcgctgatgctgcgcgatattctgcttaatcacgcctggagtctgttcaaccatagcgaactgtcgctgctggaagagtcgcttaaggccctgccgtgggacagcttgctggaaaatccgcagttggtgttattgcaggcgtggctgatgcaaagccaacatcgctacggcgaagttaacaccctgctagcccgtgctgaacatgaaatcaaggacatcagagaagacaccatgcacgcagaatttaacgctctgcgcgcccaggtggcgattaacgatggtaatccggatgaagcggaacggctggcaaaactggcactggaagagctgccgccgggctggttctatagccgcattgtggcaacctcggtgctgggtgaagtgctgcactgcaaaggcgaattgacccgctcactggcgctaatgcagcaaaccgaacagatggcacgccagcacgatgtctggcactacgctttgtggagtttaatccagcaaagtgaaattctgtttgcccaagggttcctgcaaaccgcgtgggaaacgcaggaaaaagcattccagctgatcaacgagcagcatctggaacagctgccaatgcatgagtttctggtgcgcattcgtgcgcagctgttatgggcctgggcgcggctggatgaagccgaagcgtcggcgcgtagcgggattgaagtcttgtcgtcttatcagccacagcaacagcttcagtgcctggcaatgttgattcaatgctcgctggcccgtggtgatttagataacgcccgtagccagctgaaccgtctggaaaacctgctggggaatggcaaatatcacagcgactggatctctaacgccaacaaagtccgggtgatttactggcaaatgaccggcgataaagccgccgctgccaactggttgcgtcatacggctaaaccagagtttgcgaacaaccacttcctgcaaggtcaatggcgcaacattgcccgtgcacaaatcttgctgggcgagtttgaaccggcagaaattgttctcgaagaactcaatgaaaatgcccggagtctgcggttgatgagcgatctcaaccgtaacctgttgctgcttaatcaactgtactggcaggccggacgtaaaagtgacgcccagcgcgtgttgctggacgcattaaaactggcgaatcgcaccggatttatcagccattttgtcatcgaaggcgaagcgatggcgcaacaactgcgtcagctgattcagcttaatacgctgccggaactggaacagcatcgcgcgcagcgtattctgcgagaaatcaatcaacatcatcggcataaattcgcccatttcgatgagaatttcgttgaacgtctgctaaatcatcctgaagtacctgaactgatccgcaccagcccgctgacgcaacgtgaatggcaggtactggggctgatctactctggttacagcaatgagcaaattgccggagaactggaagtcgcggcaaccaccatcaaaacgcatatccgcaatctgtatcagaaactcggcgtggcccatcgccaggatgcggtacaacacgcccagcaattgctgaagatgatggggtacggcgtgtaagtttagccggataacgcgccagatccggcttacatctctgcatcattcaatgctcacccgcgttacgccatctgtttctatcaaactaaaccgcaccggcaagaaacgctccaccaccgcgatattggtcagcagatggcatgagggatgggcgaccgtaaattcccccgcgcccgccagcgccatcggtagcaccagttggtcagcaagatattcccccaccgccgccgtgcttgccaggtagcgtttcacctctttcaccaactgtgccgcaaccacctcggcactgacgcgcttttcaccgacgacaaaaaagcgttcggtgatattttcactttcgacttcaagcgagacggtattacccggcccctggtcgcgcggcaggttatgaatattctgttcatgcagggaaaaactccccgccagtgtagcgatttcacgctcagcaacatggcgcggcacaccagctaatagaacttctccacgcatctgcacaatgttcccgcgctcgccaagttgcaaggtgttaaacgatgccacgggcgagacttccgttgccaccacaccgcctccggcagggtaaaaaccgtggcgtaacagcgtggtttgctgatgaattcctattttcgccagcagcggctccagcacccggcggataaaatccgcaggcggcgccgacgggttatcggtgccgccgctcacttcaacacgcgaaggtccatcggcaaaccacagcgcgggcagcaccgtttgcagcaccagcgtacaacttccggcgctaccgatagcaaagcggtaatcgccgccgcgcacggtgccgggccggaagagcagacgctgcgaccccagctccgcgccttccacggttgctccgcaaatttccgtcgccgcctttaccgcggtcagatgctggcgcaacagccccggtttcgcccgcccggcacgaatgctggtgatggtaaatggctggccggttatcatcgacaggctcagcgccgagcgcaggatctgcccgccaccttcgccctgtgcgccatccagcgcaatcatccttttcatcatttatccttttacgcacaccacctgacgcagggtatagataacttccaccagatcgctttgtgccgccatcaccgcatcaatatctttatacgccatcgggatttcgtcgatcacttcggcatctttacggcattccacatgcgcggtggcacgaatttgatcttccacgctgaacagttttttcgctttagttcggctcattacccgcccggcaccgtggctgcacgaacagaacgactcttcatttcccagcccacggacgataaagctttttgctcccatcgaaccgggaataattccatattgaccagcacgcgcagacaccgcgcctttacgcgtcacgtagatctcttcaccaaagtgctgttctttttgcacatagttgtggtgacagttgatctcttccatcgccagcgtttgtggctgtctgaccgttttctgcgtaatgctctgcaatgccgttaccacgttttccatcatcgcatcgcggttaaggctggcaaaaagctgcgcccaggccacggctttcaggtaatcatcaaagtattccgtaccttccataaagtacgccagatcacgcgacggcaacgtctcaagcgtttcctgcatctctttttgtgccagatcgataaagtaagtcccgatggcgttaccaattccgcgtgaaccggagtgcagcataatccacacctggtccgactcatcaaggcagatttcaataaagtggttaccggttcccagcgttcccaggtgtttatagttattggtattcaggaaacggggatatttttgcgttaaccactgataaccggcttcaagctcagcccatttagcatcgacgttaacaggtggattttcccaggcacctttatcacgtttacaacggccagtggtacgcccgtgcggcacggccgtttcaatcgcctgacgcagctctgccaggttttcaggcaggtcttccgccgttaacgcggtacgcagcgcgttcattccacagccaatatccacgcccaccgccgccggaataatcgcccctttggtcgggatcacgctaccaatggtggaacctttacccaggtgtacatcaggcattaccgcaatatgtttgaaaataaacggcatcttcgccgtattaataagttgctgacgcgcatcggcctctaccggcacgcctttggtccacatttttaccggggcattttcagtggtcagtaattcgtaattcattttgtttttctcttttcgttgtttgctgtcctgataattgcaaccgtcgtgccagaaaattaaataagcagcttaattttttaattcattgttttaaaaaagattatatctttacgtccgtaaccggagatttcccgcaaagccaatttaccgataatgaaatatcgtcttttataaggatatctaagatgcgtaaaacagtggcttttggctttgtcggtaccgtactggattatgccgggcgcggcagtcagcgctggtcaaaatggcgtccgacactctgtttatgccagcaagaatcgttggtcatcgatcgactggaattgttgcacgacgcccgctcgcgctcgctatttgaaacgcttaaacgcgatatcgccagcgtttcgccagaaacagaagtggtgagcgttgagattgaactgcataacccgtgggatttcgaagaggtctacgcctgcctgcatgatttcgcccgtggttacgagtttcagccagaaaaagaagactatttaattcacatcaccaccggtacccacgtcgcgcagatttgctggtttctgctggcagaagcgcgttacctgcccgcccggctgatacaatcttcacctccgcgcaaaaaagaacagccgcgcggcccaggtgaagtaacgattatcgatctcgatttaagccgttataacgccatcgccagccgctttgccgaggaacgccagcaaacgcttgattttcttaagtccggcattgccacgcgtaacccccacttcaaccgcatgattgagcagatcgaaaaagtggcgatcaaatcccgcgcgccgattctgcttaacggtccaaccggcgcgggcaagtcatttctggcgcgacgcatcttcgagttaaaacaggcgcggcatcagtttagcggcgcgtttgtggaagtgaactgcgccaccctgcgcggcgataccgccatgtcgacgctgtttggtcatgtaaaaggcgcgtttaccggggcgcgggaatctcgtgaaggtttattacgcagcgccaacggcggaatgttgtttcttgatgagattggcgaactgggcgcagacgaacaggcaatgctgctgaaagccattgaagagaaaaccttttacccgtttggcagcgatcgccaggtgagcagtgattttcagcttatcgccggaacggtgcgcgatttgcgccagctggttgccgaaggcaaatttcgcgaagatctgtacgcgcggatcaatctctggaccttcaccctgccgggtctacgccagcgccaggaagatattgaaccgaacctggattatgaagtggagcgccacgcctcactcactggcgacagcgtgcgttttaacaccgaagcgcggcgcgcctggttggcttttgcgacctctccccaggcaacatggcgcggtaactttcgcgaactttctgccagcgtcacgcggatggccacctttgccactagcggacgcatcactctggacgtggttgaagatgagataaaccgtctgcgctataactggcaggagagccgcccctccgcgcttacggcgttgctgggcgcagaggcagaaaacatcgatctcttcgaccgtatgcaactggaacacgttatcgctatctgccgccaggcaaagtcgctttccgcagccggacgccagctttttgacgtttcgcgccagggcaaagccagcgtcaatgacgcggatcggctacgcaaatacctggcgcgttttggtctgacgtgggaagccgtgcaggatcagcacagctccagttgaatatggtggtccgtcagcacctgcatcacgcttactggcggcggggcgtcggtgtagacggcatctaccatgctgatgctgcccatattgaccatcgcgttacggccaaatttcgagtgatcgacaaccagcataacgtggcgcgagttctcaataatggcgcgtttggtgcgaacttcgtggtaatcgaactccagcagcgagccgtcgctatcgatgccgcttatccccagaatgccgaaatcaaggcggaactgggagataaaatcgagcgtcgcttcgccaatgatcccgccatcgcggctgcgtaattcgccaccggcgagaatgatgcgaaaatcttcttttaccatcaacgtgttagcaacgttgagattgttggtgacaatgcgcaaattgctgtgattgagcagtgcgtgcgctaccgcttccggcgtggtgccgatatcgataaacagcgtcgagccattggggatttgctccgccactttgcgggcgatgcgctctttttcttcggtctgggtggccttgcgatcgtgccacggcgtgttaaccgaactggaaggcagcgccgcaccgccatgatggcgcaggatcaggttttgctccgccagctcattgaggtcgcggcgaatagtctgcgggctgacggagaaatgctctaccagctcttcggtactgacataaccctgctgtttaaccagttcgataataccgttgtgacgttgtgtttgtttcatttataaatccctggaattattttcgttttcgcgcattgagcgaatcaacaaaagccatcgctaaacccacggctaacccggcgatgtgtgctccgttcgccatcgacatcccaaacaaatcaaaccatccggcgacaatccagatcagcgcaaagataattaacccacgttgcaggtaaatgccactttgcggatcgcgttcgccacgtagccagacgtagcccatcagcgcatacaccacgccagaaagcccgccaaaccacggcccgctgaatttttgctgcacatagccgcttaacagggcgctgataagcgtaatgacaattagcttaccgctaccgaggcgtttttccaccgcaccgccgagataccaccaccagagcaggttaaagaggatatgcatcagcgagaagtgcattaacgcgtgggtgaagtaacgccagaactcaaatttcagtgttggatcgaatggccaggccagccataacatcacttcctgatcgccgagaatttgcatggcaataaacaccaccacgcaggcgatcatcatcacccaggttaccggacctgcgcgttcacgcaaggcggcaaagaaaggataacggcgataatgcaggccactgccggtatggcctgcctgccagctcgccgccagataacgcggatctgccgggttttcgagaaaacgcgccagctccgcccgtacgcgctcggcctgggactcatccgccagccagacatcgctttggttatgttgttgaatcgtgaggataacaccctgcgtcgccatgtaatcaacaaacgcctgcgccacgcgggggttagcaaaagaggtaatcatcaacatcgttgctgtcgcttattccacacaaaaggggacagtataaagcgttacgcgccgtacgccacctctgcgggaaactgacgttgccaggcttcaaagccgccgtcaatgctatagaccacatcgtagccctgttgcagcagatactgcgccgcgcctttgctgctattgccgtgataacacatcaccatcaccggagtgtcaaagtcgttatcacgcataaaagcgcccagcgtgtcgttggttaaatggaaagcctgcaccgcatgtcccattgcgaaactctgtggatcgcgaatatcgaccagcaccgcctctttttcctgcaacttctggtgcgcgtcggcaacgttaatacattcgaactgatccatgcgtctctctttctttacaaacaagtgggcaaatttaccgcacagtttacgtcgaagcggcagataaacgccataatgttatacatatcactctaaaatgttttttcaatgttacctaaagcgcgattctttgctaatatgctcgataacgaacatttatgagctttaacgaaagtgaatgagggcagcatggaaaccaaagatctgattgtgatagggggcggcatcaatggtgctggtatcgcggcagacgccgctggacgcggtttatccgtgctgatgctggaggcgcaggatctcgcttgcgcgacctcttccgccagttcaaaactcattcacggtggcctgcgctaccttgagcactatgaattccgcctggtcagcgaggcgctggctgaacgtgaagtgctgctgaaaatggccccgcatatcgccttcccgatgcgttttcgcctgccacatcgtccgcatctgcgcccggcgtggatgattcgcattggtctgtttatgtacgatcatctgggtaaacgcaccagcttgccgggatcaactggtttgcgttttggcgcaaattcagtgttaaaaccggaaattaagcgcggattcgaatattctgactgttgggtagacgacgcccgtctggtactcgccaacgcccagatggtggtgcgtaaaggcggcgaagtgcttactcggactcgcgccacctctgctcgccgcgaaaacggcctgtggattgtggaagcggaagatatcgataccggcaaaaaatatagctggcaagcgcgcggcttggttaacgccaccggcccgtgggtgaaacagttcttcgacgacgggatgcatctgccttcgccttatggcattcgcctgatcaaaggcagccatattgtggtgccgcgcgtgcatacccagaagcaagcctacattctgcaaaacgaagataaacgtattgtgttcgtgatcccgtggatggacgagttttccatcatcggcactaccgatgtcgagtacaaaggcgatccgaaagcggtgaagattgaagagagtgaaatcaattacctgctgaatgtgtataacacgcactttaaaaagcagttaagccgtgacgatatcgtctggacctactccggtgtgcgtccgctgtgtgatgatgagtccgactcgccgcaggctattacccgtgattacacccttgatattcatgatgaaaatggcaaagcaccgctgctgtcggtattcggcggtaagctgaccacctaccgaaaactggcggaacatgcgctggaaaaactaacgccgtattatcagggtattggcccggcatggacgaaagagagtgtgctaccgggtggcgccattgaaggcgaccgcgacgattatgccgctcgcctgcgccgccgctatccgttcctgactgaatcgctggcgcgtcattacgctcgcacttacggcagcaacagcgagctgctgctcggcaatgcgggaacggtaagcgatctcggggaagatttcggtcatgagttctacgaagcggagctgaaatacctggtggatcacgaatgggtccgccgcgccgacgacgccctgtggcgtcgcacaaaacaaggcatgtggctgaatgcggatcaacaatctcgtgtgagtcagtggctggtggagtatacgcagcagaagttgtcgctggcgtcgtaaggatgatgcccggttgtgaagtgcaaccgggctatttggattccttagactattcattgtaaataattgaataacggcccctgagctaaaatcgccaaacttaagcacgttacccaatcgccccacttcttcctctggtttctattttttctgcaccaatggcaataatatcccaatgcaaaaccaagctgtgcactaatcgggccgacaaaatcagtccaaggctgcggccaaaaaagggaaaaattcaggggaagccagacaaacgtcagaaagaaatttcggatattttccagcaacgctgatttctctggagaaatataaagaatgaaattcgagagaattaaccagaaatagaccggcgaaaagaccagccagcaatgcagtctgttttttaattcaggaggcgttctgcgggagaattgccaaccgatgccagccattacactgaaaaaaagtgcatattcaaccattaactcaagttgtagttcctgaagagaaatacgcacaaccaggagcggaaaggagaatattatttctgccagaaaagttaacgtgaatataagtacggctaagacaataaccgtcggccataccaataatggcacgataacaaaaccgagaattatagggggaatataaagccggaatttaatcatttttattttcctggtgattcggatgatgcgtcatacatcgcgcataaacactcatcaatcatccagtcgtctacccagacctgatgctgtgtgccctgttctggctgctttggtgggttctcaatcgcctgccgcgcgcgttctttcaagatggattgattgttgaaggcccaggcattgatttgggtggtaatggcgttatcgatatcgtcctggttatctctgatataatctccacgatatctgttcaataaacaggcaagagaaacggtcgaccaaaagccgggaactgaattaatggcatccagcaatggcgcaagggcgatatcggcacggaaaaacatttcaatcatgtactgtaattcgacagcctcatcgccggatacccaatcagtcatatactggcaggcaaatcgttgcaaaattttccattcatcctcacgccaattttctttactggcaaggtttatacgccgtagagaaaatacttcgtgaatattgtcaaactgcccctgtgcaacaaattccagtaaacgcggcagaaaatagcggacctcatcgctgttttgcggatcgggtcctgggctactattccatgcattgattaaggaatacgagatcgctcgtaacgatgtactccgtaataccttttgttcctgctgactcaggcaatattcacaacaaaccacaaatttctgcggcaccggataacgacgaaaaatatgataaatctgctcaattaatgcctgcatggcggggctgggttgcataattaccccctcgcccgctgatcgcgtgtaaacggttgataaacaaaacgagcattcgccacgttcaggcgaataatggcactacgagagagggaaaagctggggcgaatgcaactattgcagtctcgacagctttcttcagcgcaattttccactgtgtaataacgagcgtagagtttcagttccgcttgcttatcacgaaatccgcgtaaactgttatcgttatgaaatttccaggcatctttaaagacctgaaaaatgtagatatcctcaatccaggactcacattttttaagcgggcgctttgctatgatcacccgctcatccgggtttagcatcgccgtaaattgaacggtgaggtcatttgtcgtgttcagatcacattgaacatctggtacatcactgatataggggtcaaatccaaagtcagcaccacaggcacaaagacggctaatggtggcggtatcgagggaaaatcccggccatacattgctggacgttaagccaatatttaatgtgacattatatcgaagcaatccctcaagaccgtcagcaccgacgaacttttccccttcatccagggcctggttaatgagttgctgaacaatgccttcatcccagtatgccgatttgcagttggcaatcgtaatatccacgcctgtgaagggatcagtaccggcaaggcttgcaaataatgtattaactaattccatttttattatccagctttaaggtagcgtcttatacatcgggacataacctacatcttccaccaaactctgtccctgcggcgttaaaaaccactccaacaatttttgtgtctctgacgtcgtattttcccgcgttaccataaaggcatcgacgatatagggatatttgccgttgcgaatgttttcggcagtcggtgcaataccgttaatcgctagcagttttatatttttatcgtcgttcatttgtgttgcgtaataacggaaggtgtaacctattgcgttgtttgtattacggtattcggcaacgactttaatcattccctccatcatacttgccacttctgtttcctgcggcgagatcatgcggacatttttcatgacctgggattgcatcaccgtctggctaccagagtcttccgggcgttgccaggtctggatctcctgatcgttaccgccaaccgtgcgccagttggtaattgcaccactgaagatgtcacgcacttgttgttcggtcagggaattaaccgggttatctgcattgacgatgaaaacaaacgcttcacgggcaaaaggcgtgtaaatcaaagtgacgcccgattcctccgcgcgttttttctgcccaccggaaggttgagccacaaagataatatcggcattacctttaacaatcttgttatatgcttcgggagtacgagagttcgccagatattcccattcgtgaaaatcttccggcaaaacgcttagtgcataaaaggcagaggcataaatggggtacgccgccgttgcgccatcaagtcgcggccagttttgcgtgaactgaatttgcggtttaccacgcagtggtgtcagttgattattgagtttatcgggtcgccaggcccaggtatcaatattttcacgcacaccgacgccgggattaagctgtttatataaataagcctggtaaccggcgacaaaaccaagcatgagaaggataaacaagagagaattacggcaacgtaacccggacgtgcccgttaaaggatatctggtcggccagccgtaccccagcgaaaaactgatatgcgcgccaacaggtataatgactaaccaccagtactcaccaccgactaatgaggctaacaaaacgcccagccaggggagcataagatcagccaaccaacccgctcccatctggcgaaattgataatctgccagatgcagtgcgattatccagacccccagggttaataatgcgggtactaaaaaaagacattgtcgccagacggctatttctcttttttctggtgcactatcgtccgcccacactcgccccgagaaaaatagcattaatgcgcccagcgccagcataaaaatgttgagcagaaggtaaattgttggcgtgataaagatattacaaacttcaataataccggcaagtccgacacccagcatggcaataaccgccgccaaaaactgcgccagaatggggatgccgaaaaaagtcattaccagcgaggtcaaaatccattttctgttttgcattattctttccattctttctgaatggcgaaattatactccccgagtccccttgccccttctggacacttttccgaaatgatggcgaaaaaaacgggaccctttggccccgttctatttattagtgaaattacaatctcaccggatcaatatgccagatatgatcggcgtactctttgatagtacggtcagaagagaagtagcccatattggcaatgttcagcatcgcttttgcggtccactcttcctgaagctcgtagagttcatcgactttatcctgacaatcgacatagctgcgataatccgccagtacctggtagtgatcgccgaagttgatcagcgaatcaaccagatcgcgatagcgacccggatcttccggactgaatacaccgctgccgatttgcgtcagcacctgatgcagctcctcatctttctcgtagtattcacgcggtttgtagccctgacgacgcagttcttccacttcttccgctgtgttaccaaaaataaagatattgtcagcaccgacatgatccagcatctcgacattcgcaccgtccaacgtaccgatagtcagcgcaccgttaagcgcaaacttcatgttactggtgccggaagcttccgtccccgccagcgaaatctgttcagacagatcggccgccggaatgatcaactgcgccaggctaacgctgtagttcgggatgaacacgactttcagcttgtcgccaatctgcggatcgttgttgatcactttcgctacgtcattgatcaaatgaataatgtgcttcgccatgtaataggccgaagccgccttaccgccaaaaatattcacgcgcggtacccacttcgcatccgggtcggccttgatgcggttatagcgggtaatcacatgcaacacattcatcaattgacgtttgtattcgtgaatacgtttgatttgtacatcgaacaacgcctttggattcaccaccacattcagctgctgggcgatatactctgccagacgctttttgttctccagcttcgcctgatgcacagcgtgattaaccattgggaaatcacagtgttgttgcagctcattaagcaggctaaggtcggtgcgccagttacggcccaggtgttcgtccagcacggctgaaagcgatgggttcgctaccgctagccagcgacgcggcgtcacaccgttggtgacgttggtgaaacgacccgggaagattttcgcaaagtcggcaaacaacgattgcaccatcagattagagtgcagttccgatacaccgttaactttgtggctcacaacaaccgccagccaggccatacgcacacgacgaccgttggattcatcaatgatcgacgcccgtcccagcagatcggtatcgttcggatactgttcctgcaaggttttcaggaaatagtcgttgatttcaaagatgatctgcaggtgacgcggcagaattttacccagcatatcaaccggccaggtttccagcgcctcgctcatcagcgtgtggttagtgtaggagaagacctgacaacacacctcaaacgcgtcgtcccagctaaattggtgctcatcgatcagcagacgcatcatctcaggaatcgacagtaccggatgggtatcattgagatgaatcgcgattttatccgccaggttatcgtaggttttatgcaactgataatggcggcttaaaatgtcctgaatggtcgaggaaaccaggaagtattcctgacgcaggcgcagctcacgcccggagtaggtggagtcatccggatacagtacgcgagatacgttctcggagtggtttttatcttccactgccgcgaagtagtcaccctggttgaatttaccgaggttaatttcgctactggcttgcgcactccacaaacgcaacgtgttggtcgcgtcggtatcgtaaccagggattatctgatcgtaagcgactcccagaatctcttcggtttcaatccagcgcgtttttttaccttcctgctgaatgcgaccaccaaaacggactttatagcgcgtgttgtggcgtttgaattcccacgggttaccgtattccagccagtagtctggcgactctttctggctaccgttaacgatgttctgcttgaacataccgtagtcatagcggatgccgtaaccgcgccccggcaaccctaacgtcgccagagaatcaaggaagcaagccgccagacgtcccaggccaccgttaccgaggcccggatcattttcttcatcaatcagctcttcgagatttaaccccatcgcttccagtgcgccctgtacatcttcgtaaattcctagcgacaacatggcgttggagagcgtacggccaatcaaaaactccatcgacaggtagtaaacctgacgagtttcttgcgacaactgggcacggtttgaacgtaaccagcgctccacgagacgatcgcgcacagcaaataacgttgcgttcagccattcatgtttattggcgacgaccgggtcctttccaatcgtaaacatcagcttgtaagcgatagagtgcttaagagcttctacgctaagcgtgggcgatgaatatgtaaacggagcattcatataggcgtttcctgaaaactatttcaagcgatagtaaagctcacggtacgacttcgccgcgacctgccagctaaaatccattgccatagcctgacgttgcacaaaccgccacagtgaaggacgggaccacagtacaaaagcacgccgaatagcccgtaacagcgaccaggcattactatcttcaaagacaaacccactggcgacgccatctgcaaggttctcaagagaacagtcagaaaccgtatcagcaagcccaccggtgcgccgcactaacggcagcgtaccgtacttcaatccataaagttgcgttaagccgcacggttcaaaacggctgggcaccagaatgacgtccgcgccgcccataatgcgatgcgaaaatgcttcgtgatagccaatctgaacgcccacctgaccggggtattccgctgccgccgcaaggaaaccttcctgcagcaccggatcgcccgcgccgagtagcgccagctgcccgccctgctccagaaggcccggtaaggcttccagcaccaggtcgagacctttctggctggtcagacggctcaccactgcaaaaagcggcactttatcgtcaaccttaagccccattgcgatttgtaactggcgcttattttccgctttatcttccaacgtatcgcgggtgtaacgcgaggccaacagtaagtccgtctcaggactccagattttctcgtccacgccgttcagtacgccggaaagacgcccttcacggtgacgctgttgcaacagaccttccataccgtaggcaaactgcggttcggtgatctcgcgagcgtaggttggactgaccgccgtaatgtgatcggcatagtacagaccggccttcaggaaagagatttgtccgttgaattccagcccatgaatattaaagaatgaccatggcaattggatgtcattcatgtgatgtgcataaaacatgccttgataggccaagttgtgcacagtaaacaccgacttcgccggacgcccgcgcgccgccagatacgcaggcgcaaggcctgcatgccagtcgtgcgcatgcaccacatcaggacgccagaatgggtcaagcccgctggccatttctgccccaacccaccccagcagcgcaaaacgcaatacgttgtcggtataggcaaataagttggtatcgtgatacgggcttcccggacgatcatagagatgcggcgcgtcaatcaggtatatgccaaccccgttgtaatgaccgaacaacagcgtgatatgtccggcgaaggtatcacgacgggatactacctgcgcatcggtcacgccacggcgaatatcgggaaatgcaggcaacagtacgcgagcgtcaacgccgtctgcgatttgtgctgcgggtaatgccccaataacatcagccagaccgccggttttaagcagcgggaacatctctgaacatacatgtaaaacctgcattatcgctcctgtttatgccctaacttccgtagcatttcgcgcgttaccagcacgatgccttcttctgaacgatagaaacgacgtgcatcttcctctgcgttttcaccaatcaccatgccttccggaataacacaagcacgatcgatgacgcagcggcgcagacggcacgagcgacctacccatacttccggtaacaatacggcggaatcaatgttgcagaatgaattcacgcgaacgcgcgagaacagaacggactgcaccaccaccgaaccggagatcacacaaccgccggaaaccagtgagttaagggtcatcccgtggctaccggagcgatcctgcacgaatttcgctggcggtaatgattcattgtaggtgcgaattggccaattgcgatcgtacatatccagttccggcaccacagaggccagatcgaggttcgctttccagtaagcttccagcgtacccacatcgcgccagtacggctcggcatccgggtcggattgtacgcaagagagcgggaacgggtgcgcataggccagaccggcttcggtgatcttgggaatcaaatctttgccaaagtcgtggctggagttctcatcgcgatcgtcttcttccagcagttcatacagatagtcggcgtcaaagacgtagatacccatactcgccagagatttgctcggatcgttcggcattgacggcgggttagcaggtttttcaacgaattcgataattttatcgttctcatcaaccgccataacgccaaatgcggaggcttcttcaatcggtactggcatacaagcaacggtgcaacgtgcgcctttttcgacgtgatcgataagcatacgcgagtagtcttgcttgtagatatggtcgcccgccaggatcaccacgtattccgctttataacggcggataatgtcgaggttttgggtgaccgcatctgcggtgccgcgataccagttttcccctttcattctctgctgtgctggcagcagatcgacaaactcgttcatttcttcattgaagaatgaccagccgcgctgaatgtgctgcaccagagtgtgggactggtactgggtgatcacgcccatacgacggatcccggagttgatgcagttagacagcgcaaagtcgataatgcggaacttaccgccgaagtgtacggccggttttgctcgcttattggttaaatccttcaggcgggtaccacgtcctcccgccagtatcagggcaacagatttcaatggcagctggcgcgccaacattaagtgatcgttcttctctaaactaaccatgactaactccttttttatcatctctggaacacacacaatccgtgtgcaggtccctgccagacagccgtaatcactgggttatcctctccagcgaatgggggaatggcgtgccactccccagcaggtaaaacaatctctgttacctcaagcgtggcgttaattgcgatcaaaaagcgatccgagagcagaatttgcagctgtttcggcccgttttgccactcatccgtgcttaaaggttgagcatatcgatttagccaacggacattgccgtcgccttcttcccaccagcgattctccaccaaagcgggaatgcgcttgcgcagatggattaacgcggcggtaaatgcggttaaaccactgcttgcctgcgaccagtccaaccaggttaattggttatcctgacagtaggcattgttattgccatgctggctgtgaccatgttcgtcaccggccagtaacatcggcgtaccctgggagagcaacaacgttgttaacagggcgtgaatgctgtcgcgccgccgttcaaccaggtcaagagaaccgcctaacccttctttaccatgattgttactgtaattgttgttggtcccgtcgcgattttcttctccgtttgcttcattgtgtttatggttgaagcaaacgcagtcgcgaagcgtaaaaccgtcatgcgcggtgacgagattaatcgcggcactcggcagacgaccattacgtttaaaaacatcgctggaggcagcaaaacgcccggcaaacgcccccagaggcaaatcataatgtagccagaaacgacgggcagcatcgcggaaatgatcgttccactcggcaaacagcggcgggaaatttcccacctgataaccaccaggagcgatatcccacggttcagcaattaacttcacctgcgagagcaccgggcagttctggatagcggtaaacaacggcgcatcctgacggaactctggcgtacggcccatgactgccgccagatcaaagcggaaaccatcgacgtggcaggtttctacccaataacgcaggcaggcgctggcataatccaccaccgccggatgactcaaattgagcgtattgccgcaaccggtccagttgtgataatcgccgtcttctcttatccaataatagctacggttatcgatcccacgcagcgagaataacgggccgtcgaggtccagttccgcactatggttgagcacgatatcaagaatgacttcgatacccgctttatgcagtgctttgattgcatcgcgaaactcatccagcgccgtttctggcgagcaggcatacgccggatgcagcgcaaacatcgccaccgggttgtaaccccagtagttacttagccccatgcgttgcagacgtggttcactggcaaactgcgccactggcagcagttccagcgcggtaatgcccaattgtttcaaatagttgatcatcaccggatgcccgagggctttataagtgccacggatctcgaccgggatctccgggtgcaagtacgttaatcctttgacatgggcttcataaatgatggtgctgccccacggcgtgcgcggcggggcatcatcttcccagtcatagtgatcaaccaccactacgcatttcggcgcaatggcggcgttgtcgcgatagtcaggttcattatgaccggcgtgcagcagcgggttatctttaaactccccgtcaatttgccgcgcgcaaggatcaatcaacaacttcgccgggttaaagcgatgcccctcggcgggttgccaggggccatgaacgcgataaccataacgcaaacccgggcgcgcatccggcagataaccgtgccaaatgtcgccactgtgccctggcaagtcatagcgatgttcctggccattggcgtcaaagacacacagttctacccgctcggcatgagcggagaaaagtgtgaagttgacgccctgaccgtcgtaatgcgcgccgaggggagcgggtttgccaatggcgagttgtgtcattctgcctcccgaaccagccagatagtggccagcggtggtagcgtcaggcttagtgaatgctgacgaccgtggctggcaatctcatcgctgtgtaccgtgccgccattgcctgcattactgccgtgatagtgcatggaatcggtattgaggatttcacgccatttgcccggctggtttatgccgaagcgataatcatgacgcggtaccggcgtaaagttactggcaacgatgatttcgttaccctctttatcgcgacgcacaaagatcagcaccgagcgttctttgtcatccaccaccagccattcaaagccgtacgggtcaaaatccagttcatgcattgctttatggtggcggtaggtgaggttcagatcgcgcaccagacgctggacaccgtggtgccagttatcgccgccttccaacagatgccagtcgaggctggcgtcatggttccactcgcggccctgggcaaattcgttacccatgaacagtagtttcttgcccgggaatgcccacatccagccatagtaggcgcgcaggttcgcgaatttctgccatgcgtcgcccggcatgcggtcgagaatcgattttttaccgtggaccacttcatcatgcgacaacggcaggacgaagttttcagtgtagttgtagagaatcccgaaggtcagtttatcgtgatgatactgacgataaaccgggtcgagcttcatgtagtccagggtgtcatgcatccagccgaggttccacttgtaccagaagcccagaccgcccatatcctgcggacgagaaacgccagggaaatcggtagactcctcagccattgtcaccgcaccggaaacctgctcaccaagaatacggttggtattacgcaagaattcaatcgcttcaagattctcgcgcccgccaaattcgttcgggatccactccccctctttacggctgtagtcgcgataaatcattgacgccaccgcatcgacgcgcagcgcatcaataccaaaacgttcaatccagtaaagcgcgttaccgacgaggaagttactgacttcacggcgaccatagttgtagatcagcgtgttccagtcctgatgatagccttcacgcggatcgctgtgttcatacaagttcgtgccatcaaattcggcaagcgcaaagtcatcagtcgggaagtggcctggcacccagtcgagaatcacgttcagaccagctgcgtgtgcggcatcaatgaaataacggaagtcgtcgcgagtaccaaaacggcgggttggcgcatacaggccggttggctgataaccccaactgccatcgaagggatgctcgttaatgggcagtagttcgaggtgggtaaagcccatccatttagcataaggcaccagttgatcggccagctcgcggtagctcaaccagaaattgttgtcggtgtggcgacgccaggaacccaggtgaacttcataaatagagattggcgcatcaaactgattcgcttttttgcgctcttcagtctgtacaaccttttccggcagcccgcaaataagagacgcggtttccgggcgcatttgcgcttcaaaggcataagggtcggacttcagacgcaagttgccattggcatcaatcatctcgtatttatagagctgaccgttatgcgccccagggataaacagttcccagatgccgctctctttacgcaggcgcatcgggtgacggcgaccgtcccagtagttgaattgcccaaccaccgagacccgacgggcgtttggagcccagacagagaaacgcgtacctgtgacgccatccatagtatctgcatgcgcgcctaaggtttcatacgggcgcaggtgagtaccttcagataatagccaggcatccatttcctggattagcggaccaaaacggtaaggatcatcaatcaggttttgctgaccatgccagacaacagccaactgatagcggaaaaaattcttacgtcgcggaatgacgccgctaaagaatccccgtgagtcgagacactccagttttgcgagtttgcgcccggttttcggttcaatcacccacacatcggtagcgtcgggtaaaagggcacggacttccagtcccgcggtggttttatgcattcccagtacggaaaaaggatccgcaaaatggcctgcaattagcgcgttaatcacgtctctatcgatacgatcggacatgcttgtcttcctgttttattgtgtcaccccatccaattggatttttgacttctggttgtgacatttttttgacctgaacggcgcagcactctgtgcatcctctctgcgtcgtcctcacttcaggtaaggctgtgaatactcatgtattcagccacccttaaagaatagccaatgctctatttaactcccggtaaatcatgaaacatctgcgcttactcctgtattacgcactaacaggggcggcatcgcgccccagatttaatgaataaagattacgccagttgacgaagcatccgacgcagcggctccgcggccccccacagcagctggtcgcccactgtaaaggctgacaggaactctggtcccatattcagcttacgcaggcggcctaccggcgtggtcagcgtgccggtaacggcagctggggttagctcacgcatagtgatttcccgatcgttcggaacgactttcgcccacggattgtgcgcagccagcagttcttccacggtcggaatagacacatcttttttcaatttaatagtgaatgcctggctgtggcagcgcaatgccccgacacgcacacataaaccatctaccggaattacggaagatgtgttgaggatcttgttggtttccgcctgccctttccactcttcgcggctctgaccgttatcgagctgtttgtcgatccacggaatcaggctacccgccagcggcacgccaaagttatccaccggcagctcaccgctacgggttaaggttgtgactttgcgttcgatatcgagaatagcagaggacggggtcgcgagttcatctgccacatggccatacagatggcccatctgggttaataactcacgcatatgtcgcgcaccaccgccggaagcggcctggtaggttgcaacggacacccaatcaacaagatcattggcgaataaaccacccaacgacatcaacatcaggcttacggtacagttaccgccaacaaaagtcctgatgccattatttaatccgtcggtaatgacgtcctgattgacggggtcaagaatgatgatggcgtcatctttcatgcgcagagacgatgctgcgtcaatccagtaaccttgccatccgctttcacgaagctttggatagatttcgttggtataatcgccgccctgacaggtcacaatgatatcgagggcctttagcgcctccagatcaaaggcatcctgaagtgtgccagtggttccgccaaaagacggcgcagcctggccaagctgagaagtagaaaagaagacagggcgaatggcgtcgaagtcgcgctcttcaaccatgcgttgcatgagaacggagccgaccataccgcgccagccgataaaaccaacatttttcataagcgttttttcctgcaaagatgtgtgctgtataaatgtgccggtctcctcttggcacatctttcaccatacaaaaagcagccaaagtcgcaagtgaaattaatcaatgatagcgaagccatcagtaatgcgacttatcctgctttgttagcacgcagaaagtccgcggcaattatcagggaatttgagttatgaatgaaatcatttctgcagcagttttattgatcctgattatggatccgctcggaaacctacctattttcatgtccgtactgaaacatactgaaccgaaaagacggcgggcaatcatggtgcgagagttgcttattgctctcctggtgatgctggtgttcctgtttgcgggtgagaaaattctggcatttctcagcctgcgagcagaaaccgtctccatttctggcggcatcattctgtttctgatcgccattaagatgattttccccagcgcttcaggaaatagcagcgggcttcctgcaggtgaagagccatttatcgtgccgttggcaattccgttagtcgccgggccgactattctcgccacgctgatgttgttgtctcatcagtacccgaatcagatggggcatctggtgattgctctgctgctggcctggggcggcacctttgtcatcctgctacagtcttcgctatttttacgtctgctgggcgagaaaggggggaacgcacttgaacgcctgatgggattgattctggtgatgatggcaacccagatgttcctcgacggcattcgaatgtggatgaaggggtaacgaggagagtttttcgaaaagaacccggtagcgtcacaactaccgggcgaacaaacttaactcaacagctggaacgcaatcatcccaacgatggcaccgacagtgccgagaatggtttccatcatggtccaggttttcagcgtttcggcttcggtcgcgccggtaaatttaccgaacaaccagaaaccagcgtcgttaacgtggctgacaacaatcgaaccaccagcgatacaaatcgacagtgccgccatttgcgcaccagagtagttcagttgttcaatgactggcatcaccagtcccaccgccgttaaacaggctacggtggcagacccctgaatgatgcgcactgcagcggccagcacgaagcaggtgatagcaatcggcaggcccatgccggttaacgcttcgcccagtgccggacctacgccagagtcaaccagcacctgtttgaacacgccgcccgcaccaatcaccagcagaatgatccccgccggttgcagcgcgtgaccgcaaatctccatcactttgtcttttggcatgccctgacgcatcgccaggccataaatcgccaccagacaagcaaccagaatcgcggtaaacggatgaccaataaactcgaaccattcgtaagcggtagagccttctggcacaaaacgcgcggcaatggttttcagccccaccagcaccagcggcaacaggatcagcgacaggctgaatccgaaggacggcattttgccttcgccgagatgcggttcgctgatgtcgtcaggaatatgcaactccacgtaacggctgatgaaattaccccacagcggcccggcaataatcattcccggaattgccgcacacaggccaatcaggatcatccagccaaaatcggcgttcatctgcgatgccagcagcattggcgctggccctggcaccaggaacgccgccgctgccgccacgcctgcgaataatgggattaccagcttcaccaggttcgtaccggtgtggcgcgccattgagaaagcaacgctaatcagcagaacaatcgccacttcaaagaacagcggtagcgcacagaccagccccgcaaggccgatggcataatgcgcgcggctgtgaccgaaggatttgagcattttgacggcaatctgatcgactgcgccggtttcatgtaagatcttgccaaacatagctcccagggcgacaaccaccgccaggaagccgagggtgcctcccatccctttttccatcgtcgctgcgattttatcgagcggcataccggaaaaaaggccagcccccatggacaccaccattaaagccaggaaagcgtgcatacgcgccttcatgactaaaaacagcagcagtaaaacagaccctactgctgttaaaacaagcgttaatgtagtcactacttatttgccttttttaataacctcaatggtgcttgccacaacaccttccagcggttgatcgatatccaccaccagtacatcagtttcgtccgcacccggctcctgcagcgtttcaaactgcgtcaccaacatttgggttttaaagaaatggcctttgcgcgctttcaggcggctttcaatcacgtcaaaatcgcctttcaggtagatgaaagagagattcggattaccttcacgcagcaagtcgcgatagtgttttttcaatgcagaacagacgatcagtgacactttattagtgcgctgcatagcaaacgcggcgtcgttcagcgcctgcaaccagggtttgcgatcgtcgtcattcagcggttcgccagacgccattttttcgatattgcgccgtggatggaggaaatcgccatcaagaaacgcggcatgaagttgatgcgccacttcactggcgaccgcagatttgccgctgcccgatacgcccatcaagacgtaaatgtggtgatcatggttagtcgtgctcaaagtggtgcccccacaatacaagaattaaaaatgttacgggtaactgttatcggtaacattgtccagccggacaatatcagaagcaatatccatccgtgccttaagtgtataagtgtgagctacttcaaatttgtaggcttaaatagatccgcccggtgacaaggtgaaacctaaatctaacattttcggtgtcacagattcgccacgaatacgcgccagcaggcgttcagcgccaatactgcccatccgctcacgcggcgtcagtacgctcgccaaccgtggttccatcacctgaccaatgtcatgaccgtggaaaccggcaatcgccatatcgtcaggaacttttaaccccagacgctggcattcaaacgccgcgccgaccgccaggtcatcattagtacagaacacgccatccagctgcggatattcccgcctcgcctggcgaatcagttcaataccggaagagtaagaagaagattgctcaaccatcacgctatatggcaccaggtctgcatccagcatcgcctgttcgtatcccttctgtttgatgatagtacgttcgtcgagacgtgcgccgagataagcaatgtggcgatgcccgcgagcaataatggcggtggtcatctggcgtgccgcttcaaagttatcaaaaccgacggcaatatcgaggcacggcgacttgctgtccatcaactccaccaccgggatccccgccacttcaatcatctttaaggtgcgtggcgtgtgagtacgttcggtgaggatcagtccatcgatattccatgagagcatggattcgaggcgttcttgctccatttccggtttataaccgtagtgcgccagcatggtttgataaccgtgcgcgtcggtgacgctttcgattccgcgtaatacttccgcgaaaacctggttggtgagagaaggtaacaggacgccaatcgcccggctggtggcgttagagaggatatcgggcgcacgattgggaatataacccagttcatcaagagcggcggcaatcttgccgcgtagagcgacggaaacctgctccgggttacgcaaaaagcggctgaccgtcattttggtcacgcctacacggtcagccacatcctgaagtacgggtcttttctttttcatcgtcctgaaggtacaaaagagatagattctcttagtttaacacggacgcatcagaaccttcccggggaaaacagtgcttgtttacaattattagatatacactaaatcaattgcatcgcattgtgctaacgacgcggcaaaaccccggaagcgtgcatcagcacgcgaccggagcgagcgaggaagcctgcaaaaaggcaggcttcaaagatgccgttgagttttaaaccggcggcagatcgaacagtaacacttcgctgtcgctatccgcatggatggagattgcctgctcatcccagattgccagaccatcgctggtcgaggctttcacgccgttaatggtgacattgcctttcaccacctggatccagacgcggcgttcagcggcaatctgatgcaccgactgctcatctttcagcaacgcccaacgatacagttccatatcctgatgcactttcaatgaaccatctcgagcatccggcgagagcaccagctgtttgccctgtacggcatcgaagcgacgctgttcataacgcggcgtaatgccattttcttcaggcatgatccagatctgatacagatgcagacgctcggtgctgcttgggttgtactctgagtgacgaatacccgtacccgcactcataatctggaactcacccgccggaacctgctctttattgcccatgctgtcctgatgctcaacagtaccttccagcacgtaggtcaaaatttccatatctttatgtgggtgagtgccgaagccctgccctgcttcaatcacgtcgtcgttaatcacgcgcagcgcggagaagcccataaagttcggatcgtaatagttggcaaaagagaaagtatgccaggagtccagccagccatgatttgcatgaccacgttcatttgctttgcgtaagtagatcatttgtattcgccccctgaatgatttcgatgggcttagtgtggacccgatctgcctgggatgatagagggtgaaaattgacccctctgttcaaaaaaattgaactattcgaggggccatcaaacttacttcgcgagagtcactgtggagggagaggcttgctcgaatccgcgttcaaggatttccagattcgtaagaacttcagattccttgatgtaatttggcgcaccgtgggtgatggtttgatacaacgcatcataaacgcgcccgtaatcgcccatctccggcttaatctcttctctgaccgtcacgccctcgtcattgacatactccagcacaccgaccgaatcatccgctgagaatcccggttcgcccggcataatattagccttcaggctggtttcctgctggtcgataccatatttaataaacgaacctttcttaccgtgaacgataaatttcggataatcgattttcaccagatggctggttttgacgatggcttttagatcgccataaaacagttgcgcttcgaaagtatcgtcaggattggctttattgcgcaggctgcggatgtcataagcgacgtgatccgggcgaccgaacagagaaataatctggtccatcgtatgcacaccaaggccatagaacgcgccatcctgcggcaacccaggtttggtttctgcgaccgggcggtaatagtcaaaatggctttccacttcaacaatctctcccaacttgccactttcaatcgcttttttcgctgtcaggaagcaggagtcaaagcgacgattctgatacggcgtgacggtcagccctttgcttttcgccaacgcaaacagctctttcgcctgcgcaagtgtcggagtgaacggtttttcgaccagcacatttttcccggcttccagcgcgcgtttcgcgtactcgaaatggctgtccgcgtgggtgcagacaacaaccagcttaacatcgggatcgtttagtacttcgtcgagatcgctggtgaaatggatatgggaataaatgggagcctgttcttccggcttcgcatggcgacgaaaaatatgcgcgacatgccagctatccttgcggttaagtacatacggcagatggtaacgggtggtgcttttgccgaagccaataaaggcgcagttgatgaccatgatttcgtcctttttaaggtggttatttacaccttagcgcaaagcggacgtggttcctactggagtgcgcataacgaacacaagcactcccgtggataaattgagaacgaaagatcaaaaaaaaagccagcacccggctggctaagtaatactggaagcaatgtgagcaatgtcgtgctttcaggttctccgcgagggtcttcctgatcgcgagacaataataatcattctcattcgcacttgtccaacactttttgcaaaaaaatgcatttgactcgcatttgaaagtcaatgatgttgaaagggacatttaccccaaagaggacaaaggaatgagtgagatagtaatacgccatgctgaaacgcgcgattacgaggccatcaggcagattcacgcccagccggaggtgtattacaacacgctacaagtgcctcatccttccgattatatgtggcaggagcgactcgccgatcgtcccggcatcaagcaactcgtcgcctgtattgatggagacgtcgtgggccatctcaccattgacgtgcaacagcgcccacgccgcagtcatgttgccgattttggtatctgtgtcgactcccattggaagaatcgcggcgtcgccagcgcccttatgcgagagatgattgaaatgtgcgacaactggttgcgggtagatcgcattgaactaaccgtgtttgtcgataacgccccggcaattaaggtctataaaaaatacggctttgaaattgaagggactggtaagaagtacgcattgcgtaatggtgaatatgtcgatgcgtattatatggcgcgggtgaagtaagatagtgccctttttctgagatgggaaaagggtgtcattcaaaatcggcataccttcctttaatgtatttattttcccaatacatatattgagatttacctcataattacttcataaagtgtaatattttattttttaatatatacgcctacaatttcctggagtaaataaataacaattaacaagcataatagtgccattgataaaatagcatgccataaaaggacttttcagggatgagtaatattgtttacctgacagtaacgggagaacaacaaggaagcatctccgcaggttgtgggacttctgagtctacaggtaatcgttggcagagcgggcatgaggatgaaacatttacattctcactcttaaataatattaataatacggggcttggttcacagttccatggtataacattttgtaaattaattgataaaagcactccattatttattaattccattaacaataatgaacaattatttatgggatttgacttctatcgaataaatagatttggtagatgggaaaagtattattatatacaactaagaggcgcttttttatcggctattcatcaccagatcattgaaaaccaactggatacagaaaaaataactattagttatgaatttatcctctgtcaacatcttatcgcaaataccgagttcagctatttggcactccctgaaaattataaccgtttgtttttaccaaattcaaaaaaccaaacaaataatcgtttcaaaacgttaaacagcaaagctattggcaggctacttgctgctggtggcgtatacaatgggaacattgaaggattcagagatactgcggaaaaactgggtggagatgcaataaaaggctatgatcaaatactaaatgaaaaaacagcgggcatagcgatagcaacagcatctattcttttaacaaagcgttataatgttgatacatatacagaaataaatagttacttaggcaaacttagaggtcaacaaaaacttcttgatggtatagacataatagaaataatatacattaagagaccttcaaaagacttagctaacttacgaaaggagtttaataaaactgtaagaaaaaattttcttatcaaacttgcaaaaacctccgaagcatctggaagattcaacgccgaagaccttttaagaatgagaaagggcaatgttcctctaaattataatgttcaccataaactatctctagatgatggtggtactaatgatttcgaaaatttagtattaatcgaaaacgaaccatatcataaagtttttactaacatgcaatcacgaatagctaagggaatattagtaggtgaaagcaaaatcactccttgggccattccatctggctcaatttatcctcccatgaaaaatattatggaccacacaaaatgatgactaaaacccaaataaataaattaataaaaatgatgaatgatttagactatccatttgaagcaccgctcaaggaatcatttattgaaagtataatccaaatagaatttaattctaattcaactaattgcctggagaagttatgtaatgaagttagtattctttttaagaatcaacctgattatcttacttttttaagagcaatggatggattcgaagttaatggattacgattatttagcctctcgattccagaaccttcagttaaaaacctttttgccgtaaatgaattttatagaaataatgatgatttcataaaccctgatctacaagaacggttagtgattggggatgatagcatttcaatatttacttatgacattaaaagtaacttttttgaaattagagataatattggcacagaaaatatattcagttcgtttagtgatttctcttcattcttaaacgaaatcatggacagttgttcataataatcaaaaggaaacaaaaatcattgtaaaccatgccatctttttagagattaccagcagaaaattccttgttcgaaatttagcagtgcaagctatggaaaaacttacaacggaactacactccttaagtgagatggaccgaagacatgtagtctctattttagccgaaatagctaatggctatgatgattttaatgacatgttgatttatttagaattttacccgaatcataagattctgatatcttaaataagaaaatcccgttcgacgttctgaaaaagaaatcataaaatattagcagatacttatttcgtgactatatcttatccgatgaacttttttcaaaaccagcatttaataatatctttgacgaagatgaacgcgtctttgctcaatgtatcacacaggaataataatataacactcaacaataatatttattataattatgattacttatcacgacgcattcgcgaaagcgaaccattaccttgatgatgcagatctcccggtcgtcattactctacatggacgctttagccagggctggtatttctgtttcgaagcacgagaatttctcgaaactggagatgaggccgcgcgcttagctggtaacgcaccttttattattgataaagacagtggtgaaattcattctctgggaacggcaaaaccgctggaagaatatctacaggattacgaaataaaaaaggctaccttcggcttgccctgacaaaatagccctcttcccacgaagagggccgctaaccttagtaccccgccgttaaatcatccaccgagcgcgggtcggatgcgccgtacaactcaccgtccggcccaaccataatgctttgtgtactgcccatcgcctctttcagcgccactttctgaccttttgcttccagcagcttgagcgtatccgggctaaaccctttttcgacacgcagctcgtccggcaaccactgatggtggaaacgcggcgcattggtcgcttcggcgacgttcaagccataatcgatgctattcaccaccatttgcagcactgtagtgatgatccggctaccgcctgggctaccggtaaccagccaggttttaccgtctttcaccacaatggtcggcgacatcgacgacagcgggcgtttgttcggcccgacggcgttggcatcaccgcccaccagcccgtaaacgttcggtacgcccggtttggcggagaaatcatccatctggttattaagcagaataccgctctcgcccgcgacaatgcccgtaccgaaggtggtgttcagcgtataggtcaccgctaccgcgttaccatctttatccaccactgagtaatgggtagtttgattactctcataaggcgcaagcttgccggggcgaatttcgctggatggcttcgctttattgatatcaatttgatcggcaatagatttggcataggctttattggtcagcgcctgccacggtactttgacaaaatccgggtcgccaagatattccgagcggtcggcgtaggcgtatttctccgcttctgccatgatttgcatcgcatcggcgctgccaaagccgtatttcttcatatcgaagttttccagaatattgaggatttgtacgatatggatcccgccggaggatggcggtggcatggagtaaacctgatacccgcgataatcgccgcttatcggagtgcgttcgaccgctttataggccgctaaatcttctttagtgatcaagccaccgtttttctgcatctcctgggcgatctgttccgcaatcgtgcctttatagaattcgtccgggccgttttcagcaatcatctccaggctctttgccaggttcgcctgcaccagcgtgtcgccctttttcagcggctcgccctctttccagaagatagctttactgttttcgtgattcggcaacacttcgctaccgtaggttttgagattgtcagccagcgcgtcgttaacgataaaaccatcgcgtgccagtttaaacgcgggctgcacgactttgttcagcggcatggtgccgtatttatccagcgccagcgagaaacctgctaccgtacccggtgtgccggaagccagatgcgaagtgagtgattttttgctgtccgggttgccctgatcatcgaggaacatatcgcgggtcgctttggcgggtgccatttcgcggaaatcgatagccgtggtattgccatttttcgagcggattaacataaaaccaccaccgcccagattccctgcctgcggatgcgttaccgccagcgcgtagcccaccgccacggcggcatcaacggcattcccgccctccttgaggatatccacccccacctgagtggcagtggcgtccacagacgctaccattccctgtttcgcgcgtaccgggtggaagacatcttcctccacaccatacgagacgggcggcgcaggaggcgcggcggcggcgctaaaacaacttcctgagagcagagcagcaatggccacccggcgtaaaaacgtcggttttatcatcgttattctccagagattaaggggcaaccccagctaagcctggtatataactctgaattaatcatcgttttgtcgggaagcgagtaaacttaaaggatatcttcagaggaggatacgcgatgaaacgacttctgattcttacggcactcctgccgtttgtcggctttgcacagcccattaatactctgaacaaccctaaccagccggggtatcagatacccagccagcagcggatgcaaacccagatgcagactcagcaaatccagcaaaaagggatgctgaatcagcaactgaaaacgcaaactcagttgcaacagcagcatttagaaaaccagataaacaataattctcagcgggtgttgcagtcacagccgggggagcgaaatcccgcccggcagcaaatgctgcccaacaccaacggcgggatgttaaacagcaaccgtaatccggatagttcgttgaatcagcagcatatgctgccggagaggagaaacggcgacatgctgaatcagcccagcacgccgcagcctgacattccgttgaaaactattgggccgtaaagttcggaccaatcacgtcaatcgcatcggtacagatgcaatccacgccccagcgcagcaactctgccgcgcgctggggtttattgacggtataaaccagaatccgcagtccggcgtctttcaactgcatcactcgcactttatcgagtaacttatgattgagatgaatagagacgcagcccagccgcgcggtcagttcgcgccagtcgtcgcgccactcatccagcaacaaaccgcgcggcagttccggtactgcctgttgtgcggcttctaaagcatcaatctcaaacgatgacagcagcggcggcgtcataccggcccacagttggcgtgccgccagcgccaccattttgcccgttaatggtccagtgccagtggtgggtttgatttcgatattcgccatcatcccgtgttcacgacagcgttccgccacctgcgaaagcaacggtagcggctcacctttaaacgctttgctgtaccaactgcccgcatccacgcgcagtaaatcctgccagttcagttcacccgcgacgccccagccgttgctggtgcgttcgagattgtcgtcatggagcaggaagatctcgccatctttcgataacttcgcgtcaaattcgatcatcttatgaccgtattttgccccgacgtcgattgccgccagggtgttttccggggccagcttaccgccgccacgatgagcgacgatgcggggataaggccagttactcatactcgttgtcctgtttcaccatcaaaaagatgcagctgattttccgccagatgcagccacagcgtgctgcctgccgtcgggcgctcctgatgcgccagtcgcaccaccagcttctgctcgccccagcgtccgtgcgccaggttatctgcgccgaggatctccagcgtgtccatcaccatcggtacgccgccttctgcctgcgagcttagcgcaatatgttccgggcgaatgccgagagtcattttacgcccggcatactgacggtagccaccgtttagcggcagctcaataccgccgtccagttcgaaatgcgtgccttcgttattcacgcggcctgtcagcaggttcatcgccggactgccgataaaactcgctacaaacaggctggcgggcttttcgtagacttcaactggtgtgccaatctgttcggcaacaccgccgttcatcaccattactcgctgggcgagcgtcatcgcttcaacctgatcgtgagtaacgtagagtgaagtcgttttcaggcgacggtgcaactgttgcagttcaagacgcatctgcacgcgcagcttggcatcgaggttagagagcggctcatcaaacaggaacaccgccggatcgcgcacaatcgcgcggcccatcgccacacgctggcgctgaccgccggaaagctcgcgcgggcgacgtttgagcagaccgtccagctccagaatgcgcgccgcttctttaacgcgctcggcaatttgctgcttgcccatgccgcgaattttcagcccccacgccatgttttcttcgacactcatatgcggataaagcgcgtagttctggaacaccatcgcaatcccgcgatcttttggctccatttcagtcacgcgctggtcgttgatccagatatcgccttctgtcacccgctccagcccggcaaccatgcgcagcagcgtcgatttcccgcagccagacggcccgaccatcacgataaattcgccatccgccacatcaagggtcagcggtttaatgacctgggttttaccatcccagcttttggttactgcctgtaatttcagtcctgccatcttatttctcactatcgaccaggccgcgcacgaaggcacgctgcatcactaaaacaatcaccaccggagggataagcgttaacaacatcgccgccatcactgagttccattccgtggtgccttcgcctgtagcgatcatccctttgatccctgccacggtggtgccgagatccacatcggtaataatcaacaacggccacaaatactgattccagccgtagataaaggtgatcacaaacagcgccgccagattagttttggagagcggaaaaacgatgtcgcaaaagaagcgcattggcgatgcgccgtcgatccgcgcggcttccaccagctcatccggcagcgtcataaagaactggcggaacaggaaagtagcggtcgccgaggccatcagcggcagcgttaaaccggcgtagctgtcgagcatctgcaggttggcgatgacttccaccgtcgggaagatacgtacttcaaccggcagcatcagggtgataaaaatcatccagaagaagaggttacgtagcggaaaacgaaaccagacaatggcaaatgccgagagcatcgagacggtaattttgccgagcgtaatgctgaacgccatcacaaagctgttaagcaacatccgccagaacggcgcgctattcgtgcctaccccgttcacccagatgttgtggatgttttccagcagatgtgtgccggggatgagcgtcatcggcgcggcatagacggcctgtttatccagcgtcgccgcgacaaacgccacgtacagcgggaagaggatcaccgcgatcccgaggatcagcatggtatggctgaatatcgtcagccacggacggttctcaatcattggtaacgcaccttgctttcaacatagcggaactgcaccaccgtcagcacgatgacgaggaacatcaacaccaccgactgtgcggcagacgaagccagatccagtccggtaaaaccttcgcggtagatcttataaatcagcgtcgtggtggcctgaaccggcccgccggacgtggcggcgtcgatcaccgggaaggtgtcgaagaaggcatacaccaggttcactaccagcaggaagaaactcaccggggcgataagcggcagcgcaatcttaaagaagcggcgaatcggccctgcaccgtcgatggctgcggcttcgatcaacgaacggggaatggattgcagcgcggcatagaagaacaggaagttgtagctgatttgcttccatactgaggcaaacaccaccagaaacattgcctgaccgctgttttgcgcgtggttccagtcgtagccgaactccgcgagaaaatgggtgatcagcccgcgaccggggttaaacaggaagatccacaatacggcggcaacggcgggagccacggcgtaaggcagcaacattaaggtttgatagaaacggctgccgcgcacgatgtactccaccagcgccgcaaagaacagcgataccagcaaaccgctgacggtgacaaaggtgctgaattttatcgtcgtccagaaggagtcgagatagtagctgtcatggaacagcgtgacgaagttatccaggccgacaaactggctggagaaaccaaacggatcgacgctttgtagcgagtaccacaacgcttcgcccgcaggccagataaaaaagataacggtgatgatgagctgcggcgcgaccagcagataaggcagccagcgcgagcggaacaccggacgggatgatgacattacggttaattcctgaactgtgccggatgcgcttcgcttatccggcctacacgcgatgccaggtcagataagcgaaacgcatccgacattacactgattaagacttcgtcgatttctcaaagcggcgcagcaactgatttccacgctcaacggcggtatccagtgcctgctgtggtgtcttcttaccggtccacacgctctccagctcttcatccacaatcacgcggatctgcggcatgttgcccagacgcagccctttggtgaacggcaacggcggcttattcagcatctgacgcgtcgcggtatccgcccctgggtttttctcataaaagccctgctcacgggtcaggtcatacgctgctttggtgattggcagataaccggttttctgatgccactcggcagcgttttctggcttcgcgaggaaatcgaggaacttcgccacaccggtatacgtttctttatctttaccctgcatcacccacaggctggctccgccgataatggcgttttgtggcgcatctttcgcatcggcgtcgtaaggcatcatgcctacgccgtagttgaatttggcgtactcgcgaatgttggcaagagaaccggaagaggcggtggtcatcgcgcaatcaccgttatagaacttctcggtggattcatccttacgaccgacgtagctgaagtcgcccttcttgttcatctcttcgagcatggcgatgtgtttcacctgctccggcttgttgaactccagcaccgcgtccgtgccgtcaaagccgttgtttttgctggcaaacggcagaccgttccaggcgctaaagttttccagttggatccagccctgccagccgctggcgtagccgcacttcatgccggaggctttcagtttcgcggcatagtccgccagatcctgccaggttttcggcggttgttccgggtctaatcctgctttcttgaaggcgtctttgttgtaatagagaacgggggtcgagctgttgaatggctgggagagtaagtggcccgttttgctgtcggagtagtaaccggaaaccgtcggcacaaactgcgactcatcgaattgaatccccgcctctttaaacacgtcatataccggtttaatggctttcgatgccatcatggtggcggtgccaacttcataaacctgcaaaatagccggagcgttgccggtacgaaatgcggcaatccccgcgcttaaattctgttcgtagttgcctttataggtcggtacaattttgtaatccggattttcggcgttaaaacgttgggccagagaatccacctctttacccagttccccttccatagaatgccagaacggaatggtcgtcactgcctgtgcattccccattaacgccagtccgagcgccagtgctgaagctgtataatgtaacggtttcatcgtttatctctcttgttgtaccgaatgcgcgaattcacgcgttttatgctcgcggggtaacatgacatgctcgaattacagaaaaataacttttttgttacatttgtaagatagtaaggtgtcagaaagatgacaaggcggtgacggcgtgggtgagggaaaatgggagatggggcacggataagcggaaaaatagaaggtctgaatcaaactctacagattactcatcgtttcatgccagatgcggcgtaaacgccttatccggcctacaagatcgtgcaaattcaatatattgcaactcacccagtaggcctgataagcgcagcgcatcaggcaattttacatttgtcacctgtctcaaaggagtcttttgactccttatcaatcaacgtgttattacccgcctaaatacgcacttctcactgcttcgttcgccagcagcgcgtcgccggtatcggagagcaccacatggccgttttccagcacgtagccgcgatccgccagctttagcgcctggttggcgttctgctcgacgaggaagatagtcatcccctgctcgcgcagctgctcgatggtgtcgaaaatttgctggatgataatcggcgcaagaccgagcgatggctcatcaagtagcagcaaacgcggattgctcatcagcgcgcgaccaatcgccagcatctgctgttcaccgccggacatggtgcccgcccgctgaacacggcgctcatgcagacgtggaaacagttcatacacccactttatgcgctcctgaaactggtcacgttcggcaaagaagccgcccatcgccaggttctcttccaccgtcatccgcgagaagacgcgacgcccttccgggacaatcgctaccgcttcgcgcatgattttcgccgtctgccagtcggtaatgtctttatcatcaaacacaattcgcccgctggtggcgcgcggatcgccgcataacgtaccaagcaaggtggttttccccgccccgttcgcgccaatcagcgtgacaatctcgccctgattgatatgcaagctcacctcatgcagcgcctggattttgccgtagtgggcgctgactttgtcaaaggacaacatgactttttccatcttatgcctcacctaaataggcacggatcacgtccgggttattacggatttgctccggcgtaccgtttgccagtggcgtcccctgattgaccacgtaaattcggtctgaaatccccatcaccagcttcatatcgtgttcaatcaacaagatagtggtgttgtgatgattgcgcagttcggcaatcagctcatccagctctttcgtctctttcgggttaagacctgccgccggttcgtcgagcattaaaatctccggctgcgtcaccatgcaacgggcaatctccagacggcgttggtcaccataggccaggttactcgcctgacggttggcgtgttccagcaaaccaatgcgctcaagccaggtggcggcgcggtcgagcgcttcgctctgggcgcgacggaaagaaggcgttttcaacaggccagagaacagcccggttttcagttgctgatgctgcgccaccagcaggttttcaattaccgtcatttcacggaacagacgcacatgctggaaggtgcgcaccacgcccatgcgggcaatttgctgccccggtaaaccttcaagatgctgatcgcgcagtaaaatggtgccgccggtgggtttgtagaaaccggtcaggcagttaaaaaccgtggtttttccggcaccgttagggccgattaacgagacgatttcctgcgggtacagttcaagattgacgttgttcaccgccagcaggccgccgaagcgcatcatcagaccgttaacagataataatggctgactcatgcctgctctcctttcgctgcgccgtttttcagcttcagttgcgggcgcgtcatgggcagcaagccctgcggacgccagatcatcatcagcaccatcaaaccaccgagcattaacatgctgtattcgttgaaatcacgcatcaattcgcgcgacaccaccagcaaaattgccgccagaatcaccgcaaattgcgagcccataccgccgagcaccactatcgccagcacaaacgccgattcggcaaaggtgaaggattccgggctgacaaagccctgacgcgccgcaaacagcgttccggcaaaaccggcaaacgcggcgctgatggtaaaggcggtcagcttgatacgacgcgggcttaagcccagcgaacggcaggcaatttcatcttcacgcaatgcttcccacgcacgccccagcggcatccgcagcaggcggttaatgacaaacaggcttagcaccaccagcagcaacgccaccagatacaggaaaatgacgcgatcggagggatcgtatttcaggccaaagaaattactgaacgtgtcccagccgccttcacgagcggtacggctgaactcaaggccgaagaaagtcggtttcgggatctgactgattccgttcgggccgccggtaatttcggtgttattgagcagcaatatgcgcacaatttcgccgaagccaagggtaacgatcgccagataatcaccacgaagacgcagcaccggaaagccgagcaggaagcccgccgccgctgccattaacccggcaatcggcagacaagtccagaagcccaagccgtaatagtgattgagcagcgcaaaggtgtaagcgccgatggcgtaaaaaccgccgtaccccagcaccagcagaccagaaagaccaacaaccacattcagcccgagaccgaggataatgtagatcatggtcagagtggcgatatccaccgtcccacgtgacaccataaacggccacgccaccgcaagcaccagcagcgccacgaggaacagtttctgcttcaccgtggagccatcaatggcgggcagaataaacttcggtccggaaacacttttcaaccctttctggaaagcaggtcgcaaaagctgaaagaaaaagaccaccgccgtgccgataaacacccactgccaacggacatccgaagcgctgtcgaccaccagtttggtgccatccagctccagttgcacgcccataaagacgccagcgaggacaaagaacatcgcggcagagagcagcgccattgcaatatgcatcggtttcatactttctctacctccgggcgacccagaataccggtcggcatcaccagcagcaccagaatcagcagggcaaatgaaaccacatccttatattccgtactcagataggcagaagagagcgcctccgcaatccccaagatcagcccgccaatcatcgcccctggaatgctgccaatcccaccgagcaccgcagcggtaaaggctttcatcccggccataaagccgatataggggttaatgacgccatagaactgaccgagcagtacgccagccactgccgccatcgccgcgccaataacaaaggtcaaagcaatcacccggtcggtgttgatgccaagcaggctcgccattttcagatcttccgcgcaggcacgacaggcgcgccccatacgggaatagcgaatgaaaatcgtcagcgccagcatggcgaggaaggtgacaatccagatcaccgcctgcatggtggtaatagaggcagagaagttttcgctatggcccaccacccactgaccgttaaacaggctgggcagcgccacatcgcgcgaaccttcggtcaggctgacgtagttttgcaggaagatggacataccgattgcggaaataagcgcaatcaggcgcttagaattacgcaccgggcggtaagccacccgttcgatactccagccgtaggcgctggcaatgacgattgcgccgacgaatcccgccgccaccagcagccagccggtatcaatgcccatcatcatcagcgcggcgatgatcataaatgagacgtagctgccaatcatataaacctcgccgtgggcgaagttgatcatgccgataatgccgtaaaccatggtgtagccgatggctatcagcgcgtaggtactgcccagcgtgacgccgttaaacatctgctgcaagaaatacaaaaactgctcagacataaggtaacctttctaaacccgcccgcattttacgggcggtgggatgatcacttggctgccgtggatgaaccgtcggcgtgccactggaagacaccaaaatcaaatcccttaagatcgcctttttcatcccagttcagcggcccaatcacggtgtttgcaccgttagcttttaaatctttcaccagcgccagcggctcatcgctgccagtacgctcaagggcagtcgccagagattgcaccgccgcgtaggtgatccagacataaggcccggacggatctttcttgtctgctttcagcgcatcaacgatgccctggtttgccggatcctggtcatagcgttttggcatagtgaccaacatgccttcggcagcatcaccggcaatattcgacaatgatgcgttacccacaccttccggccccataaactgagttttcaggccaacggaacgggcctggcgcagcatctgccccatttccgggtagtaaccgccgtagtaaacgaagtcgatgttttcttttttcaggcgggcgatcagcgcggagaaatctttctccccggcggtaatgccgtcgaagaagacgacgttggcgttagccgctttcagcccgtcctgcaccgaacgcgccagcccttcgccatactgttgtttgtcgtgaatgatggcgatgcgctggggcttcaccgtctcaagaatgtattttgccgccgttggcccctgggaagagtccagcccggcagtacgcatgatgtgttgataaccgcgttgggtcagttccggattggtcgctcccggcgagatcatcagaataccttcatcttcatagatatctgacgcaggttgagtagaagaagaacacagatgaccaataacgtatttaatgccgtcattaacgattttgttggcgaccgcaacggcttgtttcgggtcgcaggcgtcgtcatattccacgccaaccagcttatcgcccttaattccccctttggcattaatgtctttaattgcctgacgcgcgccgttaaattccatatcgccccactgggcaatcgggccggacatcgcgccgacaacggcgactttaatatcgtcagccatagcggtgtgtgaaattgccagtgcaatcatccctgcgatgatagttttcgcattccgtttcatagtcaaaaatccccattcgtgatgttgtgttgctttgtttttatgtgttaacaaatcagactgttctttttttatactgcactgtttttgcctgtttgattaagggtttagcgcagtattttgtgataatagcgattaaaatccctatttttcagtcgattaagaacagataatattctgaatttattgatagataaacagaaaaaagcgccgttgtcagcataaaataacggcacaaagggcggaataattcactaccattcaggggattatgctgggtatttttcattctctaatgttttaactttgtaattattgctgttaaaaaattaatcacctgccaaaagaaataaaaaagagaaagcctccgattaaattatttcgctacactggttccacttttgtgatttacacgggttacccatgaagctgaccatcattcgattagaaaactttagcgaccaggaccggattgacctgcaaaagatctggccggagtattccccttcctctttacaggttgacgataaccaccgtatctacgccgcgcgttttaacgagcgtctgcttgcggccgtgcgggtaaccttaagcggcaccgagggagcactggattctctacgcgtgcgggaagtcacccgccgtcgcggtgtggggcaatatctgctggaagaggttttgcgtaacaatcctggcgtttcatgctggtggatggcggatgcaggcgtggaagatcgcggtgcgatgacggcgtttatgcaggcactgggatttacggcacaacagggcggctgggagaagcgttaatcgtcaagtttgatttcaaaagtgatgaccaacgagaaattgcctgatgcgctacgcttatcaggcctacaatgtgtgctgcaatttactgatttctttggatcttgtaggccggataaggcgtttacgccgcatccggcatgaagcaacgtactcgatattagcaatttggcggcaacccaaagatgccgattaatgattacttcgcatcggtcgccgtgccgttggcgtgccagtcaaatacaccgaactcaaagcctttcaggtcgcctttctcatcccacgtcagcggtcccattacggtatccacggagttcgctttcaggtatttggcgatttcagccggatcgtcagactgattcaggcccgcctgcaaagattgcagcgcggcgtaggtggtccaaacgaatgcgccgcttgggtcctgttttttcgctttgatcgcatcaacaatgggtttgttcgccggaacctgatcgtagttcttcggcttggtcaccagcagcccttccgctgattcgcccgcaatgttagacagcgaaacgttagccacaccttccggccccataaactgagttttcagccctgccgcgcgtgcctgacgcaggatttgccccatttccgggtgataaccgccgtagtaaacgaagtcgatattctcttttttcagacgcgccaccagcgttgagaaatctttttccccggcggtgataccatcaaagaacaccacgttagcattgcctttcttcaggccgtcctgcaccgctcgcgccagaccttcgccgtattgctgtttgtcgtgaacgatagcaatacgctgcggtttcactttctcaagaatatatttcgccgccgtcggcccctggtcggagtccaggccggtggtgcgcaggatcagctgatagctacgggcggtcagctccggcgcggttgccgctggggtgatcattaaaatgccttcgtcttcgtagatatcagacgcaggctgcgttgatgaagaacagaggtgaccaatcacgtatttaatgccgtcgttaacgactttgttcgccaccgcaaccgcctgtttcgggtcacaggcatcgtcatattttacgatttgcagtttgttgcctttaatgccgcctttagcgttgatatccgcaaccgcctgctctgcgccggtaaactcctggtcaccgtactgggccaccggaccggacattgcgcccacgaccgcgactttaatatcttctgccagagccatattgctgaatgccagcgcgatacatcctgccagtaacgctttaccctttatgttcatcctgagaatccccattcttctggttattacgtgtgttgtgatgttgttgttcagcactttatttcgttttatgcatgactacccgtgctttagcagcatactctgctaaaacatacccgatttttatgatattggaatagctattttgacagtttattaacaatctgcgtggggattggcgttttgccggaggggaaattgattattacagaggcccaaaaaacaaaaaccccggactcgcatccagggttctctgcttaatagcggaaattacgcttctatagcagcacgcaattttttcatcgcgttcttttccagctggcgcacacgctcagcggaaacgccgtaacggtcagccagttcctgcaacgtggacttgttgtcttcgtccagccagcgcgcgcggatgatgtcctggctacgctcgtccagaccttgcatcgcgtcggtcagacggtttgccgcctgctcttcccagttatcatcttcgatgccgtcggcaaagttagatgatttatcctgcagatagagcaccggtgccatcggctggctgtcggaatcgtcgtcggaagacaggtcaaaggtcatgtcctgtgccgccatacgtgattccatctcacgaacgtctttgctggttacgcccagttcacgggccaccatttcgacttcatcctggttaaaccagcccagacgctgcttggttttacgcaggttgaagaacagtttgcgctgcgctttggtggtcgcaactttgacaatacgccagttacgcaggacgtattcgtggatctctgctttgatccagtgaacggcgaaggagaccaggcgcacacccacttccgggttaaaacggcgcactgctttcatcaggccgatgttaccttcctgaatcaaatccgcctgtggcaggccatagcccgcataattacgagcaatatgaacaacaaaccgcaggtgagacaggatcagcgttttagctgcttccagatcgccatggtaatgcagcttttcagccagcgcccgctcctcgtcagccgacaacatcggccacgcgttagctgcccggatgtaggaatccaggttgccaactggggctaaagctaaactttgcattttgtcagtcattcaaatcctctcaatcgatatcttctggcgcttcagtggtagcaacaactgtgccagagcttaagagcaacgaggttatcattcactgttttatcagaccgtgattttatccacaagttcaatgcaagcttgtgaataaattacgcacaaaatgtgacatagagatgaaataccgggaagagacaacggggtctctttccctgctacggaacccattgcagggaaagagtataacacgcttttattattcaggcgtaaagtggcgtaaatgttgtaccgtggcaagccacgctgccacccagccaatcatcgagcataccagcagcaacagcaggcattcatcgaacgataaaccattgatatcaaacttcgttccgaaaacctgtgccacttccgcaaccgccgatgacaatcgcagtaccagaatttctgacaaaattagtgacaacaatgcgccagaaaatcccagcagtgcgccaccgtacaggaacgggcgcaggatgaaaccatccgtcgcaccaatcagtttctgcacgttaatggagtcacggcgagcaaagatgctcagacgtacgctgttgccgatgacgaggaacacggccgccaccatcaatacgccgatcatcgccgaaacgcgcccgaccagcccagtcaacgccgccagacgggcaaaccagctgtcatccatccgcacttcgtcaatgccgttaatctgcgtgatacgatcacgcagcgtattgagtgattccgtcccctgaaaatcgagtttcgggatcaccaccgccactgccggaagcgggttttcttccagcatatccagcgcaccaccaaaaccagaccagttacggaactcgcccagtgcgtcttcacgagaaagatagttcactttctccacgccttgctcggcctgcaactgtgccaccacgcccgcagcggcgtcatcgtccagcgttttttgcaagtaaacagtgatttgcggtgacggataatactgcgtcgccgcctggttaacgtttttgtacaccatataacagacgctgggcagcgtcagggagatggcgataaccatcaccgttaaaaatgtggcgaacggtttgcttttcagatcctgcaatgcgccgtggaaggcatagcgcacctgttcgttgaaaacgttggttttgcgatttaccggttttggcgaggatttcgcgcgtttcggtgcgttacgaccgccatcgcctgagccgccgaccgatttacggaagcgatccagacgcccgccaaactgccgaatatgattgattgcatcgcgcttattcatggcccacgcctccatgcaagtgaccatcgctcagggtgagcatgcgataggaacgccgtgaaatcaggttgaggtcgtgcgttgccatcaatacggttaccccaacgcggttaaactcttcaaacagacgtagaatcccttccgacaacgcgtcgtccaggttaccagtcggttcgtccgccagcagtaccgcgggcttattcaccaccgcgcgggcaatgccaacacgctgttgttcaccgcccgaaagctgaatagggaagttcttcgctttgtccagtagcccgactttatccagtgccgccgacacccggcgacgaatatcgtcaccgctggcaccagcgataatcagcgggatcgccacgttatcgtagacagtacggtccatcagtagatggtgatcctggaaaatcatgccaatctggcggcgcagaaacggaacttcacggtttttcagacgcgtgatgtcatggccgctaaaccagattttcccggcgctgggccgctcaatcccacagatcagcttcaggagggtacttttccctgcgccggaatgaccggtcagaaacgccatctcacccggctgcatatggaacgtaacgccctgcagcgcctgtctcccaccgagataagccttgctgacatgttcaaagcgaatcattgttaatcctctcgggcaaaaagtgcctctataaagtcgtccgccttaaacggacgcaaatcctcaatacgttcgccgacaccaatgtagcggatagggataccaaactggtcagccaccgagaaaattaccccgcctttcgccgtgccgtccagtttcgttagcgtgatgccggttaaaccaacggcttcatggaacagtttggcctggcttaccgcgttctgcccggtgctggcatcgatagtcagcataacttcatgcggcgcttcaacgtcgagtttcttcatcacgcggacgattttcttcaactcttccatcaggtgcgatttgttctgcaggcgtccggcggtatcggcaatcaggacgtcgatattacgcgctttagctgcctgaatggcgtcgaagataacagaggcggaatccgcaccggtatgctgggcaatcaccggaatattgttgcgctgaccccagacctgaagctgttcaaccgctgctgcacggaaagtatcgcccgccgccagcatcaccgatttaccctgctgctcaaactgacgtgccagcttaccaatcgtcgtggttttacccacaccgttgacgcccaccatcaggatcacgaacggcgttttaccttcaacattcagcggctcatcgactttcgccagaatctcgcccatctcttctttcagcaggccatagagcgcctcggcatcacgaagctgcttgcgggatgcgccttccgtcagattggtgataattttacgtgtggtttccacgcccacatcggcgatcaaaagctgttcttccagctcttcaaacagatcatcgtcgatttttttaccgcggaacaggctgataaatccggaaccgagattttctttggtttttaacaggctgcgtttcaggcgcgcgaagaaaccttctttggtcggtttttcctgctcctgagcgatttcttccaccggctgctcttcttctgccggaggaaccaccatcaccgcctcttctgccgcttcggcagccagcgcctgtgcttccagctcttcgtcggtgatttcttctttagccgcttcttcttccgccgcttcgacaatctctacggtttccgcttcagcctgccactcttctggcgaaacctcttcggcgttgacgtcttccggcaacggcagctcttcacgttcgatagccactggctccggcgtttcttctacgaccggttccggctgtgcaacgacttccgcttcaggctgcgctttttcactttcagcaacctgttcagtgacttccacaacttcggcagcaaaagtttccgcttcggcctcagtatgcgcctgcggctgctcttcaacggcgtgttccgaagccttcgcaggctcttgcgcctgaacgatttcttctacaaccggttgttcattctgaacttctgtctctttttccggggtctgctctttttgaccaaagcccagccaggaaaaaaagccacgttttttttctttcgccatttgcgactacactcctcgctgttgcttcatggcacagcgttaacgctatgtacatagcagctaaaaaaatgatgaaatagtctatcacttaacttaattcacatcaccgcctgcaagtatgtgttatctggcggattgagcaatttatcatgaaaaaaccgaatcattccggcagcggccaaatccgcattattggcgggcagtggcgaggccgtaaactcccggttcctgatagcccaggtctgcgccccaccaccgaccgcgtacgcgaaacgttgtttaactggctggctccggtcattgttgacgcccaatgtctggattgcttcgccgggagcggcgcgctggggctggaagcgttatcgcgctacgctgcgggggcaacgttgattgagatggatcgcgtggtttctcagcagttaattaagaatctggcgacactaaaagcaggcaatgcacgcgtggtgaacagcaacgcaatgtcattcctggcgcaaaaaggcacaccgcataatatcgtgtttgtcgatccaccgttccgccgtggcttgttagaagagacgataaatttactggaagataacggctggctggctgacgaagccctgatttatgtcgaaagcgaagtcgaaaacggtctgcccactgttccggcaaactggtcattacatcgggaaaaagtggcgggtcaggtggcttatcggctgtatcaacgcgaagcacaaggagaaagtgatgctgattaatattggtcgtttgttaatgctctgcgtttggggatttttaatcctcaatctggtgcatcccttcccgcgcccgctgaatattttcgttaacgtggcgctgatttttaccgtgctgatgcatggtatgcagctggcgctattgaaatccactttaccgaaagatggcccgcagatgaccaccgccgaaaaggtacggattttccttttcggcgtgtttgaactgctggtctggcagaagaaatttaaagttaaaaaataaccttattgttcgcctacaaagctgacaaagcgcgttcctttatagctcagcgtacctttatagctcagcgtacctttatcgcccactgtcagggcgtggtactgctgggcgtcgaggcgaaacgtctgctccattcctccgctttgcggtttgaagcttgcctcatagcgcatactggtgcctgccggagtcacttcctgctggcgcgaacggcgatcgttaatcggtttttcccgcttgttgctcaccaccaccagcttttgctggagcggagccatatcattatcagctttttcccgtcgctgttgcataaaacgaaacgatgcggcgacgatgattaagccaatgataacaataaagaaaagaggtggtttactcatctttatccctcatcggaaaatgcggaattaagcataccctgccagttatggtgttgtcatccgtccaccctcgccactaaactggaagcaagaccgtaggcattccgcttacgaaaaaataacgaattcaaggaactaagatgctttggtcgtttatcgctgtctgtctttccgcatggctatctgtggatgcatcgtatcgtgggccaacctggcaacgctgggtgtttaaaccgttaacccttcttctcctgctgttactggcctggcaagcgccgatgttcgacgccattagctatctggtgctggcagggctgtgcgcctcactgctgggcgatgcgctaaccctgttgccacgtcaacgtctgatgtacgccatcggcgcgtttttcctctcgcacctgctgtacaccatctatttcgccagtcagatgacgctctctttcttctggcctctgccgttggtactgctggttctgggcgcgctgttactggcgattatctggacgcggctggaagagtatcgttggcctatctgcacgtttatcggcatgacgctggtgatggtgtggctggtaggtgaactgtggttcttccgtccgaccgctccggcgctctctgcgtttgtcggcgcttcgttgctgtttatcagtaactttgtctggctgggtagccactatcgccgacgcttccgtgcggataacgcgattgctgcggcctgctactttgccggtcacttcctcatcgtccgctcgctgtatctctgataaaacttgactctggagtcgactccagagtgtatccttcggttaatgagaaaaaacttaaccggaggatgccatgtcgactcctgacaatcacggcaagaaagcccctcaatttgccgcgttcaaaccgctaaccacggtacagaacgccaacgactgttgctgcgacggcgcatgttccagcacgccaacgctctctgaaaacgtctccggcacccgctatagctggaaagtcagcggcatggactgcgccgcctgtgcgcgcaaggtagaaaatgccgtgcgccagcttgcaggcgtgaatcaggtgcaggtactgttcgccaccgaaaaactggtggttgatgccgacaatgacatccgtgcacaagttgaatctgcggtgcaaaaagcgggctattccctgcgtgatgagcaggccgccgacgagccacaagcatcgcgcctgaaagagaatctgccgctgattacgctaatcgtgatgatggcaatcagctggggtctggagcagttcaatcatccgttcgggcaactggcgtttatcgcgaccacgctggttgggctgtacccgattgctcgtcaggcattacggctgatcaaatcaggcagttacttcgccattgaaacgttaatgagcgtagctgctattggtgcgctgtttattggcgcaacggctgaagctgcgatggtgttgctgctgtttttgattggtgaacgactggaaggctgggccgccagccgcgcgcgtcagggcgttagcgcgttaatggcgctgaaaccagaaaccgccacgcgcctgcgtaacggtgagcgggaagaggtggcgattaacagcctgcgccctggcgatgtgattgaagttgcggcgggcgggcgtttgcctgccgacggtaaactgctctcgccctttgccagttttgatgaaagcgccctgaccggcgaatccattccggtggagcgcgcaacgggcgataaagttcctgcaggagccaccagcgtagaccgtctggtaacgctggaagtgctgtcagaaccgggtgccagcgccattgaccggattctgaaactgatcgaagaagccgaagagcgccgcgcccccattgagcggtttatcgaccgtttcagccgtatttatacgccagcaattatggccgtcgccctgctggtaacgctggtgccgccgctgctgtttgccgccagctggcaagagtggatttataaagggctgacgctgctgctgattggctgcccgtgtgcgttagttatctccacgcccgcggcgattacctccgggctggcagcagcggcacgtcgtggggcgttaattaaaggcggtgcggcgctggagcagctaggtcgtgttacccaggtggcgtttgataaaaccggtacgctgaccgtcggtaaaccgcgcgttaccgcgattcatccggcaacgggtattagtgaatctgaactgctgacactggcggcggcggtcgagcaaggcgcgacgcatccactggcgcaggcgatcgtgcgcgaagcacaggttgctgcactcgccattcccgccgccgaatcacagcgggcgctggtcgggtctggcattgaagcgcaggttaacggtgagcgcgtattgatttgcgctgccgggaaacatcccgctgatgcatttgctggtttaattaacgaactggaaagcgccgggcaaacggtagtgctggtagtacgtaacgatgacgtgcttggtgtcattgcgttacaggataccctgcgcgccgatgctgcaactgccatcagtgaactgaacgcgctgggcgtcaaaggggtgatcctcaccggcgataatccacgcgcagcggcggcaattgccggggagctggggctggagtttaaagcgggcctgttgccggaagataaagtcaaagcggtgaccgagctgaatcaacatgcgccgctggcgatggtcggtgacggtattaacgacgcgccagcgatgaaagctgccgccattgggattgcaatgggcagtggcacagacgtggcgctggaaaccgctgatgcagcattaacccataaccacctgcgcggcctggtgcaaatgattgaactggcacgcgccactcacgccaatatccgccagaacatcaccattgcgctgggactgaaagggatcttcctcgtcaccacgcttttagggatgaccggactatggctggcggtgctggcagatacgggtgcgacggtgctggtgacagcgaatgcgttaagattgttgcgcaggagataaggcaaaccgatcgcaacattgagcgcgatcggtcccctcgcccctctggggagagggttagggtgaggggaaaaggcggcatcgaagccaatcagcccccatcaaccgcctttacgaatcaaataacgataaggcagtccatccgtctctttcgcaaccagttcgtgttccataaaggtacaaaacccaggaatatcgcgggtagtggccggatcgtcggcgataatcagcaacgtttcgccgggctgcatattgcgcacagttttgcgcaccatcattacgggttccgggcagcgcaggccaagtgcgtcgagtgtgtggtcagggctggaaaagagatcggtcattttcttctcatcacataaaaaaacggcgctagtttacgccctgtgagtccgtaagcaaaccaggttaacgattgcgtgaaaattaaccattgcattgtcaacgtaaagcagtatcatgcggcggctcgaaaaaagggtaagcacgttattatgttaaggtaacagacgtgtcgtacgtattgggttccctcaccccaatggttaatcaaaaaggtacaatatgaacgttttctcgcaaactcaacgctataaggcgttgttctggttatcgttatttcatctgctggtgatcacctccagtaactatctggttcagcttcccgtctccattttgggtttccataccacctggggcgcgtttagcttcccgtttattttccttgctaccgacctgaccgtgcgtatttttggcgcaccgctggcccgtcgtatcatctttgcggtgatgatcccggcgttgctgatctcctacgtcatctcgtcgctattctatatgggttcctggcagggattcggcgcactcgcccacttcaacctgtttgtcgcccgtatcgccaccgccagtttcatggcctacgcgctggggcaaatcctcgacgtgcacgtttttaaccgcctgcgtcagagtcgccgctggtggctggcaccgacagcgtccacactgttcggtaacgtcagcgacacgctggcctttttcttcattgccttctggcgtagcccggatgcctttatggctgaacactggatggaaatcgcgctggtcgattactgtttcaaagtgttaatcagtatcgttttcttcctgccaatgtatggcgtattactcaatatgctgttgaaaagactggcagataaatccgaaatcaacgctttgcaggcgagttaaaggttcgttatcagagttgtgataagatggatgaatgagccgttatggccgtttatcgaaaggaagaagtcaatgcgcaatctggttaaatatgtcggaattggcctgctggttatggggcttgcggcctgtgatgataaagacactaacgctacggcgcagggttcggtcgcggaaagtaacgctaccgggaatcccgtcaacctgcttgatggcaagttaagtttctcgctgccagcggatatgaccgaccagagcggtaagctgggaacgcaggccaataacatgcatgtctggtccgacgccaccgggcagaaagcagtcatcgtcatcatgggcgatgatccgaaagaagatctggcggtgctggcgaagcgtctggaagatcagcaacgtagccgcgatccgcagctgcaagtggtaaccaataaagccattgagctgaaaggtcacaaaatgcagcagttagacagtattatctccgcgaaaggccagacggcgtactcttccgttattctgggtaacgtgggtaatcaactgctgaccatgcaaattacgctgcccgctgacgatcagcaaaaagcgcagaccaccgcagaaaacatcattaatacgctggttattcagtaagttttaagatgatgaggcggcctcagggacgtgttccggaggccgtttttttaatcgccacgtcagtaataacgcgattgcgaccagtcccgccgccgccagataaatcaccggtacgcccgcccagctcatcaccagcccagccagtggtccagtcacgccaagcgataaatccataaatacggtgtaagttgccagcgccgccccctgattttgctgcggaaccgcttttaccgccactacacccaatgccgggaacaccagcgaaaacccggcccccgccagtaagacgccgattttcgccatccacggcatagtcgccacgccaaccagtagcaggccgattatctcaacgctaaagcaaatcatcgctacgtttaagccaccgatacggttaatgccgttagggaataacaaacgcgtaccgacaaacgcacagctaaacagcgtcagcgcgaaagccgcaccgtcccaacctttagcgtcataaaacagcgtgataaaggtggcgatgacgccaaatccggcggaagccagtgccagcgccataccgtacagccagacgcgcccaagcaccgcgcgaaacggcagcggtttgcctttactggcttttaccgtcggacgcgggatcgccaacaaaatggccaccagcgccacgcccataatgattaacgctaacgcctgcaagccgccccagtgataaaacacgacgcctaacggcgcacccatcgccatcgccccgtaagtgacaatgccgttccacgaaatcacccgcccgatatgcagcgagccaaccacgccaacgccccatagggtcgatcccgttccggcaaaactttgcccaatcccaaggatgacgcgccccaggcaaagtaataacaggctgatgacaggcagactggcggttaatcctgccgtcagataccccagaccgctcaaaaagcagccgcataaaccgaagacgacaatctttttgggtcccagcgaatcggcgtaacgtccggcatgagggcggctcagcaaggtggcgaaatattgcaggctgataaccaatcctgcccagaaggcgctaaagcccatcacatcatggacatagcccggtaatacagcgagcggcaacccgatggtgaggtagctggcgaagttaaacatgactatagagacaatgcgcaaattcaggcgcaatccgtttagcgcgggttcggctacgggttcgggcatgaggatcaccacatttttacaacagtgtttcatttttaccacgtgctgacgtgaaaatcagcagtaagaatcagaatattgctggcgtgactcccgctacacttaatacaaaaagtcacaaggaagccccaatggaaacccctcaacccgataaaacgggcatgcacattctgctcaagctggcctcgctggtagtgatcctcgcgggcattcacgcagcggcagatatcattgtgcagctgttactggcgctgttttttgccatcgtcctcaacccgctcgtcacctggtttattcgtcggggagtacaacgccccgttgccattacgattgtagtggtggtgatgctgatcgcactaaccgcgctggtcggcgtactggcggcatcgtttaacgaatttatctctatgctgccgaagtttaataaggagctgacgcgcaaactttttaaattgcaggagatgttgccttttcttaatttgcatatgtcgccggagcgaatgctgcagcggatggactcggaaaaagtggttaccttcaccacagcgctaatgaccgggctttccggggcaatggcgagcgtgcttttgctggtgatgaccgtagtttttatgctgtttgaagtgcgccacgtcccttacaaaatgcgttttgcgctgaataatccacagattcacatcgcgggattacaccgcgcacttaaaggcgtttcgcactatcttgcattgaagacgctactcagtttatggacaggtgtcatcgtctggctggggctggagctgatgggggtgcagtttgcgctgatgtgggcagtactggcgtttttgctcaactacgtgcccaatatcggcgcggtaatttccgccgtaccgccaatgattcaggtgctgctgtttaatggtgtttacgaatgtattctggtcggcgcattgtttttagtggtccatatggtcatcggcaatattttagaaccacggatgatgggccatcgcctggggatgtccaccatggtggtatttctttcattgttaatttggggatggctgctcggcccggtagggatgctactttcggtgccattaaccagcgtgtgtaaaatctggatggaaaccaccaaaggcggtagcaaactggcgattttactggggccgggcagaccgaaaagtcggttaccgggatgaggcgacaagtgatacgatacgcactttcattttccattaaacgttggccctgatatgtatcggatagttctggggaaagtttcgaccttaagcgcagctccactgccaccgggtttacgcgagcaagcaccgcaaggtccacgacgcgaacgctggctggcggggcgtgcattgctttcgcacacgctttccccgctaccggagatcatctatggcgaacaaggcaaacctgcatttgcgccggaaatgccgctatggttcaacttaagccatagcggtgacgatatcgccctgctgttgagtgatgaaggcgaagtcggctgcgatatcgaagtgattcgcccgcgcgccaactggcgctggctggcgaacgccgtattcagcctcggggaacacgctgagatggacgccgtgcatcctgatcagcaactggaaatgttctggcgcatctggacgcgcaaagaagccatcgttaaacagcgtggcggcagcgcctggcaaatcgtcagcgtagacagcacctatcactcctcgctgtcagtcagccattgtcagcttgaaaatttaagccttgcgatctgcacccctactccctttacgctcaccgccgacagtgtgcaatggatcgattcagttaactgatccgcccacccgactgcccatctattgatccagaacaggtaatcagtatgacgaatacttaaaatcgtcatacttatttccgccatctattttaatccattggggttaccatgctctccacactccgccgcactctatttgcgctgctggcttgtgcgtcttttatcgtccatgccgctgcaccagatgaaatcaccaccgcctggccggtgaatgtcgggccactaaacccgcacctttacacgcctaaccagatgttcgcccagagcatggtttatgaaccattggtgaaatatcaggcagacggttcggtgatcccgtggctggcaaaaagctggactcattcagaagatggtaaaacctggaccttcaccctgcgtgatgacgtgaaattctctaacggcgaaccgtttgatgccgaggcggcggcagaaaacttccgcgcagtgctcgataaccgtcaacgtcacgcctggctggagctggcaaaccagattgttgatgttaaagcactcagtaaaacagagctgcaaatcaccctgaaaagcgcctactatcctttcctgcaagaactggccctgccccgtcctttccgttttatcgccccctcgcagtttaaaaaccatgaaaccatgaatgggattaaagcgccgattggcaccggaccgtggattttgcaggcatcgaaactgaatcagtacgatgtcttcgtccgtaacgaaaactactggggcgaaaagccagcgattaaaaagatcacctttaacgtcatcccggacccgactacccgcgcggtggcgtttgaaactggcgatatcgacctgctgtacggaaacgaagggttattaccgctcgataccttcgcccgctttagccagaatccggcttaccacacccaactgtcacagccgatcgaaaccgtgatgctggcgcttaataccgccaaagcccccaccaacgagctggcagtacgtgaagctcttaattacgcggtaaacaaaaaatcgctgattgataacgcgttgtatggcacccagcaggtcgccgacaccctgtttgccccttctgtgccctacgccaacctcggcctgaaaccgcgccagtacgatccgcaaaaagcgaaagcgttgctggaaaaagccggttggacgctgcctgcgggcaaagacatccgcgagaaaaatggtcagccgctgcgcattgaactttcgttcatcggcaccgatgcgttaagcaaatcgatggcggaaatcattcaggctgatatgcgccagattggcgcagatgtctcgctgattggcgaagaagagagcagtatctatgctcgtcagcgcgacggtcgttttggcatgattttccaccgcacctggggcgcgccatatgatccacacgccttcctcagttcaatgcgcgtaccgtcacacgctgacttccaggcacagcaaggattagccgacaaaccgctgattgataaagagatcggcgaagtgctggcgacccatgacgaaacgcaacgtcaggcgctgtatcgcgacattctgacccgtctgcatgacgaggcggtttatctgcctatcagttacatctcaatgatggtggtatcaaaaccggagctgggtaacatcccctacgcgccgatcgccaccgaaattccgttcgaacagattaaaccggtgaaaccttaatgttgcgttacgtattacgccgctttctgctgctgatcccgatggtgctcgccgcctcggtgatcatttttctgatgctgcgcctcggtaccggcgacccggcgctcgattatttgcgtctgtctaacctgccgccgacgccggagatgctggcctctacccgcaccatgctcgggctggatcagccgctgtacgtccagtacggcacctggttgtggaaggcgctgcatcttgactttggtatctcattcgccagccaacgcccggtactggacgatatgctgaacttcctgcccgccacgctggaacttgcaggtgcggcgctgatattaattctgctcacttccgtaccgctcggtatctgggcggcgcgccatcgcgaccgtctgccggatttcgccgtacgtttcatcgcgtttcttggcgtgtcgatgcctaacttctggctggcgtttttactggtgatggcgttttcggtgtatctgcaatggctacccgcgatgggttacggcggctggcagcacatcattttgcctgcggtttccattgcctttatgtcgctggcgattaacgcgcgtttactgcgcgccagtatgctggacgtcgccggtcagcgtcacgtcacctgggcgcgtctgcgcggcctgaacgacaaacagaccgaacgtcgccacatcctgcgcaatgcctcgctgccgatgatcaccgccgtggggatgcacatcggcgaactgattggcgggacgatgattatcgaaaacatctttgcctggccgggcgtcgggcgctatgcggtgtcggcgatttttaaccgtgactatccggtgatccagtgctttacgctgatgatggtggtggtttttgtggtctgtaatttgattgttgatttactcaacgccgcgctggacccgcgcattcgtcgtcatgaaggagcgcacgcgtgaactttttcctctcttcccgctggtcggtacgcctggcgctgatcattatcgccctgctggcgctgattgcgctcaccagccagtggtggctgccgtatgacccccaggcgattgatttgccgtcgcgcctgctttcgccggatgcgcagcactggttgggcaccgatcacttagggcgcgatattttctcgcggctgatggcagcgacccgcgtgtcgctcggttcggtaatggcctgcctgctgctggtgctgacattagggctggttataggcggcagcgccgggttgattggcgggcgcgttgatcaggccaccatgcgcgtcgccgatatgtttatgaccttcccgacctcgattctgtcgttctttatggttggcgtgctcggcaccgggctgaccaacgtaattatcgccatcgccctgtcgcactgggcgtggtatgcacgcatggtgcgcagcctggtgatttcactacgccaacgcgagtttgtgctggcgtcacggctttccggtgcgggccatgtgcgggtgtttgtcgatcatctggcaggcgcggtgatcccttcgctgctggtgctggcaacgctggatatcggccatatgatgctgcacgtcgcggggatgtctttccttggcctcggtgtgaccgcgccgaccgccgaatggggcgtgatgattaacgacgcgcgccagtatatctggacccagccgctgcaaatgttctggccggggctggcgctgtttatcagcgtgatggcctttaacctggtgggtgacgcactgcgcgatcatctggaccctcatctggtgacggagcacgcacactaatgccacaacagattgaactacgtaatatcgcgctacaggccgcgcagccgctggtacacggtgtatcgttaaccctgcaacgcgggcgcgtgctggcgttagtcggcggtagcggcagcgggaaatcattaacctgcgccgcgacgctgggcattttgcccgctggcgttcgccagacggcgggggaaattttagccgatggcaaaccggtttcgccttgcgccctgcgcggcatcaaaattgccaccatcatgcagaacccgcgcagcgcctttaatccactgcacaccatgcacacccacgcgcgggaaacctgcctagcgttagggaaacccgccgatgacgctacgcttaccgctgccatagaagcggtggggctggaaaacgccgcgcgcgtgctgaagctgtacccgttcgagatgagcggcggcatgttgcagcgcatgatgattgcgatggcggtgctgtgtgaatcaccgtttatcatcgccgatgaaccgaccaccgacctcgacgtggtagcacaggcgcgcatcctcgatctgctggaaagcattatgcaaaaacaagcgccgggaatgctgctggtgacccatgatatgggcgttgtggcgcgtctggcggatgacgtggcggtgatgtctgacggtaagattgtcgaacagggcgatgtagaaacgctgtttaacgcccccaaacatacagtgacgcgcagcctagtttccgctcatctcgccctctacggtatggagctggcatcatgactttacttaacatctccggcctttcccatcactatgcgcacggtggatttaacggaaaacatcaacatcaggcggtgctgaataacgtttccctgaccctgaaaagcggcgaaaccgtcgccctgctggggcgcagcggctgcgggaaaagtaccctcgcgcggttgctggtgggtttagaatcgcccgcgcaggggaatattagctggcgtggcgaaccgctggcgaaactcaatcgcgcccagcgtaaagcgttccgccgcgatattcagatggtatttcaggactccatcagcgccgtgaatccgcgcaaaaccgtgcgcgagatcctgcgtgaaccgatgcgccacctgctatcactgaaaaaatccgaacaactggcgcgcgccagcgaaatgctgaaggcggtcgatctcgatgacagcgttctcgacaaacgcccaccgcagttaagcggcggccagctccagcgcgtctgcctggctcgcgcgctggcggtcgaaccgaaactactgattctggatgaagccgtttctaaccttgatctcgtgttacaggcgggtgtcattcgcctgctgaaaaagctacaacaacagtttggcaccgcctgcctgttcatcacccacgacttacgcctggtagaacgcttttgccagcgggtaatggttatggacaacggacaaatcgtcgaaacccaggtggtgggagagaaattaaccttttcctctgacgccggacgtgtgctacaaaacgcggtattacccgcattccccgtgcgccgtcgcaccacagaaaaggtttaacgcaaatgcaacgagtcaccatcacgcttgatgacgatttactggagacgctggacagcctgagccagcgtcgtggttataacaaccgttccgaagctatccgcgacattctgcgtagcgccctggcgcaagaggccacccagcagcacggcacgcaaggtttcgcggtgctgtcgtatgtgtatgaacacgaaaaacgcgacttagccagccgcattgtctccacccagcatcatcaccacgacctctccgtcgccacgctgcatgtgcacatcaaccacgacgactgtctggaaatcgccgtgttgaaaggtgacatgggtgacgtgcagcattttgccgatgacgttatcgcccagcgcggcgtgcggcacgggcatttgcagtgcttgccgaaggaagattgagtctattattgggtcctttggtgaacgatcaacaaagggccactagcacacctgattcctctctaaataccctatccgaaccttctcttttgtaacgttctaaatatattcctaaaaatcttcaattcattgtgaccacaagtttttcttcgctttttcgtatgaagatactgtcattaaaataatagaaaaggattttacgatgagcggaaaaccggcggcgcgtcagggtgacatgacgcagtatggcggtagcattgttcagggttcagccggggtacgtattggtgcccccaccggcgtggcctgttcggtgtgccccggcggagtgacgtccggccatccggtcaatcccctgctcggtgcaaaggtccttcccggtgaaaccgaccttgccctgcccggcccgctgccgttcatcctctcccgcacctacagcagttaccggacaaaaacgcccgcgccggtggggagcctcggccccggctggaaaatgcctgcggatatccgcttacagctgcgcgataacacactgatactcagtgataacggcggcagaagcctgtattttgagcacctgtttcccggtgaggacggttacagccgcagcgagtcactgtggctggtgcgcggcggcgtcgcgaaactggatgaaggtcaccggctggccgcactctggcaggcgctgccggaagaactccgcttaagtccgcatcgttatctggcgacaaacagtccgcaggggccgtggtggctgctcggttggtgtgagcgggtgccggaagcggatgaggtgctgcctgcgccgctgccgccgtaccgggtactgaccgggctggtggaccgcttcgggcgcacacagacgttccaccgcgaagccgccggtgaattcagcggcgaaatcaccggcgtgacggatggtgcctggcgtcacttccggctggtactgaccacgcaggcgcagcgggcagaagaagcccggcagcaggccatttccggcgggacggaaccgtccgcttttcctgataccctgccgggttacaccgaatatggccgggacaacggcatccgtctgtctgccgtgtggctgacgcacgacccggaatacccggagaatttacctgccgcgccgctggtgcgctatggctggacgccacgcggcgaactggcggtggtgtatgaccgtagtggcaaacaggtgcgcagctttacttacgatgataaataccggggccggatggtggcgcaccgtcacacgggccggccggaaatccgttaccgttacgacagcgacgggcgggtgacagaacagctaaacccggcaggcttaagctacacgtatcagtatgagaaagaccgcatcaccatcaccgacagcctggaccgccgtgaagtgctgcacacgcagggcgaagccgggctgaagcgggtggtgaaaaaggaacacgcggacggcagcgtcacgcagagtcagtttgacgccgtgggcaggctcagggcacagacggatgccgcaggcaggacaacagagtacagcccggatgtggtgacgggcctcatcacgcgcataaccacgccggatggcagggcatcggcgttttactataaccaccacaaccagttaacgtcagccaccgggcctgacgggctggaattgcgccgggaatatgatgaattgggccgtctgattcaggaaactgcccctgacggcgatatcacccgctaccgttatgataatccacacagtgacttaccctgcgcaacggaagatgccaccggcagccggaaaaccatgacgtggagccgttacggtcagttgctgagcttcaccgactgttccggttatgtaacccgttatgaccatgaccgcttcgggcagatgacggcggtgcaccgcgaggaagggctgagtcagtaccgcgcatacgacagccgtggacagttaattgccgtgaaagacacgcagggccatgaaacgcggtatgaatacaacatcgccggtgacctgaccgccgtcattgccccggacggcagcagaaacgggacacagtacgatgcgtggggaaaggccgtccgtaccacgcagggcgggctgacgcgtagtatggaatacgatgctgccggacgggtcatccgcctgaccagtgaaaacggcagccacaccaccttccgttacgatgtacttgaccggctgatacaggaaaccggctttgacggccgcacacagcgttatcaccacgacctgaccggcaaacttatccgcagcgaggatgagggtctggtcacccactggcactatgacgaagcagaccgcctcacgcaccgcaccgtgaagggtgaaaccgcagagcggtggcagtatgacgaacgtggctggctgacagacatcagccatatcagcgaagggcaccgggtggcggtgcattacaggtatgatgagaaaggccggctgaccggtgagcgtcagacggtgcatcacccgcagacggaagcactgctctggcagcatgagaccagacatgcgtacaacgcgcaggggctggcgaaccgctgtataccggacagcctgcccgccgtggaatggctgacctacggcagcggttacctggcaggcatgaaactcggcgacacaccgctggtggagtacacccgcgaccgcctgcaccgggaaacgctgcgcagcttcggccgttatgaactcaccaccgcttatacccctgccgggcagttacagagccagcacctgaacagcctgctgtctgaccgcgattacacctggaacgacaacggcgaactcatccgcatcagcagcccgcgccagacccggagttacagctacagcaccaccggcaggctgaccggcgttcacaccaccgcagcgaatctggatatccgcatcccgtatgccacagacccggcaggtaaccgcctgcccgacccggagctgcacccggacagcaccctcagcatgtggccggataaccgtatcgcccgtgacgcgcactatctttaccggtatgaccgtcacggcaggctgacagagaaaaccgacctcatcccggaaggggttatccgcacggatgatgagcggactcaccggtaccattacgacagtcagcaccggctggtgcactacacgcggacacaatatgaagagccgctggtcgaaagtcgctatctttacgacccgctgggccgcagggtggcaaaacgggtgtggcggcgtgaacgggacctgacgggctggatgtcgctgtcacggaaaccgcaagtgacctggtacggctgggacggcgaccggctgaccacgatacagaacgacaggagccgcatccagacgatttatcagccgggggagcttcacgccactcatcagagttgaaaccgccaccggtgagctggcgaaaacgcagcgccgcagcctggcggatacccttcagcagtccggcggcgaagacggtggcagtgtggtgttcccgccggtgctggtgcagatgctcgaccggctggaaagtgaaatcctggctgaccgggtgagtgaggaaagccgccgctggctggcatcgtgcggcctgactgtggagcagatgcaaaaccagatggacccggtgtacacgccggcgcgaaaaatccacctgtaccactgcgaccatcgcggcctgccgctggcccttatcagtaaggaaggggcaacagaatggtgcgcagaatacgatgagtggggcaacctgctgaatgaagagaacccgcatcagctgcagcagcttatccgcctgccggggcagcagtatgatgaggagtccggcctgtattacaaccgccaccgctattatgacccgctgcaggggcgatatatcactcaggatccgattggactgaaggggggatggaacctgtatggatatcaattgaatccgatatcagacatcgaccccctgggtttatctatgtgggaggatgcaaaatcgggggcatgtactaatggtctttgcggcacactatccgctatgataggtccagataaatttgattctatagatagcaccgcatatgacgccttaaataaaataaatagccaatctatttgcgaagataaagagttcgctggtttaatatgtaaggataatagtggcagatatttctcaacagcacctaaccgaggagaaagaaaaggatcatatccattcaatagcccttgccctaatggtactgagaaagtatcagcttatcatactcatggtgcagatagtcatggagaatattgggacgaaatattttcaggtaaagatgagaaaatagttaaaagtaaagataacaatatcaagtcattttatttaggtacgcccagtggtaattttaaagcaatagataaccacgggaaggaaataacaaacagaaaaggattacctaatgtctgcagagttcatggtaatatgtaaaaaaatattgtttaggaactgtgtcattgtatctttgtttgtttttacatacaacacatgggcgcagtgtaataataatattaaaataatgcgcaagtatgaaagtgaaggtaaatataccgttagaaatttggttaaaaataaagctatagcattggaattagctgagatatatgttaagaatcgttatggacaggatgccgcagaagaagaaaaaccatacgaaatcactgagttaacaacaagttgggttgttgaaggtaccattcactcagaccaaattgctggtggggtttttattatagaaataggcaaaaatgatgggagaattctgaattttggccacggaaaataagtatgtaaggataatcaaacatcgtgtgcgctgatggcagagtaggtggaggactccagacagtcaaacgatagaaaaagatagcctttatggaggttcctgcaatgtcaaatacataccagaaaagaaaggcaagtaaagagtatggtttatataataaatgtaagaaactaaatgatgatgaattatttcgcttacttgatgatcgcaattccttgaaaaggatttcatctgccagagtattacagttaagaggggggcaagacgctgttagattggcaattgaattctgcactgacaaaaattatatccgtagagatatcggagcatttatactcgggcaaatataaatttgcaaaaaatgcgaagataatgtttttaatattttgaacaatatggcattgaatgataagagtgcttgcgttcgagctacggcaatcgagtcaacggccagggaaagatcatcaaaagttcactttttgcactaaataattcgcattttatgtttaaaaattgagatattccttattacctgaagctgttttttattgcttatacatgatcaaatactccttacctaattaaggagaacaaaatggaacttaaaaaattgatggaacatatttctattatccccgattacagacaaacctggaaagtggaacataaattatcggatattctactgttgactatttgtgccgttatttctggtgcagaaggttgggaagatatagaggattttggggaaacacatcccgatgttttgaagtgatatggtgattttgaaaatggtattcctgttcacgatatcattgccagagttgtatcctgtatcagtcctgcaaaatttcacgagtgctttattaactggatgcgtgactgccattcttcagatgataaagacgtcattgcaattgatggaaaaacgctccggcactcttatgacaagagtcgtcgcaggggagcgattcatgtcattagtgcgttctcaacaatgcatagtctggtcctcggacagatcaagacggatgagaaatccaatgagattacagccattcctgaacttcttaacatgatggatattaaaggaaaaatcatcacaactgatgcgatgggttgccagaaagatattgcagagaagatacaaaaacagggaggtgattatttattcgcggtaaaaggaaaccaggggcggctaaataaagcctttgaggaaaaatttccgctgaaagaattaaataatccagagcatgacagttacgcaatcagtgaaaagagtcacggcagagaagaaatccgtcttcatattgtttgcgatgtccctgatgaacttattgatttcacgtttgaatggaaaggtctgaagaaattatgcgtggcagtctcctttcggtcaataatagcagaacaaaagaaagagcccgaaatgacggtcagatattatatcagttctgctgatttaaccgcagagaagttcgccacagcaatccgaaaccactggcacgtggagaataagctgcactggcgtctggacgtggtaatgaatgaagacgactgcaaaataagaagaggaaacgccgcagaattattttcagggatacggcacatcgctattaatattttaacgaatgataaggtattcaaggcagggttaagacgtaagatgcgaaaagcagccatggacagaaactatctcgcgtcagtccttgcggggagcgggctttcgtaatcttgccctgaatacaggactgagtatcaaaaagccggttaactgaaactgtccaggttttgggggtcagttcataaacgccttatccggcctaaaaacaactaaaattcaataaattgcaccgatgcgtagtccctataagcttacgcatcgggcaattgtatttacgccattgtcccaatcgtcttcctgaatcgcagcagtgcaatggtgaaaaacgcgccgccaattgccatcagcgtcaggaactgcggccagacgatttcgaatccggcaccccggtagaggatggcctgcgcgaggctaacaaagtgtgtcgtcggcatggtcagcataatgtcctgcaccatctgcggcatactttcgcgcggcgtggaaccaccggaaagcatttgcagcggcagcagcaccagaatcaccagcagccccagttgcggcattgaacgcgctatcgtccccataaaaatgccgattgacgtggtggcaaacagactgagcgccacgcccagcataaacagcgggatcgagccttcaatcggtacgcccagtacacctttcaccatcagcaccagcgataatcccgataccaccagcaccaccagccccatcgaccagatcttcgccatcatgatctcaaacggcgttatcggcatcaccagtaagtgttccaccgtgccgtgttcacgctcgcggatcagcgccgatccggtcaatacaatcgccagcatggtaatgttgttgatgatcgccatcaccccgccaaaccacgcgggatcgaggttcgggttaaagcgcatccgggtttccagcgataccaacggttcgctgttatcacggtagcgcgcgacaaagctgttcacttcaccgttgataatattctggatatacccattgccggtaaatgcctggctcatgcgcgtggcatcgacgttcacctgaatatccggctggcgtccggcgaggacatcacgctgaaaattaggcggaatatttatcgcgaaggtatagcgtccggcgtccagtccggcatccatctcatcggcggtgatcatctccggtggcaaaaaccacggacgatagaagctgttaacgatccggttcgataactgcgattgatccatatcggcaatggcgatcggcgcgaggttcaacgatcctggcgtaacggtcgctgacgaatacaccgacaccgtaaacgagaagacaatcagcgtcagcatcgctttatcaccgagcagactgcgcaactctttgatacccagattaaaaatattgcgtaaatggcgcatcatccctcctgttttttcagcagcaggatacttaagcccatcaccagcgggatggctatcagcaacgggataaaaagttgccacaaatcagtcagatccagcgctttcgagaacgtcccgcgggcgatagtcagaaaatgactggtcgggtaaacctcgccgatccaacgtccaggcccttccagcgaagctaccggatcgatcatcccggaaaactgtgtcgccgggatcaacgtgataatcgccgttccgaaaatggcggcaatctggcttttcataaaggtggagatcagcagccccattccggtggcaatgatgatatacagcagcgccgccagggtgagcgtcaggaaactgcctttatgcggtacgccaaacacaaacaccgacaggccgcagagcaggaaaaagttcagcatccccagcgcgatgtatggcaactgtttaccaagcaaaaattcactacgcgtggtgggggtcacgtaaaggttgataatcgacccaagctctttttcccgcaccacgctaagggcgcttagcattgacgggatcatcatcagcagaagcgggatcaccgccggaacaatcgctggcaggctttttacgtccgggttatagcgatagcgcgtctcaatattcatcagcccgctttggctggcgggtgccgattgtcggctcgccacatcctgtaaccagctctggtgcatggcctgcacgtaaccttttaccgtttcagcacggctcggcatcgctccgtcgatccagacgccgagttccacaggcgtaccacgcgcgatatcgcgcccgaaattgggcgggatctcaatcgccaccgtgatatcgcccgcacgcatccgacgatcaagctcgtcataactggtgagcggcggctgttcgataaagtaacgggaaccggagaggttgagtgtccacgcctggctactgacggtctggtcgcggtcgagcaccgcaaagcgcaggttttccacatccatactgatgccgtaacccattatcagcatcaggatcaccgttcccatcagcgccagcgtcgaacgtactggatcgcgtcgcagttccagcgcttcgcggcggctgtagctaaacagacggcgcaggctaaatccctgacgcggcgcgtgggtggtgtcgtgtaccacgggcggcgcttcggcttcgttgctctgccctgccgcttcctgcaaataggcgataaatgcctcttccagactggcggctccgcgtttctcaaccagttcctgcggtgtaccgctggcaagcacttttccggcgtgcatcagtgagatgcggtcgcaacgttccgcttcgttcataaagtgggtggagatgaagatagtcactttgtcctggcgcgagagatcgaccatcaactgccagaacatatccctcgccaccggatcgacaccagaagtaggctcatcgaggattaacatctccgggcgatgaatcaccgccaccgccagcgaaagccgctggcgaatgccgagcggcaatgactccggcagaatatcttcaacgtcgttgagcttaaaacgctcgctcatttcagccactcttgcgggaatttccgcttccgggatgtgaaacaaacgggcatgtaactcaaggttttgccgcacggtgagttcgttatagagcgaaaacgcctgcgacatatagcccacccgacggcgggtatcgatatcttttggatcaaccggttgcccgaacagccacgcctcaccttcgctggcgggcagcagtccggtgagcattttcatggtggtggatttaccgcagccgttcgaaccaagaaaaccaaaaatctccccgcgtggaatgcggaaattaacgtgatcaacggcaacgaaggaaccaaaacgcatggtcagatcgcgcgcttcgatggcaatctctgcgttttcaggttgatacggtgggatcactaccgcctgatgcgcctggcgttgcgcttgcggtaacagatttataaatgcttcttccagcgtagcgctttgcgtttgctgccgtagctcttcggcgctgccagttgccagcacttctccggcattcatcgctaccagccagtcgaagcgttcggcctcttccatataggcggtggcgaccagcacgctcatattgctctgccgctggcgaatactgtcgatcagatcccagaactgggagcgggagagcgggtcaacccccgttgttggctcatcaaggatcaacagttccgggtcgtggattaacgcgcagcacagcccaagtttttgcttcatcccgccggagagtttccctgccggacgatcgcgaaacggtgctaacccggtgctggtcagcagctcattgattcgcacttcccgctccgctttgtcgtgaccgaacaggcgagcgaaaaaatcgacgttttcatacaccgacaaggtgtggtagaggtttttgcccagcccctgcggcatccaggcgatgcgcgggcagacgtcgcggcgatgcttcgggtcgcgcatatcgccgcccagcaccatcacattgccctgttcaatgacgcgggcaccggaaatcaacgacaacaagctcgacttcccgacgccgtccgggccaatcagcccgaccatacagcgggccggaatatcgagagtgatattgttcagcgcaacggtttttccataatgctggctcacgcccgccagttgcgcgacaggcgggacgggaaccagttccagatgcgtcattgcggcaacctcaccacgaggtcgtcaggccacggaagttcttcattcacccgcacccacgctacgcccggcaaaccggttttgacatattccagatgctgctggagtaattccggtgggatacgcgctttgacgcggaacatcagtttcagccgttcatcgctggtttcgacggtttttggcgtgaactgggcgacactggcgacaaaactgatggttgcaggaatacgcagatctggcgcggcatcgaggatcagccgggcttcaccgcccagtttcagcgtgcccgcctgttcggttggcaggaagaaagtcatatagacgtcgctgagatcgaccatattcagcacccgaccgcctgccgccagcacttcgcctggctcggcaacccgatactgcacgcgtccgtcacgcggggctttcagttcgctgtcatcgatatctgcggcaatgcgccgttcagtggcttgtgccgcttcgacgcgggtttgcgcctgaatgatattggtgcgtgccgcttctatagccgctttagaagccgatacctgagctttcgccgattccagcgcagctcgggcgctctcagcggcggcgcgatcgtcatccagctgttgcgcagaaatagcccctcgttgggccagtgaacgggaacgcgtatgacgttttgctacggagtccagttctgcctggcgttgattaaccagcgactgtgcggcacgagtttcgctttgtcgttgctccagcaaagcctgcgcggcagcaacggcgctttgtgcctctttgatttgcgcgatggcttccagtcgctgttcctgcaacacgcgagtatccatcttcgccagcacttcaccttcgcgaacaaactggccttctttcaccagaatggtgtcgatacgcccggcaattttgctggcaatatccacttccgtcgcttcaatgcgcccattactgacagcaaagccttccggcacacctgccgggcgcaacagccaccacgccacgatagccgccaccgccagtaacccgacaacccaccacgccagatggcgcttactcttatccataatcgacccgccataatccctgtaagcaaacgacgcgtgttacaactgccgccgaacgacgttcagcggattcttccatccgggataagaaggaaacggcaaatacgaccagcgcgcagagcattgagcgccaacggggaaggcttagtgaaaacgggtagtaatgttgtcatcatcagcattcctggccgtaaatgaaacacgcatactcataagtgtgatctataaaactggctgacaaaacggtatccatcctgttggatagcgtttcacgcctgttcagttgcaggaacagagcattcctttttacgttttatcaacagtctcaaccagatagtaacattaatattcatgttgtctatggttcagagctgtaacattgtgcgccttctaatcaaaggcataagtccatttctgtttttttcatgctggtaagacttccagggagtggttatctcaggccctgcaccagggttaatttggcaattatgcatgctgaacattcttccagcatgtttactgtcacgggcgttaagacctaaaactgtccccgtttcgcctatgcgttctcttccaccatttccgttatgtgcaacaacttgatttatacctaacatttgtgaacatgctaatagtgcttcaagtttaggtctgtaatctgtcgaaacagaaaaataacgattaaaggatcgacaagagatagcccggctagttttaaactttttgccattaattatagcatgatgctttttattgataattgccgctaattcgaccggatcgagagcattggtcatttcatcaatagagactgttatcggtcctataatgtaacgttttcgctgatcatcaaaagttatcccatgatgatttgccattattttgtatttggggtcatagaaacatacaggataatcttttatcccagagtaggtatcctcatcgagtggtttcatacgcgtgaagttctgcatatagttaccattgcaattcgtttcatgatttccagctaatacatgaacattttcattgatactcattatgcgttttaacaaatcgatgataaattgatcaccacagatattgctaaatcgatcgccggtttggtcgcccagaaacgtacatggcgtcacagcgtctttattaataactaaataaggctgaagactttctaaaataatgtctcttctgttcaggatactgattattgtattaacattagtgttaagttgctcattaaagttctcccttagcaatacgttgagaacttcatcttctatattaagcaactggctaaggaaattttctccttcagccatgattcccaaatgtcccgttgcgaaaagcgcgaacaaaactgcaccgactgagccatcggtatcaccaaaataggttggtctggtacttgtgggatcaacgggtaaacaattggagaaatagattctgtcagcgaactggggttttatcattgtttcgaatttaatatcagatacattatattgcgatattttccagttccagatgggtttgtacgactcagtaactgcaacatcattagcattatcatttactgtcatattattaagtaaataaacaatactgcaccaattaacatcggtattatcaagagagcaaccgtaatttttgctattaattgtcacaataaactgataattattattcctacgtagaatatgagcacgcatgcccgatagcatactatatttttctgaatgatccgtttgtatggtaaatgaaattttgtcatcttgaatagattgttggaaccgttctatttgccaatcatctattttttccacaacctcaccgagcattgtcctggcaatacttgatatatcatcacctataccatttgcaatatacccaaacagttctttagtgaagttggtaacatgctcttgcaccatatcatttgttgcgattgtcgttgtactgtcgttagtgcctgccacagttccaattttcatattttacctcatattatttaccgcgaggaatacatagttaacattttatcttatgacatacacctcatgttcgatgggaaaataattatattttgcacaaatcattcagcctcaaagcataatatgaaatttcttatctcatagcagagaaagtccctaaagattgtagaggcgtcatcagaacatgcctctacaatcgattaagaaaacctatgaaatactggcaggattaaaaagacataccaccgtattcatggagttttaatgtggttgaaaacaactaagccctgaggaataaattattttattatttttatcacgtgcttccttcagggaatttagccccataataccattatcaaattgttgattatgatctaccccgggcccatgatgcccatatttttgtctaatgtatttgctggggtcttcacctttgagtgtctccccacatatgaagatacgttcacgtgctggtctgaaatcagtagtgttatcaaaataattagcatatacaggtgtgggtttcaaagtattgcttcggattagatggaatagaggatcatccatgtgttctttatgttttttattaaaaatattggctaattcctcaggatcagtaggatttttcatctgattaaatggaacctgcaaagcaccgagacaataacattttttttcttcatctcttattattccgtgatgactggttaaaacttgcctttctgagtcataattacaaacatcgagcgttttaattaagttatacgtatcaccggcagagagtttatgatttgctagtcgtgcagtatagttaccattaaaattgatttcatgatttccagccagaacgacgacatttttattaatacggctatctttattaccctccatatttcgcatagaatttagcaaagtaaggatatatttatcaccaaaaatagtactaaatctatcgcctgtatgatccccaaggaagatacaaggggttatcgcatcgtcctttaaaaaaacatgttgatgcaactcattcaagatcatgtctctcgtatttaataaatcgtagagcactttattatttttatgtttgtatgcagatgaagccatctcttcgtgttttaataattcacataataaactccaacccttttccctgatgcctatatgccctgaaacgagcaatgcataaagtacagcgcctactcttccatctgtatcgccaaaataagccgtgttggcattttgtgggttaatcacaccacactgtttatagaagtctatttttgaaaacacagatttaacatagctatcaaacttttccttagtaaacgtctctttagagacatcccaacgccagtcaggtttgaaattaccactaagaagagtaaagaaatttctcgctatgatagaaagcccatcaactttataaattatatctgatttatctccagaggaattaataaaataataaccgcccttacactcaacagtaacggtaatgggagacgataattttaacacatggttattgtctggtataattgtaaagataaacgtatcagtagtattgtcggcgaatctattatattcttgaatatctatagaaggttcactattataaaaccatactttctccatctggtgactacgatcatttaccttccagtgaccatgttgcaggaaatagatgatatgcaggccaaaatcgttatctatttgcgaatcattatccagtttatcaaattcaactatctttgcacgatgtgttttatcaaccttgccatggtgttgatgactgttaactttatctgaatgcttatcttgatggcttgaagagatgtttctaatctgattgtcaattgttttcataaataacctgtgatatttttgaattgtttgtaacaaaataaatgatacttgtctgaaaaacagatttacgacgatataaaataataatacttatatgttcgctgattttaagcaccgagactatccggtcttttaccaaataatgaagaataatccctccctggaagataattgtaaaaaacaacagcataagaattaatcttaggataaatttttatttatcatggccttttgaacgctgaaaagtagcgctctgcaaagtaaaccccgctatagttatgctatgcatttgtctttaatgatatctcgtcattatattaacaggatgaaattatcattaatgcatatttcaatattagcagggatacctgaggagtttaaagtgaacatatatatcgggtggcttttcaaattaatccctttgattatgggcttaatttgtatcgcgttaggtggctttgtgctggaaagttcagggcaaagcgagtatttcgtcgcgggtcatgtgctgatttctctggcggccatatgcctggcattattcactaccgcatttattatcatttcgcagctcacgcgcggcgttaatacgttttacaatacattgttccccattattggctatgcggggtcaattatcaccatgatatggggttgggcactgttagcaggcaatgatgtgatggcagacgagtttgtcgccggccatgttattttcggcgttggtatgattgccgcctgtgtatcgacggtggcagcgtcatccggtcactttctgctcattcccaaaaatgcagcggggagcaagagcgacggaacaccggtacaggcttattcttcattaatcggtaactgcctcattgccgttcccgttttactcaccctgctcggtttcatttggtctattacgctgttacgtagtgctgacataactccgcattatgtcgcgggtcacgtattgcttgggttaaccgcaatctgtgcctgtctaattggccttgttgccacaattgtccatcaaacacgtaatacgttttcaactaaagaacactggctgtggtgttattgggttatttttctcggctcaatcacggtactgcaggggatatacgtcttagtcagttccgatgcaagcgcccgactggctcccggcattattcttatttgcctcggaatgatctgttacagcatattctcaaaagtctggctactggcactggtatggagacgtacctgttcgttagccaacagaataccgatgattcccgtcttcacctgcctgttttgccttttcctggcatcgtttcttgcggaaatggcgcagaccgacatgggatattttattccttcgcgagttctggtcggtttgggagcggtatgctttacgttgttctcaatcgtttcaatattagaagcgggttctgctaaaaaataattgcaacgtaccggataaaaccagcgttgaccatttgcgtaacgctggtttttcttaggcatcatgaaataacgcagcattaatgcatagtggttaagtataaaaaacagcaaagttactgtttttttcaacctgttcatatttcataaagatctggccactgggtgagttttcaatcacctttccatccaccttatattaagcatggagggtttcagttcacgggctcattagaaaataatcacaagataaccactatcaaaattagctcatttttaatgcgactctaataattttcatctttaggaaataggtcaggacgactttgctgcaatcaaatcctgcgcacaagcccacgcactcgaccacgcccactggaagttatagccccccagccagccggtgacgtccatcacttcgccgatgaagtacagcccaggcactttgcgcgcttccatcgtccgtgaagagagttcgttggtgtccacgccgccgagcgtcacttcggcagtgcgatagccttcagtgccgttgggttgtacgcgccagtcggtcaatgtgctaatcagtgcctgttggtcacgcacgttgagctgttttagcgaaacatccgggatttgcccgagttgctgtaagcgttcaaccaaccgcttcggtagatgaaccgccagtgtgtttttcaggctttgattcggatgtgcgttacgctgctcattcaggaaggtttcgaggtccacatccggtagcagattgatgctgacaaattcccccggttgccagtagcttgaaatctgcaacaccgccggtccagacaagccgcggtgggtgaagagtaagttctcacggaaaacggtgccgttttcagcggtaatcacggaaggcaccgccacgcccgccagcacctgtaactcttcgagcaacggtttatgcagagtgaatggcaccagacccgcgcgggtcggcagcacgttgaggccaaattgttcggcaatcttataaccaaacggcgacgcgcccagccccggcattgacagcccaccagtcgcgatgaccagcttttcgcaaccgacagtcatgccgttcagatcaagcgtgaagcctgtttcatccttcgccacactcagcacttcgctacgcaatctgaaggtcacattgcccttctcgcactcatccaccagcatgtcgacaatctgctgcgcggagtcatcgcagaagagttgccctaacgttttctcgtgccaggcgatgccgtgtttattgaccagatcaatgaaatcccactgggtaaaacgtgcgagtgcagacttacaaaaatgcggattctggctcagataagcgcctggttcgacataaaggttggtaaagttgcagcgcccaccgccagacataaggattttgcgccctggttttttaccattatcgatcagcagaacccggcgtcctgcctgacctgccagcgcagaacagaacatacccgccgcaccagcgcctataataatggcatcaaacctttccacgttgcgctcctcttagaaaaaacgggcgtgaattgtaaagattcctcagtggtcgcaccagcatcaatattactaaaaggaagtatttgcctgaattatataagataattattttttgagtgaaatccatacagggggcaaatcaaaaaaagtctatatttcactttgcccgcgccgcgaaagtcactgataatgcgccgcgttcatgtcctcaaaatggcgtaacgtcctatgctacatttgtttgctggcctggatttgcataccgggctgttattattgcttgcactggcttttgtgctgttctacgaagccatcaatggtttccatgacacagccaacgccgtggcaaccgttatctatacccgcgcgatgcgttctcagctcgccgtggttatggcggcggtattcaactttttgggtgttttgctgggtggtctgagtgttgcctatgccattgtgcatatgctgccgacggatctgctgcttaatatgggatcgtctcatggccttgccatggtgttctctatgttgctggcggcgattatctggaacctgggtacctggtactttggtttacctgcatccagctctcatacgctgattggcgcgatcatcgggattggtttaaccaatgcgttgatgaccgggacgtcagtggtggatgcactcaatatcccgaaagtattaagtattttcggttctctgatcgtttcccctattgtcggcctggtgtttgctggcggtctgattttcttgctgcgtcgctactggagcggcaccaagaaacgcgcccgtatccacctgaccccagcggagcgtgaaaagaaagacggcaagaaaaagccgccgttctggacgcgtattgcgctgatcctttccgctatcggcgtggcgttttcgcacggcgcgaacgatggtcagaaaggcattggtctggttatgttggtattgattggcgtcgcgccagcaggcttcgtggtgaacatgaatgccactggctacgaaatcacccgtacccgtgatgccatcaacaacgtcgaagcttactttgagcagcatcctgcgctgctcaaacaggctaccggtgctgatcagttagtaccggctccggaagctggcgcaacgcaacctgcggagttccactgccatccgtcgaataccattaacgcgctcaaccgcctgaaaggtatgttgaccaccgatgtggaaagctacgacaagctgtcgcttgatcaacgtagccagatgcgccgcattatgctgtgcgtttctgacactatcgacaaagtggtgaagatgcctggcgtgagtgctgacgatcagcgcctgttgaagaaactgaagtccgacatgcttagcaccatcgagtatgcaccggtgtggatcatcatggcggtcgcgctggcgttaggtatcggtacgatgattggctggcgccgtgtggcaacgactatcggtgagaaaatcggtaagaaaggcatgacctacgctcaggggatgtctgcccagatgacggcggcagtgtctatcggcctggcgagttataccgggatgccggtttccactactcacgtactctcctcttctgtcgcggggacgatggtggtagatggtggcggcttacagcgtaaaaccgtgaccagcattctgatggcctgggtgtttacccttccggctgcggtactgctttccggcgggctgtactggctctccttgcagttcctgtaatcgtacgcaccaaaacgagcgggtcagctggcccgcttcagattgtgacatagtgcgctttgttcatgccggatgcggcgtgaacgccttatccggcctacaaaaacatgcaaattcaatagattgcagagattatgtaggcctgataagcgtagcgcatcaggcaattttgcgtttgtaatcagtctcgagcgggtcagtttactggcccgctttttttatgcgttattattgctgaagtgcttaatgccaaatcatcaatgcaatcaggctgaccaccaccagaccacacaatgcgctggtcagaataaactgccgacgcacccgctcacagcggcgaataaattcatcatcgtgatgatcgcgataacgttgggcatagatataccaaacgagacgcacctgtttgttgggttggccatgtgaggtaaaaaagccccctccatcaacatattgatagagcaatggatcgcagttacgcagtaccactaacaacgcgcgtagtgatgagaaatagcgcgccatgttaacaatgcaaacgacacataaagcccaaaataatgcgacggtgcttatcatacctcctccccggcgacctgcccgcggagttccaccccggggctaccgctcccgatacgctgccaatcagttaacaccaggtcctggagaaaccgcttttgtggtgaccaacatacgagcggctctatagatagtgtaggagatcaggttgttttttttccagaaggttaaccactatcaatatattcatgtcgaaaatttgtttatctaacgagtaagcaaggcggattgacggatcatccgggtcgctataaggtaaggatggtcttaacactgaatctttacggctgggttagccccgcgcacgtagttcgcaggacgcgggtgacgtaacggcacaagaaacgctagctggccagtcatcgacaactttatggaaggagtaacactatggcttataaacacattctcatcgcggtcgacctctccccggaaagcaaagttctggtagagaaagcagtctctatggctcgcccctacaatgcgaaagtttctctgatccacgtagatgtaaactactctgacctatacactgggcttattgatgtgaatctgggtgatatgcagaaacgcatctctgaagagacacatcatgcactgaccgagctttccactaatgcaggctacccaatcactgaaaccctgagcggcagcggcgacctgggccaggttctggtcgatgcaatcaagaaatacgatatggatttggtggtttgtggtcaccaccaggacttctggagcaaactgatgtcttccgcacgtcagctgatcaacaccgttcacgttgatatgctgattgttccgctgcgcgacgaagaagaataatcttccctctacgacgtgttcctgaacgcccgcatatgcgggcgttttgctttttggcgcgccttgttacctgatcagcgtaaacaccttatctggcctacggtctgcgtacgcaatcaaaatccccagccaatacaacatttaacaccatcatattttccatcattagtgtgatcatctggttattttctgttgtaatagtgtattaatctattcaccgcatcaatattaagaatctctgacagatgtaaactttttcgcgcgttatcccttacgcgttcatacttttcaggatggtattggaaggttaataaatatgaatacaacaacacccatggggatgctgcagcaacctcgcccatttttcatgatcttttttgtcgagttatgggagcgattcggctactacggcgtgcagggcgtactggcggttttcttcgttaaacagcttggattctcgcaagagcaggcttttgtcacttttggtgcttttgctgcgctggtctatggcctcatttccattggcggctatgtcggcgaccacctgctggggaccaaacgcaccattgttcttggagcacttgtgctggcgattggctacttcatgaccggcatgtcgctacttaagcctgacctgattttcatcgccctggggactatcgctgtcggtaacggcctgtttaaagctaacccagccagcttgctttcgaagtgctatccgccgaaagatccgcggcttgatggcgcattcaccctgttctatatgtcgatcaacatcggctcgttgatagcgttatcgctggcccctgtgatcgctgatagattcggttattcagtcacctacaacctgtgcggggcggggttaattatcgcattactggtttacatcgcctgtcgtggaatggtgaaagacattggttctgaacccgacttccggccaatgagcttcagcaaactgttgtacgtgttacttggcagcgtggtgatgatcttcgtatgcgcatggctgatgcacaacgtagaagtcgccaatctggtgctgattgttctttccgtcgtcgtcaccatcatcttctttcgtcaggcattcaagctggataaaaccgggcgcaataaaatgtttgtcgcctttgtcctgatgctcgaagcggtggtgttttacattctctacgcccagatgccaacgtcgctgaacttctttgccatcaacaacgtgcatcatgaaattctcggcttttccatcaacccggtcagcttccaggcgcttaacccgttctgggtggtactcgccagcccaatactggcaggcatttacacgcatctgggtaacaaaggcaaagacctctcgatgccgatgaaatttactctcggcatgtttatgtgctcactgggctttttgacagctgcagctgcgggaatgtggtttgcggatgcccaagggctgacatcgccatggtttatcgtgctggtgtacttattccagagcttaggtgaactgtttattagcgcccttggcctggcgatgattgctgccctggtgccgcagcatttgatgggctttattctcgggatgtggttcctgacgcaggctgccgcgttcttgctgggcggctatgtggcaacatttaccgcggtgccggacaacattaccgatccgcttgagacgttgcccgtctataccaccgtgtttggtaagattggtctggtcacgctgggcgttgcagtagtgatgctgttgatggtgccgtggctgaaacgcatgattgcgacgccggaaagccattaattattcttgcagaaagcagggtagcgttatcgctaccctgctttacttttacacgggcgtacctgcatagatatcaaagcgatgccctttagtgactaccgcgtttggcgtggcgacattcgccagcggtggcgcgtagtccgggcgctttaccaccacgcgtttggtcgccagcaagcgtgcaggctccagtaatccatcggcatcaagatccggtcccaccagcgactgaaagacacgcatctcttttttcactagcgcgcttttctgcttatgcgggaacatcgggtcgagataaaccacctgcgggcgcggggtaatatcagtcagcgccgtcaggctggaggcgtgaattaactgcaaccgctcctgcaaccagccgccgatttccgcatccgcataaccacgcgccaggccgtcgtcgagtagcgcggcaaccactggattacgctccagcatccgcacgcggcagccgactgaagccagtacaaaggcatcgcgcccaagtcctgcagtggcatccaccacatccggcaaataatcgcctttaatgcccaccgctttcgccaccgcctcaccgcgaccaccgccgaatttgcgtcggtgcgccatcgctccgccaacaaaatcaacaaagatgccgccaagttttggctcatcacgcttgcgcaattccagatgttccggcgttaacaccagcgccatcaggttgtcttcatcgtgctccagcccccagcgggccgccagaacagataaggcaccgtctccggtgcctgtttcatcaattaagcagattttcactgaatgatcagcccttaatgccgtaatgctccagcatcgcatccagctgcggttcacgaccacggaagcgtttgaacagatccatcggctcttctgaaccgccacggctcagaatgttgtcgaggaacgactgcccggtttcacggttgaaaatgccctcttcctcaaagcgcgagaaagcatctgccgccagtacgtcagcccacaggtagctgtagtaacctgcggcataaccaccggcgaaaatatggctgaaagcgtgcgggaaacggccccaggacggagatggcaccacggcaaccagtttcttgatttctgccagagtttcgaggatttttgccccctgatccgggcggaactcggcatgaaggcggaaatcaaacaggccgaactccagctgacgcagaataaacagcgccgcctggtagttcttcgccgccagcattttatccagcaactctttcggcagcggttcgccggtttcatagtgaccagagataaacgccagcgcctccggctcccagcaccagttttccataaactgactcggcagttcgaccgcatcccacggcacaccgctgataccggaaacaccagcggtttcgatgcgggtcagcatatggtgcaggccgtgaccgaactcgtggaagagggtgatcacttcgtcgtgagtgaacagcgccggtttaccatttaccgggcggttgaagttacaagtcaaatacgcgaccggtttttgcaaagaaccatcagctttacgcatctggcctacgcagtcatccatccacgccccgccgcgcttgttttcacgggcatacagatcgaggtagaagctaccgcgcagttcgttattttcgtcatacagttcgaagaaacgtacatccggatgccagacatcaacatctttacgctctttagcggtgatgccgtaaatacgcttaaccacttcaaacaggccgttaaccgctttgttttccgggaagtacggacgcagctgttcgtcactgatgctgtagaggtgctgtttttgtttttcgctgtagtaagcgatatcccacggctgcaactcatcgacgccaaattcggctttggcaaaggcacgcaattgcgccagctctttttcgccttgtggacgcgcgcgttttgccagatcggttaagaaatccagcacctgctgcgggttttctgccattttagtggcaagggatttaaaggcgtagttttcaaagcccagcagttgcgccagttcgtgacgcagcgcgaggatctcttccatcaccttgctgttatcccatttaccggcgtttgggccttgatcggaggcgcgggtgctgtaagcgcgatacatctcttcacgcagagcctggttgtcgcagtaggtcattaccggcaagtagcttgggatatccagcgtcagcaaataaccttccagctctttcgcttcggcctgggcttttgccgcagccagcgcgctttctggcatccccgccagctccgcttcgtcggtaacgagtttggtccagcccattgtcgcatcgaggacgttgttgctgtactggttgcccagttcagaaagacgggtcgcaatttcgccgtaacgctgctgtttctctttcggcagacctatgccagagagttcaaagtcgcgcagtgcgttatcaaccgctttcttctgcgccgtgttcagcgtggcgtaatgatcgccatcgcgcaggtcgcgatacgctttatacagcccttcatgttgccctacccaggtgctgtattccgacagcagcggcagggtttgttcgtaggcttcacgcagttccgggctatttttcaccgagttcaggtggctgaccggggagaagatacgccccaacacatcgtccacttccgccagcggctggcagagattttcccaggtgtacggtgccccttgcgctactacgcgctccacgttttcgcggcagtcgttcaatgccttagtcacggctggaacgacatgttccgggagaattttagaaaacggaggcaattcaaagggagtcagtaacggattcgtcattcgcgcagtcctggttaaagaggttaaggaagcgctcaacaggcgctttacataatgtgtgtagcatggggttaagtgtagtgaatttcaatgagaaacgttacgctttcgcggcggcggcctcttttcggtatactgtcctgatacgcttttgtgcgccccgaatacgggccgatttttacttaccggaacacctttacccatgctcagttatcgccacagctttcacgctggcaaccacgccgacgtccttaaacataccgttcagagcctgatcatcgagtcgctgaaagagaaagataaaccgtttctctatctcgacacccacgcaggggccgggcgttatcagttaggcagcgaacatgccgagcgtaccggcgaatatctcgaaggcatcgcccgtatctggcagcaggacgatttgcccgcagaactggaggcgtacatcaatgtggtaaaacacttcaaccgtagcggtcagttgcgttactaccccggttcgccgttgattgctcgcctgctactgcgtgaacaggacagcctgcaactgaccgaactgcacccgagcgattacccgttgttgcgttctgaatttcagaaagatagtcgtgcgcgtgtcgaaaaagccgacggtttccagcagcttaaggccaaactgccgccggtttcccgccgtggtttaatccttatcgacccgccgtatgaaatgaaaactgactatcaagcggtggtcagcgggatagcagaaggttacaaacgtttcgccactggtatttacgcactgtggtatccggtggtgctgcgtcagcaaattaagcgcatgatccacgatctggaagcgaccggtattcgcaaaattctgcaaattgaactggcggtactgccagacagcgatcgccgtggcatgaccgcttccggcatgattgtgattaacccgccgtggaaactggaacaacagatgaataacgtgctgccgtggctgcacagcaaactggttccggcaggcaccgggcacgccaccgtaagctggatcgtgccggagtaattgcagccattgctggcacctattacgtctcgcgctacaatcgcggtaatcaacgataaggacactttgtcatgactaaacactatgattacatcgccatcggcggcggcagcggcggtatcgcctccatcaaccgcgcggctatgtacggccagaaatgtgcgctgattgaagccaaagagctgggcggcacctgcgtaaatgttggctgtgtgccgaaaaaagtgatgtggcacgcggcgcaaatccgtgaagcgatccatatgtacggcccggattatggttttgataccactatcaataaattcaactgggaaacgttgatcgccagccgtaccgcctatatcgaccgtattcatacttcctatgaaaacgtgctcggtaaaaataacgttgatgtaatcaaaggctttgcccgcttcgttgatgccaaaacgctggaggtaaacggcgaaaccatcacggccgatcatattctgatcgccacaggcggtcgtccgagccacccggatattccgggcgtggaatacggtattgattctgatggcttcttcgcccttcctgctttgccagagcgcgtggcggttgttggcgcgggttacatcgccgttgagctggcgggcgtgattaacggcctcggcgcgaaaacgcatctgtttgtgcgtaaacatgcgccgctgcgcagcttcgacccgatgatttccgaaacgctggtcgaagtgatgaacgccgaaggcccgcagctgcacaccaacgccatcccgaaagcggtagtgaaaaatgccgatggtagcctgacgctggagctggaagatggtcgcagtgaaacggtggattgcctgatttgggcgattggtcgcgagcctgccaatgacaacatcaacctggaagccgctggcgttaaaactaacgaaaaaggctatatcgtcgtcgataaatatcaaaacaccaatattgaaggtatttacgcggtgggcgataacacgggtgcagtggagctgacaccggtggcagttgcagcgggtcgccgtctctctgaacgcctgtttaataacaagccggatgagcatctggattacagcaacattccgaccgtggtcttcagccatccgccgattggtactgttggtttaacggaaccgcaggcgcgcgagcagtatggcgacgatcaggtgaaagtgtataaatcctctttcaccgcgatgtataccgccgtcaccactcaccgccagccgtgccgcatgaagctggtgtgcgttggatcggaagagaagattgtcggtattcacggcattggctttggtatggacgaaatgttgcagggcttcgcggtggcgctgaagatgggggcaaccaaaaaagacttcgacaataccgtcgccattcacccaacggcggcagaagagttcgtgacaatgcgttaaatgttaaagggctaagagtagtgtgctcttagcccttaattacgtttccgctatcagttcagaagctgaagcagaaagcggatcagttccagcagcgcaattaacgccccaagaacgatgattgctttatcaatcacccgttttctccatgcgatggagtgagaatgcatccgcttactcatccactgcctgtcacggcgcatgccctattgttagataatggcattctcactccggccagagcatcagttaacggcaccacccgtacttctgaccaggactttgaaagcgtttatgcgcattaccagagtgaaaatgcctcagagctaactggataatcatacagtacattcaggttataaaaccagcatgtccttgcaatagtttcagtatggtattagcattgatgcgttagataatggcattctcactccagccagtgccaccaactcagggctggaaagtaaaaaaccgacgcaaagtcggtttttttacatccggattcggacaaggcttaatatgacgatgacccagtgaaagtatataaatcgtcattgcgatatataccgaagtgccccctccgccagctgaagaaatcgctaattcttgcaatgttagccactggctaatagtattgagctgttagataagaactctctcactccagccagagccaccaactcagggctggaaagtaaaaaaccgacgcaaagtcggtttttttacgtcctgattcagacctcctttcaaatgaatagccaactcaaaattcacacctattaccttcctctgcacttacacattcgttaagtcatatatgtttttgacttatccgcttcgaagagagacactacctgcaacaatcaggagcgcaatatgtcatttctgttacccatccaattgttcaaaattcttgctgatgaaacccgtctgggcatcgttttactgctcagcgaactgggagagttatgcgtctgcgatctctgcactgctctcgaccagtcgcagcccaagatctcccgccacctggcattgctgcgtgaaagcgggctattgctggaccgcaagcaaggtaagtgggttcattaccgcttatcaccgcatattccagcatgggcggcgaaaattattgatgaggcctggcgatgtgaacaggaaaaggttcaggcgattgtccgcaacctggctcgacaaaactgttccggggacagtaagaacatttgcagttaaaaatttagctaaacacatatgaattttcagatgtgttttatccgggaggcattatgttactggcaggcgctatctttgtcctgaccatcgtattggttatctggcagccgaaaggtttaggcatcggctggagtgcaacgctcggcgcagtactggcgttagttacgggcgtggtccatccgggtgatattccggtggtgtggaatatcgtctggaacgcgacggctgcgtttatcgccgtcattatcatcagcctgctgctggatgagtccggcttttttgaatgggcggcgctgcacgtctcacgctggggtaatggtcgtggtcgcttgctgtttacctggattgtcctgctcggtgctgccgttgccgccctgtttgccaatgatggcgcggcgcttattttgacaccgattgtcatcgccatgctgctggctttagggttcagtaaaggcactacgctggcgttcgtgatggcggccggattcattgccgataccgccagcctgccgcttattgtctccaacctggtgaatatcgtttccgctgatttctttggcctcggctttcgcgaatacgcctcggtgatggtgccagtggatatcgccgcgattgttgccacgctggtgatgttacatctctattttcgcaaagatattccgcagaactacgatatggcgctgctgaaatctcccgcagaagcgatcaaagatcctgctacgttcaaaactggctgggttgttttactgcttctgctggtgggatttttcgtcctggaaccgctcggcattccggtgagcgccattgcagctgtgggcgcgctgatattatttgtcgtcgctaaacgcggtcatgcgattaatacgggtaaagtcctgcgcggtgccccctggcagattgtcatcttctcgctcggcatgtatctggtggtttatggcctgcgcaatgccggattaacggaatatctttctggcgtactcaacgtgctggcggataacggcctgtgggccgcgacgctcggcaccggattcctcaccgccttcctctcttctattatgaacaatatgccgacggtactggttggcgcgttgtccattgatggcagcacggcatctggcgttatcaaagaagcgatggtttatgccaatgtgattggctgcgatttgggaccgaaaattaccccaattggtagcctggctacgctactctggctgcacgtactttcgcagaagaatatgactatcagctggggatattacttccgtacagggattatcatgaccctgcctgtgctgtttgtgacgctggctgcgctggcgctacgtctctctttcactttgtaatgagatactgatatgagcaacattaccatttatcacaacccggcccgcggcacgtcgcgtaatacgctggagatgatccgcaacagcggcacagaaccgaccattatccattatctggaaactccgccaacgcgcgatgaactggtcaaactcattgccgatatggggatttccgtacgcgcgctgctgcgtaaaaacgtcgaaccgtatgaggagctgggccttgcggaagataaatttactgacgatcggttaatcgactttatgcttcagcacccgattctgattaatcgcccgattgtggtgacgccgctgggaactcgcctgtgccgcccttcagaagtggtgctggaaattctgccagatgcgcaaaaaggcgcattctccaaggaagatggcgagaaagtggttgatgaagcgggtaagcgcctgaaataaagcggcgatatccactgccgatagttggtaaagtgcgctttgtttatgtcggatgcgacgctaacgcgtcttatccgacctacaaaaccgtgcaaattcaatatatggcatgaaatatgtagagcgtagcgcatcaggcaattttgctatttacgcagcactcctcgcgtaagaattcaattatcgcttccagcattgcgtattgcgaaacacacatcagcgtccgactctcacggttttgtttgaccagtcctaccgataccagtgctgatatatggtggctgagtgtggagccaggtatcccaagctgcttttgcaactcaccgaccggcaacccttgttccccggctttgacaagatgtttaaatatgaacaaacgggtcgggtgacctagctctttcagcgctttagcgacttcttccaactgcatatgacacccctctgtctggttgatatttcgataataccagaaatatcttgatctgaatttcatttcgattattctggaaatatagatttatccaatgaggttacgtatgagtagttggcttgcgatgctgcaagatgccgcagagatgtttgtgtttctcgccgtcgagctttcgttgctgtttatagtgattagtgccggtgtcagcctgataagacaaaaggtgccagaccataaaatccagcagatgatgggggccagaaaagggagaggctatctcctggctgctctgttgggagccgttaccccgttctgtagttgctcgacaatacccatgttacgtggattgttgtcagcgaaagccgggtttggtccgactctcacttttttatttgtttcaccattacttaatcccattatcgtcggactaatgtggatgacctttggttggaaagtcaccttgttgtacgcgattatcgcagccggcgtctccgttcttgccagtattatcctggattctctggggtttgaacgtcatatcattgccagtaaaagctcatcagcaaattgttgtgctccagcaaaaacttcgccgggaacgacatatacgcccataaaagtgagttgttgtagtccagcggctaaagccattgagaaccccgtagttacctgttgcagtaccaaagctgtagtaagtattaatcccataaaactagccaccaaagatgcgttgcaacagtttaaagatgtactgccatatcttttgttaggagtattaataggatcttttatttatggctttattccctcagcgtggattgccgctcatgcaggagcagataatcccttcgccatcccattaagcgccgttgtcggtattccgctgtatatccgggctgaggcagttatccctctggcatctgttctgatgacaaaaggaatgggtctgggagcattaatggcattaatcatcggcagtgccggcgcaagcctgacggaagtgatattacttaaatcaatgttcagaatgccgatgatagctgcattcctgacggttatattaggtatggctatcttgatgggctatttgactcaattgctattttaaatagatgccagcagtaaactataagatgcatagttagtgccatatccttctaagtagaaaatcatagacaggataatccttaaaaatcacaaatgatttaactaatgcattgagaatgatgacggctcggtcaacaagtcatcaacagacaataaccacgtaatcatgcttctctgacattttatcggagaagcaatgactctttgtctcagtaccctcctcctttttaaaaggcagatttcagtcgctaatacaacacatttttaaatacactttaacctggttcattattacacatctaaaatatcacaaaaatattacttcacacactatcggagaacaaaataactttttaaaatgagcgctttttgatagttgttaacgttttcctttacgatactatcactgcctttttttatacacaaatattaccgggtggaaatgaaagggaatttaaaggtaattatatcaggaagatataacgcattatatttattgtgtgtagaagaaaatccattcctgttctaattatccaatttaaaaaccttagcataaaacagatgatgaataaggaatgttatgtcaattgactttaccccaggtataataaatacatatcacggcgatatttataactgcacaacaaataccgataatgttaaaacgccagacacaccgaagtggccttgtgataattgggaagaacaacaacccattaattccacattctctggagaaggatacaatcctgaacaatttgatttagcgcaacaacaactccaacaaattaatgcatgccacacgaacaccacatatacaaatgcagactactcaaaagttgtggttcaacttgtaagtcttattaataacattgaaacgataagttcgacaccacttacgcaacagacacaatcaatacttaatcagattcataacattagatacgaaaaggataaggattctgtatgtcaaatcattgttgtcgttaatccagaacccaacaatccaatcataactaaaattctcgtagaagaaggaatacccgaaatattcagtgtccaaaccgtttcttccgataataaaaattttgctgggcaacgagctgacttaccaactgatataagagacattcaaagcttgtacttaaaaatggcgaagctgtatattgagcacagtgaaaatgaaaataggatggaagcccttgctggatgcgactttattgatttcaacatgacagggcaagatatgtccaggctagtcctaaccttatcaaatttttattttgaagatctacttaatataaatttcactgacgcaaatttatttaacactattttttcacacaaggaaaatcccatccccaaactacataaatatgaacagcatcttgacaaacaaatcaatggcttgttttctacattgttaactattaatgataactctttacgcgcgaaagcggaaattgcttcgagaataattgatttcttagaggcaaaggtagtgaatctttcatttgatgacatattaaaatataagcaagagttcaaaaaaatatgttataaacaacttcaagagtttacaacaccctctctatacaataaaattcaaaaatgggcaacaatgtctaaaaatgaattcatagcatttcattacgagacacttcaacccgaaaagatttcataccccttttatttaaagagagatctgcctaatgaaaaagatataaattatggggtggaaatagaaataccatctggcaacagaattcgcttatcaaatcattatcagaatataataccataatattgattattagcactttataatcattgaataaaaatagattttatgtaattttaaaacaaagggttatattattgggcgatggatactcataccacgccccaaaataacggaattgaactaaacagaagggatataaacatcagacaggtttacgttactatcaggcatatcacctcagaatcagatgaaaactataaagaaatatctattatggttttaatatttgttgataaggatagtaacatgaacatgacaaaaggtgcactcatcctcagcctttcatttttgcttgccgcatgtagttcaattccgcaaaatatcaaaggcaataaccaacctgatattcaaaaaagttttgttgctgttcataaccagccggggttatatgttggtcaacaagcgcgctttggtgggaaggttatcaacgttatcaatggcaaaacggatacgttgttagaaatcgctgtattaccgttggatagctatgcgaagcctgatattgaagccaactatcagggccgactgctcgccagacaaagcggcttccttgatccagtgaactatcgtaatcactttgttaccatcctcggtaccattcagggtgaacaaccaggctttatcaataaagtcccgtataacttcctggaagtgaatatgcagggcatccaggtgtggcatttgagagaagtggttaataccacctataacctgtgggattacggctatggtgcattctggccggaaccgggctggggtgcgccttactacaccaatgcggtgagtcaggtaacacctgagctggtcaaataacaccaccgaaagatgcagatgctttctcagcatctgcatcatgcattacatcaaattaatacacagtaagctaactattattattataagccctgtcctgttaattacctttggcaaactgattataaagttaatgtccgcaccaggagtcggttatgtttcttataattaccagggatacgatgttcttcaccgcgatgaaaaacattctgagtaaaggtaatgtcgttcatatacagaacgaagaagagatcgacgtaatgttgcatcagaatgccttcgtcattattgatacattaatgaataatgtatttcattctaattttctcactcaaattgaacgattaaaacctgtccatgtcattattttctccccctttaatattaaacgctgcctggggaaagtgccggtgacctttgttccgcggactatcactatcattgattttgtcgcactcatcaatggcagttactgctctgtgcctgaagcggctgtgtcactttcgcgcaagcaacatcaggttctgagctgcattgcgaatcaaatgacaacggaagatattctggagaaactgaaaatatcgctaaaaacgttctactgccataaacacaatatcatgatgatcctcaatcttaagcggatcaatgagctggtacgccatcagcatattgattatctggtgtgaatttcaggcttacggtgagtctggctacgctgccacacagattagctaattgaaacgcctttcacccctgccataccttttaataatcgcaacaggtcttctatcgacgttgtggcatgaagctggatatcaatggcgaccacttcatgatcttcattttcctgcaacgaaactaaatccgtttttattttttgctgcttaaaccagtcgagcattgataccgtattaccgttcactaatgtcagctgtaaatggtaatttttgttcatcaggcggaaggttaattgatggaagacttccagcaccaacaaggtcatcactgaaccataaatacccagttcgtacataccgctgccaataaccatacctatggcggcggtcacccagatatccgctgccgtcgtcagacctacaatattttggttacgaacgagaatgttacctgcaccgataaacccgacgcccgtcaccacctgagcagcaatacggctggggtcgagtccgacgtgatctaaagacagcacgtcagcaaaaccatatttcgaaacaatcataaacagggcgcttcccatgccaattaatacatgtgtgcgtaaccctgctcctttgccgcgcatttgcctttccatgccaatagcgccacaggcaattgccgcgagtataagacgtataataaattctgctgtcatataaaaatgcaaaaaggagcagcaagatggctcaacttgctactcctttttacttgcacctcattaattcggcaagtcattagatgcttgatttttgaaggtatacaaatttttctgcgggtttttcttacagtattcgatcactttaggaatttgagtgagatcggtttcatttaaagtaacggtatcgccacctttatatactgtttcttcatgcagcatccaccatgcaaccggggtcattgcttttggattcagatcaataaattcctggcaggtcatatctttagcggattcattggctgccagcgcagattgtgcgttcaccagtgacaaagccgctacagcgcccataaaaataaacgctttacggagagatgaaatattcattttgtaacccattcaatatagagattatatatgaacaggaggaatagctgcttttaaagaagatattccggcctgttcaatatgcaaggaagtacgatgtaacgcattcccggaattacatatctttcttaattttgtcccattcgcctttaactttatctttaaagttggcttgtttatcctgagtacaagcctgaacgatagctggggttacggttgcaataccctgaacatctaaaaccgcatcttctggtttatctttgttgttcagcgcttcagcaaaaccaactgcagttggctggaaggattcgtccacagccaggaaatcttcacaggtccaggagttgaccggttttttgttatcagctgctttttgcgcatccgctgcattgctcacaactggcagaagaagcagaccaccaagaataacgcctaatacttttttcatcgtaatatcctcaactataaagtgaaagagccgtcacgaatcaatttcgacactgaggttataacctggttttctgtatatgtcatgttgatggaaaatatcaaaatcagatatttttatttcaatacaatgagttacagatgcatcagatactgcaattaggaaatttttattaaatcgactgcattcttagacgcgtttttggcatagattgatagcaggggattttcttcttaattttatagggtggttctatgttatatatagataaggcaacaattttgaagtttgatctggagatgcttaaaaaacatcgcagagcaatccagtttattgccgtgctgctgtttatcgtcgggttgctgtgtatcagtttcccgttcgtctctggcgatattttaagcacagtagtgggtgcattattaatctgctcgggtattgcgcttattgtcgggttattcagcaaccgcagtcataatttctggccggtattatccggtttcctcgtcgcagtcgcctatttattgatcggctatttcttcatccgcgcaccggagctgggcatttttgccattgcggcatttattgccggtttgttctgtgttgcaggggttattcgcctgatgagttggtatcatcagcgttcaatgaaaggcagctggctacagctcgttattggtgtgctggatatcgtcattgcctggatattccttggtgcaacgccgatggtgtctgtaacgctggtttccacactggtgggaattgaactgatatttagcgccgccagcctgttcagcttcgccagtttgttcgttaagcagcaataattaccccggttgtcacccggatcatagtcacttgatgtgactatgatccgattaatactctctccgctacgcagtgttgtagatcaattgcgcactatcattgaaataattacctgctagtgattatttcaacctactgaatttcatctaatttttttcactctatggcaaattagccatttcaaacattatcatggctgatattttccgtagtcaggtttaatgttttaaaagtgctgtgggaaagtgaacaaagagttccgtaagcgttgatgctatgggcggttaaataagtaatccgggttcatttttttgcaactggcgttgattacattgcataaatatccgtgtctccagacgctatataaaaacctgaagacatgaatgcgttatttactcaggtaatttcaatgcgttaaaagaaagctggcaatccaattgccagcttaagtcgaaacaaggagactcgatatttaaatcggattacattttaactttagtaatattcttcagagatcacaaactggttattgataacttattcttgggcagtaatccgcaaacgttaactttttgtttgctatttacaagctgataacaaccaggaatcttacttaggatcaatatatggagtgcgtgatggataaatctgaagtattgattagtgttaatagacgtattagttcacgaagggtaaagttcttataggcgtttactatattgaacaacgattcggacaaggatgtaaataatgaaaaggatgacatattcgaaacgataacggctaaggagcaagttatgatttttctcatgacgaaagattcttttcttttacagggcttttggcagttgaaagataatcacgaaatgataaaaatcaattccctgtcagagatcaaaaaagtaggcaataaacccttcaaggttatcattgatacctatcacaatcatatccttgatgaagaagcgattaaatttctggagaaattagatgccgagagaattattgttttggcaccttatcacatcagtaaactaaaagctaaagcgcctatttattttgttagccgcaaagaaagtatcaaaaatcttcttgagattacttatggtaaacacttgccccataagaattcacaattatgtttttcacataatcagttcaaaattatgcaactgattctgaaaaataaaaatgaaagcaatatcacgtcgacgctcaatatttcgcaacaaacattaaagattcagaaattcaacattatgtacaagctgaaactaagacgtatgagcgacatcgtcaccctgggtatcacatcttatttttagtcaggacataagcaactgaaattgatggctggcatgacgagggatgcagatgctgatttcattacccccggtgattactaaaggagaggctaaaacgactttattcccctggtatgtgtatccaccagtagaacccttcgttgcccgaatgctggcaggaactgttggcagaacggcaacattttttttgtcgttgacctcaccatgtcgatcactgtgcctgtatcccaccttactggctgacaaccccactatgccgctggtctgtaaatccctcatatctctcctcgcgcgcaatttaaagaaccgttatttctcaagaattttcagggactaaaatgaacagaagaagaaagctgttaataccgttgttattctgcggcgcgatgctcaccgcctgcgatgacaaatcggcggaaaacgccgccgccatgacgcctgaggtcggtgtcgtcacactctcccccggttcggtcaatgtgttgagcgaattgcccggtagaaccgttccttatgaagttgccgagatacgtccccaggtgggcggtattatcattaaacgcaactttatcgaaggcgataaagtgaaccagggcgattcgctgtatcagattgatcctgcacctttacaggccgagctaaactccgccaaaggctcgctggcgaaagcgctctctaccgccagcaatgcccgcatcacctttaaccgccaggcatcgttgctgaagaccaactacgttagccgtcaggattacgacaccgcgcgcacccagttgaatgaagcagaagccaatgtcaccgtcgccaaagcggctgttgaacaggcgacgatcaatctgcaatacgcgaatgtcacctcgccgattacgggcgtcagcgggaaatcgtcggtgaccgtcggcgcactcgttaccgctaatcaggcagattcgctggttaccgtacaacgtctggacccgatttatgtcgatctcacgcagtcggtgcaagatttcttacgcatgaaagaagaggtcgccagtgggcaaatcaaacaggttcagggcagtacgccagtacagctcaatctggaaaatggtaaacgctacagccagaccggcacgctgaaattctccgacccgacagtggatgaaaccacgggctccgtgacgttacgggcgattttccccaacccaaatggtgacttgctgcctggcatgtacgtcacggcattagtggatgaaggtagccgccagaatgtattactggtgccgcaggaaggcgtcacccacaacgcccagggtaaagcaacggcgctcattctggataaagacgatgtcgtgcagctacgcgaaattgaagccagcaaagccatcggcgaccagtgggtcgtcacctctggcttgcaggctggcgatcgggtgatcgtttccggtttgcaacgcattcgtccgggtatcaaagcacgagcaatttcctccagccaggaaaacgccagcaccgaatcgaaacaataacgttgcaggcttaaggggactttcatggctaactattttattgatcgcccggtttttgcctgggtacttgccattattatgatgcttgcaggtggtctggcgatcatgaacttaccggttgcgcagtatccgcagattgcgccaccgaccattaccgtcagcgctacctatccaggtgccgatgcgcaaacggtagaagactcggtcactcaggtgattgagcaaaatatgaatgggcttgatggcctgatgtacatgtcttcaaccagtgatgcggcgggcaatgcctctatcactctgaccttcgagactgggacatctcctgatatcgcacaggttcaagtgcaaaataaactgcaactcgctatgccttcattacctgaagcagtgcagcagcaggggattagcgtcgataagtcgagcagtaatatcctgatggtagcggcgtttatttctgataacggcagcctcaaccagtacgatatcgcggactatgtagcgtctaatatcaaagacccgctaagccgtaccgcgggcgttggtagcgtacaactctttggttccgagtatgccatgcgtatctggctggacccgcaaaaactcaataaatataacctggtaccttccgatgttatttcccagattaaggtgcaaaacaaccagatttccggtggtcaactgggtggcatgccacaggcggcagaccagcagctaaacgcctcgatcattgtgcagacgcgtctgcaaacgccggaagaatttggcaaaatcctgttgaaagttcagcaagatggttcgcaagtgctgctgcgtgatgtcgctcgcgtcgaacttggggcggaagattattccaccgtggcgcgctataacggcaaacctgctgccgggatcgccatcaaactggctgccggagcaaacgccctggatacctcgcgggcagtcaaagaggaactgaaccgcttatcagcctatttcccggcaagtctgaagacggtttatccttacgacaccacgccgtttatcgaaatttctattcaggaagttttcaaaacactggttgaggctatcatcctagtcttcctggtcatgtatctgtttttgcagaatttccgtgccacaatcatcccgacgattgccgtaccggtggttattctcgggacgtttgcgatcttgtcggcggtcggtttcaccatcaacacgttgactatgttcgggatggtgctggcgatagggttactggtggatgacgccatcgtggtggtggagaacgtcgagcgtgtcattgcggaagataagctaccgccgaaggaagcgacgcataaatcgatggggcagatccaacgtgcgctggtcggtattgccgttgttctttccgcagtgtttatgccgatggcctttatgagcggtgcaaccggggagatctaccgccagttctccatcacgctgatctcctccatgctgctttcagtatttgtggcaatgagcctgacccctgccctgtgcgccaccattctgaaagccgcgccggaaggcggtcacaaacctaacgccctgttcgcacgcttcaacacgctgtttgaaaaatcaactcaacactataccgatagcacccgctcgctgttgcgttgtaccggtcgctacatggtggtctacctgctgatttgcgccgggatggcggtgctgttcctgcgcacgccgacctctttcttaccagaagaggatcagggggtatttatgaccaccgcgcagttaccttccggtgccaccatggttaacaccacgaaagtgctgcaacaggtgacggattattatctgactaaagagaaagataatgtccagtcggtgtttaccgttggcggctttggcttcagcggtcaggggcaaaacaacggcctggcgtttatcagtctcaagccgtggtctgaacgtgtcggtgaggaaaactcggttaccgcgatcattcagcgggcaatgattgcgttaagcagtatcaataaagccgtcgtcttcccgttcaacttacccgcggtggctgaactgggtaccgcgtcaggttttgatatggaactgctggacaacggtaacctggggcacgaaaaactaacccaggcgcgaaacgagctgttatcactggcagcgcaatcaccgaatcaggtcaccggggtacgcccgaacggcctggaagatacgccgatgttcaaagtgaacgtcaacgctgcgaaagctgaagcgatgggcgtggcgctgtctgatatcaaccagacaatttccaccgccttcggcagcagctacgtgaacgacttcctcaaccaggggcgggtgaaaaaagtgtatgtccaggcaggcacgccgttccgtatgttgccggataacatcaaccaatggtatgtacgcaacgcctctggcacgatggcaccgctttctgcctactcgtctaccgaatggacctatggttcaccgcgactggaacgctacaacggcatcccgtcaatggagattttaggtgaagcggcggccgggaaaagtaccggtgacgccatgaaatttatggcagacctggtcgctaaacttccggcaggcgtcggctactcatggaccggactatcgtatcaggaagcgttatcctcaaatcaggctcctgcgctgtatgcgatttcactggtcgtggtgttcctcgccctcgccgcactctatgagagctggtcaattccgttctcggtgatgttggttgttccgttaggcgtcgttggcgcattactggccaccgatctgcgcggcttaagtaatgacgtctacttccaggttggtttgctgaccaccatcgggctttccgccaaaaacgccatcctgattgtcgaatttgccgttgagatgatgcagaaagaagggaaaacgccgatagaggcaatcatcgaagcggcgcggatgcgtttacgcccaatcctgatgacctctctggcctttattctcggcgtgctgccgctggttatcagtcatggtgccggttctggcgcgcaaaacgcggtaggtaccggcgtgatgggcgggatgtttgccgcaacagtgctggcaatttacttcgttccggtctttttcgttgtagtggaacatctctttgcccgctttaaaaaagcgtaacgtgtaaatgagagtaaggttgaacatgaaggttcagccttactctttcctgctaaccattcaccactcaacaaccagctaaccgtcaggaataccaggcttagtacacagcactgaaagtagaaaccactccagccattcgtcatcaatttgaacaacacaatactgacccacattcccgtaatcgtatgaattgtcagcttaataatcccaaacatgccgagtcttttcctcctgaaaataccgataccgcctggcaaactgcgaaagagaactagccggtagcccggcagaaatcatcagggaagagtttcacatgaagcaggtgtgagatcctgaccaatattcaaatgcgaaatatgtcaggaaaaggtacctggcgaatgttgcgcaaactgatgtggcgttacaccataatattgtcgaaatgtgtttataaagtacgatgtactgctatagccacatttttccgcaatagtatgcagaggaatttgacgtaactcgagtaatcgtctggccatcgacatcctggaggcgagtaatattttactgaaacaggtattttcatcctgcaacttttttttgattagactctcgctggtatacattctttccgcgatatcgcgcagataccaacgtttggcgatatcaaagctaataaggcgttcaacttttcctgaaacagtgctgatgctattgaaaagtaaggggatcagttctttcttatgagaaaacatcgataaacaggaaaggtagagcatattgctcagtatcggtgaatttaccccggattcattgaagctatcaaaaatcgccgtcaccagcggcatggggggtgactggttaattaacaaacggtctttgctgtgtaaccctaaattgcgtggtagctgacgaatattttgtaagtaatggcaaactgtcagctcatcgatatccagtcgtcgcgtatccggtgaacaaaacgcaaaatcgtctgccaaatttttctccagcagcagaatactctcgttatgcagcgatattttttgctgttcatgataaatatcgaatgaacgacgaatgaggatcaccgagcagacatgagtcatgattatcccttatatttcatactgcgattatttcaatttcagtatactaatgaaatgatgccagactgtttcttagcgcaaaaactgccagatttggtaggaccaaaatttatccacaaagtagttttgcataacagttaattgataataagtaaatgcagcacgaatatattttcgcacagcgtatagcttatgtttataaaaaaatggctgatcttatttccagtaaaagttatatttaacttactgagagcacaaagtttcccgtgccaacagggagtgttataacggtttattagtctggagacggcagactatcctcttcccggtcccctatgccgggttttttttatgtctgagtaaaactctataatcttattccttccgcagaacggtcagtgccgtaaaaattcccttgcgcaacaatacttgccgccgagtcacggttcgacaatctctgcgccgatcgctcctgatactctgtgggcgtcatcccataataatttcgaaagacgtaaatgaaatacgacacgctgtgatatccacaggatactgcaactcgcttaattgaaaaaccatgtataacaataagttgcaaagcacgttgcattctacactcagtaagcaactgtgaatatgatgtctcttcttcgcgcaattttttctttaacagacttggactcatcaacagctcgctggcgattcgggctagtgtccactcatgggcgatattattattgataaccgtacaaactcgtgttcgcatgttcggttgtaaaacgttcagaagcagcggtataaagtgctcatcctcaagaaaaacagataacaacgcaaagattaatgctcttttacgtagcatttctgcatagcgaagattcttattctgcgatagttgcgcaacttcctgaaaaacaggaatatctctactacagtgatgaacgagtaatgaagaaacttttttatgtgcatgaagatttaatgcctcctccttgagcatcgggagaaataatgaaagcgtgtcccttgacacgaatacaaaattttcaacacacttatctactcgaatttggcttgcatccgcaaaaaccaggtcaccgccattaaaatagcgatattcaccattaaccatggtgagaatatatttatgtcttgcatacgcaattagacaattcccatgtagtgattgcatagttgacttaatattacataaacatattactgtttattaatgtagcacgccgccctcttaagtcaaattgattgataaataaatttaaacgaagcgggagaacaggatgataatgtgtgatgttctacgggcaggatgactggatttataatacaaaaacgtgtttaagaacgcagggaaattaatagtaagcaaataatcccttttcgtgacattaaaggtaatcgctacatttaataaacattcatataacatatatcttatcaacacgatgaatagacagccaatatattattgcgattaataagcaaccgaatgcccagctgtttttttaaaggctgggcattcggtttttacaacgttatgttatcaggtgtgtttaaagctgttctgctgggcaataccctgcagtttcgggtgatcgctgagatatttcagggaggctttgtagtcttccagcaacagttcagcaaagtccatttcgaagccgcgacgacacataatgcgcatcaccacgatgtcggtggcttcaccgccgagagtgaaggccggaacctgccagccgcgcagacgcagacgttcagagaggtcgtacagggtgtatcccggatcttcaccatctttcagtttgaagcaaaccgccgggatgccttcgtccgggcgacccgtacagatgaactcatacggccccagtttggcgatttcatccgccagataagcggcaacctggtaagaggcgttctgtactttggtatagccttcacgaccgaggcgcaggaattcatagtactgtgcaattacctgacccgccgggcgggagaagttgatggcaaaagtaccaatttgaccacccaggtagtcaacgttgaacaccagttcctgcggcagcgcttcttcgtcacgccagataacccagccgcagcccagcggagccagaccgaatttatggcctgaagcactgatcgatttcacacgcggcaggcggaagtcccagacgatatccggggcgacgaacggtgccaggaagccaccgctggcagcgtcgatgtgcatgtcgatgtcgataccggtgtcggcctggaatttatccagcgcatcgtgcagcggttgtgggaactcatagttaccggtgtaggtcacgccgaaagtcggcaccacgccgatggtgttttcgtcacaggcttcaatcatgcgtttcgggtccataaacaactgaccggggcgcatagggatctcacgcagctccacatcccagtagcgggcgaatttatgccagcagatttgtaccggaccgcacaccaggtttggtttatccgttggtttgcctgcagcttccatacgcttgcgccaacgccatttcatcgccatcccgccgagcatacaggcctcggaagaaccaatggtgttggtgccaacggcctgaccatttttcggcgcaggcgcatgccacagatcggcaaccatatttacgcaacgcaggtcgatggctgcggattgcggatattcttctttgtcgatccagtttttattgatcgacaaatccatcaatttatggacgttttcgtcgtcccaggtctggcagaaagtggccaggttctgacgagcgttgccatcaagatataattcatcattgataatctgaaatgcgacatcatcgcgcatttcgtgcagcggaaatcgttttgactccgcgatagtagaaatggcctttgcgccaaaacgtgaatcgagtagttctgagcggaaatccgttaacagcttctggtccatttcgaactccttaaatttatttgaaggcaataaaaaagtaggatttatccgcaatggaagcaaggcattacaggcttaatttaaataacagaatcctaagcagaaaaacgactttttataatataaacatttaacatgataatattaaaaacagactttattatcgtaataaaaatcgcccaaacattgctgttcgggcgatcaaattaattattgtttatcctgcatatacggcgtgtacaccccgttcagactgtgcaggaaagctacgatatcatccacatcctcctgcggcagctctttgcctacctgatagcgcagcatcagtttcaccgccccgtccagcgtcggcacgtcaccgcgatggaagtacggtgccgttaaagcaacgttacgtaaaccgggtactttctgacgcaatttatcacgctcttctttagtcacattcatacgaccaatatccgccgccgtaatttccccaaagttaaagtcttttttcagccccaacggttcaaaggaacgtccgccgagaataataccaccatgacaagttgcacatttattatctttaaataattgatagccttttttctgttgcgccgtcagcgcattttcatctccgcgcaaccatttatcaaatggggaatccggcgtaattaatgttttctcaaattcagcaatggcatcagtaatattttcgccactgaaaccttgcggatagacttcgaggaactgcgttttaagctgcggatctttttccagcttagcaataatttcgtcccaggatttcgacgccatttcaatcgggttcaacggcggtccaccagcctgatcctgcaatgttgccgcacgaccatcccagaactgctcaacgttaaatactgagttaaataccgtcggcgcgttaatcggcccaactgcgccaccaacaccaatcgatgtttttctgccatcgacgccccccgcattcaacgcatggcaatgagcgcatgaaatggtgctatcagccgataaacggggatcgtgatacagcgcaaaacccaacgccactttttgcgcatcggtaggcagtttttgcgggatgggctgcaccggttcattgcgatgttccggagcagtatcattgctggcgtaatattccgcgcgctgttttgcaatccaggccagtatttccgcccgctcttcatcactcaccttacccgcccagtgtagcgcggtataacgcgttggtggcatagtttcatactgcatcacccattcaatcttattcaaatcgctttgcgaaacgggtttatcagccagcagtgccgcacgcacggcctcaaggttaaaagatttatatccaagcttaatgtcgtaatccatcaactgtttcgcgccaggaatataataataggcgggtaattctgccgaaggcgtgtggcaatagtcgcatcctttttcgcggagaaagcctaaaaccttattattttcactgacagcagatgcctgaacatcggcctgtttactgcgtttattatcgtggtaccacacataaccagataaccctaaatagcaaatcgcgacgccagccaggccgatcgcggtaatacgtgagaccattttcattattcttccctcacggtggtgagttattgtgacccagaaaattttccagaatgctgcaaacgtctctgcgagacaaagccatcataaaaaacagggagatacgctttttgataggaatcaatcaattacatgaatataaactatcaataagatagcctgtgcctattacccagatcaggaatggcatatcatgattgcggcgagagcaggattgaatgttctgaaaatgaaaaacaacaccaaatcggtatttttataaattccattgatattagtgcgttatattttttgacaggttaataaacgtgatccaccgcacgctttgtcgcccaccaggcggagcgaatgactacccttaaagaaaagccaataattagcgacgaatttcggaggttggatccttatgctcaatcagaaaattcaaaaccctaatccagacgaactgatgatcgaagtcgatctctgctatgagctggacccgtatgaattaaaactggatgagatgatcgaggcagaaccggaacccgagatgattgaagggctgcctgcctctgatgcgctgacgcctgccgatcgctatctcgaactgttcgagcatgttcagtcggcgaaaattttccccgacagtaaaacctttcccgactgcgcacctaaaatggacccgctggatatcttaatccgctaccgtaaagtgcgccgtcatcgtgattttgacttgcgcaagtttgttgaaaaccacttctggctgccggaggtctactccagcgagtatgtatcggacccgcaaaattccctgaaagagcatatcgaccagctgtggccggtgctaacccgcgaaccacaggatcacattccgtggtcttctctgctggcgctgccgcagtcatatattgtcccgggcggccgttttagcgaaacctactattgggattcctatttcaccatgctggggctggcggaaagtggtcgggaagatttgctgaaatgcatggccgataacttcgcctggatgatcgaaaactacggtcacatccccaacggcaaccgcacctattatttgagccgctcgcaaccaccggtttttgcgctgatggtggagttgtttgaagaagatggtgtacgcggtgcgcgccgctatctcgaccaccttaaaatggaatatgccttctggatggacggtgcagaatcgttaatccctaatcaggcctatcgccatgttgtgcggatgccggacggatcgctgctcaaccgttactgggacgatcgcgacacgccgcgtgacgaatcctggcttgaggacgttgaaaccgcgaaacattctggtcgcccgcccaacgaggtgtaccgcgatttacgcgcgggggcggcctccggttgggattactcttcccgttggctgcgtgatactggtcgtctggcgagcattcgtaccacccagttcatccccatcgatctgaatgccttcctgtttaaactggagagcgccatcgccaacatctcggcgctgaaaggcgagaaagagacagaagcactgttccgccagaaagccagtgcccgtcgcgatgcggtaaaccgttacctctgggatgatgaaaacggcatctaccgcgattacgactggcgacgcgaacaactggcgctgttttccgctgccgccattgtgccactctatgtcggtatggcgaaccatgaacaggccgatcgtctggcaaacgccgtgcgcagtcggttactgacacctggcgggattctggcaagcgagtacgaaaccggtgaacagtgggataaacccaacggctgggcaccgttacaatggatggcgattcagggatttaaaatgtacggcgatgaccttctgggtgatgaaatcgcgcgaagctggctgaagacggtgaatcagttctatctggaacagcacaaactgatcgaaaaataccatattgccgatggtgttccccgcgaaggcggcggtggcgagtatccgttgcaggatgggtttggctggactaacggtgtggtacgccgtttaattggtttgtacggcgaaccataatatttttacagccagccgctaacttcctgctggctgtaaaattatcctcttcaggaggagatatttaacatcattgccgcctgggtgcgatttttcacttccagacggcgatacagggattccagatgcgcttttaccgttccggtactgatattcagcgctctgccgatctccttatttgattcgcccgccgctaacatggttaaaatctcccgctggcgggcgcttaacgatttgagatctttaatgtccttttccggcgtcgtccgccagtctccaggcagaaacatcatccccatcgccgcactatttaccgccaacgcaaatgtctcgacggttgaatcacgaggcacaatggccagcacattaaaatggataacttcctgtaaccaccgtttattgcaatccgtcgccgtaattaacaccttaacctcaggaaattgcaccacggttttttgcagcaaccagtagcaaaactcaccatcctgatcgccatcgagcataactaaggcttcagggtaactttccagcttttgccataactcgtctgcctgactggccccctgaatactcactcctggaatacgctgctgtaaactgattttcattccatgaataaatattgactgcctgtcaaacatgactatttgcataactgaatctccacctgaatacgttaaaaagacttaagtagtggaagggtattacccgcgagaaaaaataagaattcgccatttggcggtggccattctacagagatgacgtgtagaaaatagttaccgatataaatagttacagctaaacgcctgaaattacatgtcgagggcactatttaaaacaattttgaggatttccttatattggtggttagtacgcatgcaattaaaaatgaaattccgcgaccacaagccaaaataacaaacggcaaggagacaaaaataagcacaaatagccaacacgtcctctgttcactttaaagggaatcgctgaaaaatacgctctgtttaaggggattcacctttctcagaaagctattccgcccttttcctgctgagaaatcgccacattcggcatgacaacattgtgaaacccggcattagatgttagaaaaaacaataaacaatgcgatatgcgcgttactgtttcgctgtgaacaacaatcggtcaaagaaatggataaaattcacgcaatgcagttgttcatcaaagtcgcggagctggaaagtttttcccgcgcggcggatttctttgctttgccaaaaggaagtgtttcgcgccagatacaggcactggaacatcaacttggcacccagcttctccagcgcaccacgcgacgggtcaaactcacgccagaaggcatgacctattatcaacgagcaaaagatgtgttgagtaatctcagcgaactggacggtctgtttcaacaggatgccaccagtatcagcggtaaattacgcatcgacatcccgccaggaatcgcgaaaagcctgttactgccgcgcctgtcggaatttctctatcagcatccgggaattgagctggaactgagtagccatgaccgtccggtagatattcttcatgatggttttgattgcgtgatacgcactggcgcgttaccggaagatggcgttatcgcccgtcccctcggcaaactgaccatggtcaactgtgccagtccgcactatctgacgcgctttggttatccgcaaagccccgatgatctgacttcacacgcaatagtgcgttatacaccgcacctgggtgtacatccgttaggttttgaggttgccagcgttaatggcgtccagtggtttaagtctggcggcatgttgacggtaaacagtagcgaaaactatctcaccgccggtcttgccggtctggggattattcagatcccgcgcattgccgtgcgcgaagccctgcgtgccgggcggcttattgaagtattacctggctaccgtgccgagccgctctccctttcgctggtttatccgcagcgtcgggagctttcccggcgtgtaaacctgtttatgcagtggctggctggcgtaatgaaagagtacctggactgaccgactatactttttaagaatgaccacgacagaaggacaaaagagcggatgacgcaggaaaacgagatcaaacgtcccatccaggatctggagcacgagccgattaagccgttggataatagcgagaaaggcagcaaagttagccaggcgctggaaaccgtcaccaccactgccgaaaaagtccaacgccaaccggttattgcgcacctgattcgcgcgacagaacgctttaacgatcggctgggtaaccagtttggtgcggctatcacctatttctcatttttgtcgatgataccaattttgatggtgtcgtttgccgcagggggctttgtgctggcctcccatccgatgttgctacaggatatcttcgacaaaattctgcaaaacatcagcgatccgacgctagccgccacgttgaaaaacaccatcaacaccgccgttcagcagcgtacgactgtagggcttgtcggcctggcggtggcactttattccggcatcaactggatgggtaacctgcgtgaagcgattcgtgcccagtcgcgcgatgtctgggaacgctcgccgcaagatcaggagaagttctgggtaaaatatctgcgagattttatttcgctgattggtttgttgattgcgctgattgtgacgctttcgatcacctcggttgccggttcggcgcagcaaatgattattagcgccctgcacctgaacagcattgagtggctgaaaccgacgtggcgattgattggcctggcgatttccaccttcgccaactatctgcttttcttctggatcttctggcggttgccgcgccaccgtccgcgcaaaaaagccctgattcgcggaacatttctggctgctattggttttgaagtgattaaaatcgtgatgacctacaccctgccatcgttgatgaaatccccctctggcgcagcatttggttccgtgctggggctgatggcatttttctacttcttcgcccgtttgacgctgttttgcgcggcgtggattgccaccgccgaatataaagacgacccgcgaatgccggggaaaacgcagccttaaaataggccggatgcggcgtaaacgccttatccggcatacgattttattcggcctggctccccgtaggccggataagatgcgccagcatcgcatccggctataatgcgcacataacctcttgaaactcgtccccagagcctcttcagccatctatttgggagcaaacaatttcattccaactcataaccccagcatataaatccagttggtaacttttatttaacctgaaaccagttttatccactatttataaaattatgtgaagcatttcatagaagaaaaatcactggcctaaacattatcccctttttgcctgatttttgaccatttccgcgatttgttacacattgaaatatcacttttgctgtgcgtaatatggctattcgttagccaaaaaataagaaaagattatgcaagcaacagccacaacactcgaccacgagcaagaatacacgccgatcaactcgcgtaataaagtccttgtcgcctctctcattggcacagccattgagttcttcgacttttacatttacgccactgcggccgttattgtgtttccgcatatcttcttcccgcagggcgatcctacggcagcaacgctacagtcgctcgccaccttcgccatcgccttcgtcgcgcgccccattggctctgccgtttttggtcattttggcgatcgcgttgggcgtaaagcgacgctggtcgcctcgttgctaacgatggggatttcgaccgtggtgattggtctgctgccgggctatgccacgattggtattttcgccccgctgctgctggcgctggctcgatttggtcagggtctgggcttaggcggtgaatggggcggcgcggcgctgctggcgactgaaaacgccccaccgcgcaaacgtgcactgtatggctcctttccgcagctgggcgcaccgattggcttcttctttgccaatggcactttcttgctgctttcctggctactgaccgacgagcagtttatgagctggggctggcgtgtgccatttatcttctcggcggtgctggtcattatcggcctgtatgttcgcgtgtcgctgcatgagtcgccggtgtttgagaaagtcgctaaagcgaaaaaacaggtgaagatcccgctgggtacgctgctgaccaaacatgttcgcgtaaccgtactgggtacgttcattatgctggcaacctatacgctgttttacatcatgacggtctactctatgacctttagtaccgccgccgcgccagttgggcttggcctgccgcgtaacgaagtgttgtggatgttgatgatggcagttattggttttggcgtgatggtgccagtcgctggattactggctgatgcctttggtcgccgtaaaagcatggtaatcatcaccacgctgatcatcctgttcgcgctgttcgcctttaacccactgctcggttctggcaacccgattctggtttttgccttcctgctgctggggttaagtctgatgggtctgaccttcgggccaatgggtgcgctgttaccagagctgtttccgacagaagtgcgttataccggagcatcgttctcttacaacgtagcgtcgattctcggggcttccgttgcgccatatatcgcagcctggttgcagactaactacgggctaggtgcggtggggttatatctggcggcgatggctggcttgacgttaatcgccctgctgctgacccatgagacgcgacatcagtcgttgtaataagagtgaaaagcctgatgcgctacgcttatcaggcctgaatttccatacaatatattgaattcgcaaggatttgtaggccggataaggcgttcacgccgcatccggcatgaacaaagcacactttgccaacaatctaaatctgtttaattgccggatgtcagacatccggcaattatcatcacttcttcatctgcgacaaaatcgtccgacactgattagcctccccttcggaaggtgagatcagtgccagtaacgccgccgccggtgttaccagcgttgccagtgccgcagcaacagcaccacgggcaatcagcggtccggctttcaccccagcctgcggatttttaaacgtcccccgcacatacagcggcgaacgcagtgtgataatccgaattcctttactctccggatcaatagtcaaatccagctgttccgaagcaaaacttgccgtgccggtaacattaatcaacgcgttctcagtatcgaaagcaaaaatctgcgggcgcgccacgccgttggcaatattcagattcgccgccgcgcagttcacccgcacctcatcatcaccaaatatcgcaccgacaatgtagttgccgacattcagcccaacaatctccatcaggttgcggctcaccagcccgtcattcatcaacagtttcaggttgccgttactgttgcctaaaagtgccgccaccgagttaccgctaccgcgtagttccgcgtcaccgttcatttcccccagcgtcttctgcatcagttccacatcgggcatcagttctttcagtttcagtcgacgagcctgaatatctgcccgcccctgcatcggctttttatcgccttccagatgaatattcgccgcaatgctgccgcccgccatgccaaatttcagcggttgcaggcgcaggtcagcatttttgaggatgatatgagtagaaagatcgctaatcggcaggctactgccatgctcaatgcgccgccctttgaagcgaacatcggcatccataacgtcccatttatcggtttcgaagcggtcataaggcagcactttgcccgcaggctgaacgcttttttcgcccttcttctgttcagaccgtttcgacttttctgcccctttcccggaatcaacgccaatcaacggtcccaggtccgccagccgcaattgccgcgactcgacatcaccttccagttttggtcgtggctttccggtggtgtagaccagagaaccgtggatatcgctatcaccaattcgcccattaaaaccgcgataatcaaagaccgacgatttttcagtgtcgattttcgctaccagccgaccatccgtttcaaacggcggggtatcgggcagcagaacgcccgtcagttcatagagatcacccagtgaatcgccagaaaatttaagccgtaaatcgacaccgcccatcttcattgggtcattcacgacgccatcaaaagcaacacgggtgttaccagagcggaaatcagcctgtaccggaaacggcgtcccttcgccacgcagcgccagcataccgcctatttttcccgtacccgtgagcggttcaccgttatatcgtccctgcgccttcaggccaaaaacgtaatcgcccaccttttctttatccgctttacctttcgatccagtaacttcgctgaacggcagcggcttgcctaagggatcaacaaaaatctccagatccgctttgcttactttgtcatcaatggcgatccgcccttgatcgaaaagaatattatccagccgaaacgaccatgccgacggctttgcattcgcgtctttgttatcatcgttggcaagattaaacgtccagttattgttcttttcagagaggcgaatcaggcgcgcgtcgggcttttcgagcttgatccacggcagccagaccgttttggtcagcagcgccagcggggccagcgttgcctctacgcgtggcaaatgcaccatcgtgacttcgggaatatccggtggattgccaagaatgatgtcttccgcgtgtacatggggccacggcacccagctgcgccagccagtttcttgtttttgccgctcccacaccacgcccagatcgccacggatagcgaacggacgattcaactccgcagagactttctggttgatagtcggtttgagtcgattccagtcaaaagttgcaatcaaaatgatcgccacgacaatcaacaacaagaaagcccctgaaatcgcagcggttattttgcctgccttgctcatcgttcgcttcctcatattcttcctgtgccagtcctaaagatagtccagccaggcggaaaatgaggcagcttatagcgccagaaccgccgtattcagcgtttctatcggtgccgggcgtgaaagaaaccagccttgtgcggcgaatgcgggcgagttctgaacatcacgccactcttccggcgtttctacgccctcgacaatcaccccgcgacaatagcgattcattagatgtaaaagctgagaaaagagtgtgcgtccttccggcgactgacgcagcatcacaaacagttctcgcgcgattttgatgtagtcataacgcacttcacttagcgcagagaaatttgccatcccggtaccaaaatcatccagccacagcgggccaaattcacacatcgaggcaaaggttgaatctttcggcagacggatatgctccaccagttcgaaacgcagccagggaagacgctcaatctggcgcaggatttttggttgctgacgcagggcgatgagcgtagggccatcaatattgaccgatgccagcaggccgtgctctataaagaagtcggctttttgcgccagcaaatcaatctgctctttcacaacctccatccgatggctgacggtgatttcagtaaaatagcgatccggcggcaggcgttgcgaagggttcaagggatgcgtgaccaccgttaatagctccacggccattaaccgcccgcatgtttgatagatcggctgccaggtgtaagcacgctcacactgcaaccaaaaacgccgttcctgcaagctctcgatgcttgcttcagggttgcttattcgctggataacctgccttatcatcaaagatgtcctgtgtttaaaagtgatgctgcccggactcgacaaagattatcggcgcgtaagggcagaactttaccgcctggccggggtaaatttcctcactccacaacggaatctttcaggaatacgttctggctcaaaaaaataatggaacactgttttaatatggttgaccagcaaaccaccacagcgcaaactaacgctaattttttacagatcaggttcacgactatgtccaaaaagattgccgtgattggcgaatgcatgattgagctttccgagaaaggcgcggacgttaagcgcggtttcggcggcgataccctgaacacttccgtctatatcgcccgtcaggtcgatcctgcggcattaaccgttcattacgtaacggcgctgggaacggacagttttagccagcagatgctggacgcctggcacggcgagaacgttgatacttccctgacccaacggatggaaaaccgtctgccgggcctttactacattgaaaccgacagcaccggcgagcgtacgttctactactggcggaacgaagccgccgccaaattctggctggagagtgagcagtctgcggcgatttgcgaagagctggcgaatttcgattatctctacctgagcgggattagcctggcgatcttaagcccgaccagccgcgaaaagctgctttccctgctgcgcgaatgccgcgccaacggcggaaaagtgattttcgacaataactatcgtccgcgcctgtgggccagcaaagaagagacacagcaggtgtaccaacaaatgctggaatgcacggatatcgccttcctgacgctggacgacgaagacgcgctgtggggtcaacagccggtggaagacgtcattgcgcgcacccataacgcgggcgtgaaagaagtggtggtgaaacgcggggcggattcttgcctggtgtccattgctggcgaagggttagtggatgttccggcggtgaaactgccgaaagaaaaagtgatcgataccaccgcagctggcgactctttcagtgccggttatctggcggtacgtctgacaggcggcagcgcggaagacgcggcgaaacgtgggcacctgaccgcaagtaccgttattcagtatcgcggcgcgattatcccgcgtgaggcgatgccagcgtaaacgcagcatatgcaaaaggctggataaagtgttacccctctatccagctcatccataaatacctgatggttgtgctaactcatcaccatcaggcattactgtgcaggtggaatatccgtcacttcaggatgtacgtcatccgtggcgacagaggtggtcgcagcggcggtagatggggccatgatttgatcccagaccgcctgcaacgctttcatgttaaattccggctcgcctttcggctgcagcagtattaacgccatatcattcgacaactgttgacgcagatcctgatttaacatctctaccgtcaggctattaaggaaatcctgccgcagtttctgatattgctccggcgcgatatcgacaacctgattttgcaacgaacgcatccgctgacccatcagaatatcggtatcagctcgtgcataggcggcaaacagtttctgcagctccagtttcttttgcgccactaacgcattgaactcttcttccggcagacctttatcgcgaaccttcgccagttcacgcgccaccagattaaggttgctgttcagcttgtcgtttggtgattcgatgttgatggcacactgcgcacgcagatacagcacacggcagtcaaatccaagaccgatgtctttgctgttactggcacttaacgcttgctgaacatgccagaacagcgcctcgcgggccaggtccgcacgccagtagcgcagcagtgcggctgattcacgaatcggctgccacggcgtatcccacatgatagataaccggtcctgacgcaccgcgtcagtcataatactcaccgcttccgcacgcagcggagaaagcgtcggcaccggagctggcgtttcacgtttgcctttcagttcgccaaacgttttgtttatttggtcgacaaccgagcgcgcatccacgtttcccaccaccagtagcgtcattgcatccggggtgtaccatttctgatagaaatctttaattttttccgcttcaacgggttgtttcagcggatcggcaggatcgtgacctaacaaggttgaccctttcagacgatagcgccaccagccctctttagtatcggcaggccaggttgccaccatgtcctgactttgcagcgcgtggttgatggtttctggtgtgatggtcaatttgccagtggcatttgccagataagagagcgcttctttcagcaaatcgttacggttattgggcaaactcagattaaacagcgtggtgtcataagagacaattaccggcggcatcgggcgtttagggtcgatcccctgctgccacaatgaacgcgcctgtgctgcgtcaaggccaccgctttgcgttagcgcaatacgagggatggcgtgactgtaaccgctctgttgtgtactttcggcgagcgaaccggtattaaccagcaggcgaatttcaacacgatcgctgggacgctggggggtggtcagcacttgccactgtaaaccgttggaaagcgtcccctgttgccatgctggatcaggctggagcgcatctgcctgcacatagccagcagtggccatcatcagcaaaccgcccgctaaaagtcgaatttttgtgccctgcatgtgaacccctgatcaactatcctggtaataaaaaaactgcccgttgtcggtcagtctaaatgacgttaaaaacacttcgtgttagaccgcaagaacatgaaaatgtcacggaagaagtgaaataaacctgaactcacccaggtggtaagttcaggcacaggggtcaattatgcgcaaacacccgcactcggggaagggagtgcgggcataagtgatgagattaagaggataattcgtgcgttttgccatccggcgcacgattattcagcacatcgtccagttttttgtggtccagttctttcacccacttagcaacgacaatggtcgctacgccgttaccgaccaggttagtcagcgcacgagcttctgacataaagcggtcgataccgaggatcagcgccagacccgctaccggcaaatggcccaccgcagagagcgtcgccgccagcacgataaagccactacccgttacccctgccgcccctttagaagaaagcagcaacacgattaacagcgtgatttggtggacgatatccatctgactgttagtggcctgggcgataaacaccgccgccattgtcaggtatatcgatgtgccatcaaggttaaacgagtagcctgtcgggatgaccagccccaccaccgatttacggcagccgagtttctccatcttgtcgagcatacgcggcagcgccgactcggaagatgaagtccccagtacaatcagcagttcttcacggatgtagcggataaatttgaagatactgaaaccagtcgctttagcgattgaacccaataccagcaccacaaacaggatacaggtaatgtagaaacagataatcagctgccccagttgcaccagtgtgccgacgccgtatttaccgatggtaaacgccattgccccgaacgcaccaataggtgccagacgcatgatcatattgatgatgccgaagatgacctgcgagaaactttcgatgacgttaaaaatcagttggcctttgctgcccagacggtggagcgcaaaaccaaacagtacggcaaacagcagcacctgcagaatgttaccgctggcaaatgcgccaatgacgctcgccgggatgacatccataatgaaggcgacaatgccctggtctttcgcctgatcggcgtaaaccgctaccgctttcgcatcaagcgttgccggatcgacgttcattccggcaccaggctgcacgacgttaacgatgataagaccaataatcagcgcgatggtactgacaatttcaaagtaaagcagtgcgactgcgccggtacgaccgaccgccttcatgctttccatgcccgcaatgcccgttacgacggtacaaaagatgacaggagcgatgatcatcttaatgagcttaacgaagccgtcgccaagcggtttcatttgctcgcctatttcaggatagaaatggccaaggagaataccaatggctatcgctgtcaggacctgaaagtaaaggcttttaaacagagaggttttcatagggtgtcctttagtaaaaccacaggtcttgtaaggttatggggtacctgcggccttaaaataacacccagacaacatcacagaaatgtacctggatcataattgaaacaaaaaggttaaaaagtttgagctggctcgcacaaaccagcactttttaaagttttgtaatcagtttggggtagctacttttcttccaggtaactctcttcgaagatttcaatagggagtgggcgagcaaaaaggaagccctgggcaataccaacgcccgcttttgccagccagtcgcgttgtgcttcagtctccacgccttcggcaatcatttgtaagttcaggctctgcgccagcatgataattgcagcaatcatgctgctatctcccggcaagccttcaacaaacattttgtcgattttcagtacgtcgattggcaacgatttcatatgctgcagctgacgcagccctgcgtagcccatgccgaaatcatccagcgccacccgaactccggcattgcgcagcggacggaggattgccaccgcagcatgagggtcgtcaatacgtcggctttctgtcacttccagaatcagtgttcccggctgaatgcgatagcgggttaacagttccagcatatccgccaccatatttgggtgcatcagttgcagcgcagagaggtttaccgacaagggcagcataatgccgcgctcttgccaggctgcaagcaatcgacaggactcttccagcacccagtgaccgacggtaaccatcagcccacagcactcaatgcgatcgattaagccatccggcaggtcccaactgccatccggttgctggatacgcagtaacacttccgcactgaccagttttccgctggtcatctcgacctgtggctgtaaccaaatagcaaactgatgattttccagtgcattaaggatatcgctctcttccgtcaaccgcttctgggcggcttccatctgctgcggatcaaagaactgaatctgattcttgcctttatggcgagcggtaaatgccgcagaaatagcgcgactgtaaagctgttcggcggtgagatcgccgtagaacatcgccacgccaatgctacagtgcggacggagttgaatacgttcaatcggcaggcgctcgctcatgatagtgagcacttgctgacctaaggtgattgcgtgccacggttcctgtacaccgttggcaatgacagcaaagtcataaccgctaatctgcgcgaggatcatacgtggcgacagtaccgatttgagtttttccaccagcgtcagcagcagaatttctcgttgcgcctctttcagcacgcccgcagtatcacgcagggtttcacaggtgatgatcatcagcgcggtggtttgtttacgcgcgacaacctgctccagcatctccatcagcaaggctttgttcggcaaatccgacaccgggaagcgcatcgcattttcgttctgttcttcataatggcgctgcagcaattgctggttgaggttgtaactgcgcaccaacataccgatttcatcgtcctgatgcagacgcggtaatgccagttggtgaccaacaagctcctgggctgggatggcgttaagttcgcgagcaatattgcgtaacggatgcaaaatcaggcggttaatgcaccagctgatggcgacggtcaggataagcgacaaaagtaagtaaatggtcactaacgttgagagggtgctcatcacgaacttatacatacggaaggaatccgcctgtagtaccagataggcaattggctgcgggtttgccggacgttcgagcgagtaaacgcccagcgagatttgaaccggtagctcaaacaggcgagtaaccattaccggcaccgggcgctctggaataaaacttttacgcagcgcctggaactggttaggcagcactacatcggcacggctgaccacgcctgccggtttaatgctggcaagaatagcttccgcttcgggaatatcgcctttcaaaatagctgaagataagggttcgcggacagagcgagcaatgctttccagttgcgtagccgtgttatagcgattctgctggaccagatggaacagcaaaacggtgcaaaaaataaaaacgaacaccaggacaacggctgccaccattgccatctgcttgattgttaacgagcgacttacgcgcaaattgtctccccccggaaatcccagattgccgcccgagtatacccgatcgcagcggcattaagagaggcgctatctgaaaacttaccagtcggcgtaaggtatcagcggctgcggcggtaaatccatgtcaccctgccatccggcggcggaataacgtacgtagagcaggaaatggctgggtgcgtaatctttcgcctgctggatatcaattgccgtgccaacaaaccagttggaagtaacacgtcgctcaagtaatgcccgcgccgtgtagccgaagccctgactgctgccgccatcgttggattgccgcgcagtttcttcctgccagtcggtcgggatcagattcatcagcggataacgcggcatggttttggtgcgtgaatgcgaccacgagccagacgcacccagctcccacgaccagttttccgtgcgctcccgccacatcaccggtatggcaaacgacaggtattcctgcggactgtagtaaccgccctgaccgagtgagtagccactcagatctttgtcgtaatgccagatcatgttgttcaggccgattgtgacgcggcgattgttctggttaatgaccttatagtaatagcccgtcatccagcgcacgcgccagttatcttcgacatttttaccggttaactggtcgccactaagcgatgcccagacgccgtttgcttcacctttatcgtagctcagacttagccccacaccgtcggcacgtacgccaccccattttttcccggtattgctcggggagtctttttgcccaccaaaggccagcaaagaactggagatgggccgacggtgggcgttaacggtgtaacccagcggcccgatatcatcgctgtaactgatgccgccgaccacatccaccacgttgaagcccatcggcgtggtaccgatatcccagctccagacgtcatttcgccagccgaccgccacgctggcaccggaatccgactggctgcggttgccgctacagtcctgtaatgtacaggtgccccagttgtcatcccatttgccatcggcattagtggagaaactgccgacgttcatattgacgaaatcactgcgaaagaacatccgcccgtcagaatacggcgcatccacctgcaacatggtagtgtgcgctttcagatcggagtaaccaccggtgccgctcgaaccccagtaatcgtgctcaagggtgacgttaagatcctgctggcgatagaggtccgccgcatcgctgcgcacgccacgtttcagccagtcatctttctcgtcgttacgggtcagtcgggtaaaggtgtcgttatcctgcggacgcgtcgtagtcacaccggatgcgaccatggcgtctttgtaggtttccagcgcctgcgttggatcgcccgcctgcgcttcaaacttcgcaccatcacgcagcaccatcgcgctttccatcgacggtggctgagattttgcctgcgggatcaacttattaaacgtccgctgcgctgctgcggtatcgccaagctgcgcctgtgccagcgccacgcgccgctgtgtgttcagcgaggcgttatcggtagcgggcagtttcgccagctggctacgtgccgccgctttgtcaccggcagcaatatccacttccgtcagaccaagaatggcgtcggcgttagctggctcccgcgtcaggacattctgatatgcagcgcgggcggcggtgtaatcacgtcgttgttgcgcccagtcagccagcgtgaggtcaatacgcgtggaaggtggttgctggcgcagcatcgcttccgcttctgcctctttgccgctttctcgcaggcggttagcggtttccagcacctgatcgctttgcagtcgattaaccagctcctgaatattgctgttccactgcgcacgcggcaggctgttgatatgcgccagcgccgctctgtcctggtcatgaccagagagatacagcccgtaagcgtaaacctgctccgggtcattcggcttctgctgcgccagattgcgcattaacgtatcggcctggctgcgttgtccggcctgccagagatcctgcgaaagtcggtaagtaatccatacactgccggggtccagcgccagtcgttgccgctgaagtgctgccgcctgcgcccatttgccctggttttccagtgcctctgcctgctgtgccagacggtcgttttgcaggctgcgttcgatatcatcaatgctacgccgctgactggcagagagcgaggcgataaacgcttcagctttttctggcgattgctggcggtaaatatttgccagcccgcgcacggcgttagtgttgccgctgtccatacgcaaggtctgctgataataacgttcggcggcgggataatcttttcgcgccatcgccacatcgcccagccccagcactgcataactgtcggtgttatcgacattacgcgcctgctggaacaggcgttctgcccggtcaggattattggctttcagcgcagcatcgccctgctggatcgccagccagtagcggttcactttcagcagactattccatttgtcgttgttgctgctgtgcgggtccagtgcgagggctttttccagattcgccactgcattggcgcgatcgcctttctgtgaatatgcctggcccagcgcccccagagcctcactgtctttcgggttcgcccgcactgcctgttgtagttcgggaatggctttacccgccataccagagtccaccgccgctaaaccttgcgcacgagcgcggaaagcaggatcggccagctgtttttgctgttctgccagttgcgattgcgcagccgccacgctatcgccatcactaaagatcgaaagatattttttcagcgccgacacactggcatcgctgacgggcatgtctttaatctgcccgtaccagattttagaggccccttcgcgcccggcgttcgatttcgccatctgttccaggacggcaaaaccttcgtcacggcgatcgctactaaacagcaatagcgccagattgttttgcaggcccgtattgcccggcgtatccgcattaatgcgttttagctgattaatcgcttcgccacggcgagccggaattttcgccaccgtactccagtactcgacagcaatgtcaccttccggcggcgcaccgttgaacagtttgttgtaactcgccacagcttcttccgcatgaccggtagtcgcctgcaatcttgcctgttgcagtgcctgacgaccatccggcgtggaaagtagcatcgtagtccgcgacgatttatacgcatttgaactcggcgctaactgcgacagccgatcgagctgtttttgcgcgccatcaatatcgccctgacgtaacaaagaacggaaacgggcggcaacgacgtccgggttattcggatcaataagttccagccgatataacgactgttgcaccagatcttcacgatgggtcgcttcgcctaaccgaacttgctccagcaactgttgctgagcggttggtgctgcctcgaccatcggcatgacggccagaccgagggaaagcgtgaatatgtttagtgtgaatttgcgcattcctggccccagtcaggtaataactcaccttttgtcgagaagcggaaacggtgttgatcccagccttgtccaaacagggtcagcacatagttgtaataggcatcgctgccgggaaagttatcggccacgcgctggcgctgaacggcctgcgcatcgcggttttgtaaaaaaggcagcatggcggcagaaaaaccgaccggtcctttaccctgcgctttccccgtagccacatccactttttccggcggataaccgtttttctcagtgaatgtcgccatcggtttaaaccggttgagcatccgcgctttttgcggatcgctgtcaggcatcatgcctacccacatgtaaacgcggatagcgtcgtagctgctgatcaatgttttttcggcttttagctgccagcctttgtctttctcatagcgcacccagtctggcgaaaagcctttcggggcggtttccagcaataaacgttgattggtttcgcgcagcgtagtccacggcgcgccaaagcgggtgaaatactgcgccagcgtcggcggcaggtagctggggttaaaacgccagctgttatcctcagcaaaacccactttgcccggtaacaacatggaacccagcccaggcaccgtcaccacttcctcccgcgcgatacgttttagcaacgcgctgccgatgtcggtataacgctgctctttccacaaacgccccgcctccagcaatgaccaggccatccagacatcaccatcggaggccgaattgctgtccagcacttcccacttactgttctctttcttgccccacagccaggcgggcaaaccttcttttaaagaaccctgagcgagattgttctgcgtccagtcgagaatattatcgaaagctgcacggtcgttagccgccagggcaaagaacataccgtaactttgcccttcggaggtggtgattttgcgcgcgtcgctggggtcgatgacgcgcccttcctgactgatgtaatcctttttaaactgctcccaggcaggccaggtacaggctgcctgaacactaaaggcagccagcagcagcatcgtcacgattccactacgcaacacattcatcttcaattactcgttatccgggttaagacgacgacgactaataattcgcagcagacgccacagtacccatgccagcaatatcacactgatagccgccagcaccgccagcagaatcggatggtttgccagcgcataccacacgcgctcgaaccacggcagatgacctacgtaataaacgtcgccaacacgtaggctgttgataccggactcgcggatcaccgcgaccgaaccgaacatggtggcgcgtttgccgctatcgttcaccgcatcgttaagcatttcataaccgcgtgggctatctgccaacagcgcaatcacgctgcgctggtcgttatacggcgactggaagccaatcaccgccgccatcgcaccggaagaggtcagcgttgaccgggtttctgccgcgcgatcgctctcgtccggcacaatgccggggaacggggtctggcgcatcggtgttttcacccagctttcggtcgcctgcaccaataggtcgatctgcttatcgtctttcagtttgtccgggataccaccgatgatcatgatgtcggcatctttgccctgaatggtgctgccatcatcggtcaccgtcagattaatcgccgggaagcccgtctgtgcgccgataaaaccaacagtattcagcaacgtttccatctgtgcttcgttaggcgctttcggcatcacggtgatggtttgcgacagatccgccatccggctgaatgggaagcccgcgttagcaaaggcgcgtagatccggcatcgggatgaagtggtaatacttcgagaagtcgatggtggagtcgtcaccaatcaccacatgattctgcaccggctggaaggtaatacagttatccaccgaaccgcccggcatcgggttcatatactcaaagtcgaagcgcagctggttggtcgcgcccagtttcagcgccggaatagagacatctgttttgccatccagcaaaccttgtaataccggaatccgcagcagcaggcggttcgcctcctgtttgctgctcaggttgaaggattgcaggaactggttattcaggctgatatccatccgcgaactgtctttcaccggcggcatggtgtagcggtaattaatatccatatcaatgccggtactgcgcatcaggtagagatccggcggcaggtttagcgaaacgttaatcgctgctggctcaagaccgctggattgtaactgttcttcataggttttcagttcgccaaatgtgaccggacgatcggtacgtacccagttcggcgcatcgtacggcttacgcggtagcagcagtttcacttcattcactaccacgctttcaccacggaacagaatgttaccctgagcgatacctttcgctgcctgcaacaggtctttgtcgtcacgaccaaacaccaccagcagtttgacgtaaggattctgcggatggttaatcatctcaatcaccggggcttttaccgccggatgatcgcgcaggaagtccggccgtttgtcgttggttgcaaagacaatggcattacgatccggcagttggttatagagcaccgggaagttctgcccacgccagccagaacgcgaaccaaaccacgaggcgacaatggcagaggcttgttgcagcccaacatccggcgcacccgcaaagaccatcggcaaggtgttagtacggttatcgcgcgggtcaaagaatggcaccgggaagtgtgacaggtcattcttcacattcagggtctgataggtcagatccagtccactgctccgtccaacatccagccaaagcgtggtgctggccgggttttcgcacacgtcctgataatggccgacaaactccagccgtacacggttgaagtcggtaataaacagtgggttaatgggcatttgcgccagcgtttttttacccaactgttctttggtcactggcagcacgcccatcagttcatcattgagataaacctttaactgcgactggacaggcagtaacgatggcgatggggtgtattcgaggttgagcatcgccttcgtcaccacttcatcgctgcgcataccaaactcaatgctgccgttcgggttaatgccacgtagcaccatgctgcccggcggcggtgcaatttgcgcaaaggtcagcttcacatcacgcgaaggaccgttctgcgccacgactggcgcatcagcgccctgcacgcccggcatcacttgccccacctgcggattttgttccgtctgggcggctacagctggctcagcattgatcagtggttgcgttgctggcgtcgcctgcgtcatgaaagaggggaacgcactcatccccatagccactgcacaaatccagaatagttttcttttcatcgcgttatcatcattgttgagccaaagcctgatccgatggttgtgccgtttcgctccgctccgggcggcgcggaataaacgatacaacccaggaaaccagagaagtcagcacacggaatatgcccttcaccgaagaaggcgcaaactccgccagatggcggtagccacggaagccgagcttcagaatatccagcagactttccagcggcttatcttccgggtagctgtcctgccagagcgcccatgtatccgcacgggcaaacgtacactgcacaaaatcgatatgttgctgggtggtgagcggcattaatttcagcccaacttcattacccatcacgcgcgccacctgggtcgggaagacgtattcctgctgaccgcgtttaagcaacagattcactttctgcccttccagaatctgcgcctgaccgttgatcttgatccccaaaccaccgtcggagaaatcctgaacggtacacgagaagaggtgaccatcttcgcgggcaattgccgcgggcatcgtcatctccacgcggtgcgatcggcgtacctgtttgctttctaccgataccgcaactgcgccgccaagaacaatcaggttgtagaacacccacaccatactgacgaccacggtgagcatctcggttggcgggccatagaagtagcgccagatgcctaccgcaacgcccaccaggttgagcaggacaaggaagatgtagggccgcgagatcacccagtcgacgtactcttcttccaccagtccacctttggcggtgacgttaaatttgcctttgtgcgggttaatcagcgccaccagcgtcggtggtgcgatataccacgccagcaccgtttcgtagatttcactccagaaagagtggcgatatttgccctggatcttggagttggtcaggctggcatggatcatatgcggcagcacgaatagggcgatcatcaacgctggcgcatagatgatgtaggcatgaagcagcaggaacgccagcggcgcagtcaggaagatcagccgtggaatgcccgacaagaagtggaacatggcgttgacgtaacatagccgctgagcaaacttcagccctttaccggtgagcgggttatcgagacggaagatttgtaccatcccgcgcgcccagcgaatacgctgaccgatatgcgccgacagactttcggtcgccagccccgccgcctgcggaatacgcatatacgcggaggtatagccacgacggtgcaaccgcagagaagtatgcgcatcttcagtcacggtttcgacagcaatgccgccaatttcatccagcggcttacgacgaatcaccgcacaggaaccgcagaagaaagtggcgtcccacatatcgttgccatcctgcaccagaccatagaacagcgtgccttcgttcggcgttttacggaaacgccccaggttgcgttcaaacgggtccggtgagaagaagtggtgcggcgtctgcatcatcgccagctgtttttctttcaggaaccagcccatggtcatttgcaagaacgatcgcgttggtacgtggtcgcagtcgaaaatcgacacgaactcgcctttggcatatttcagcgcattgttgatgttgcctgctttcgcatgttcatgagtggtgcgggcgatatatttcacccccacgttttgcgcaaactggcgaaactcttccctaccgccgtcatcgaggatccagatgttcagcttgtctttcggccagtcgatacccagcgaggcgtaaatagtatttttcaccacgttgagatcttcgttgtaagtcgggacaaagatatccaccgacggccacagcgacatatctttcggcaatggcaccggctgacgattcagcggccatactacctggaagtagccgagcaccagcacaatccacgcgtacgtttcagcgaagagcagaataagcccgcacaccaggctgaccggatcgtcccagttcagcgtagaggtgtaacgccaccagatataacggcaagaaacggtcagcgacagcacaatcaacattagcgccgagaagcgccccggcatccgccgtacgatcagcgctacaccccacagcagcatcaggaagataaactgcgccagcgggttaaacggttgagtaacgcagattaacgccagaatcagcgagaaggtgacgatgataccgaggatcaaccgccgcgccccggcactcaaatgaccgagctcttttttctcatcaagatgctgtgttttatggctaacgcgctcaggcagctcgttcatccattgatggtaacgtccacgaatattttgcagacctgaaaatgcccgcctgcgcggtttcggcgtttctttgcgcgatgcaccgatcaataaccagcatgtttgaatgagataacggaccgggtccagcggacgcggacgcgaggcgttgatatgcggatacaggtttttatgttctgcgcgaatacgctgccagcgcgggtgctccagcggaataaaaatccaggccaggatcatccagaaacagccgagcgtcgcgctgaaagccgacgcaccgtgacgacgataatcgcgataacgcccgataagccgcgcgttgaccggcgggataagcaaccaccgggtcaggatactcatgatgcactcccgactggcgttttcagcccggagtagttcaacaggcaccagttcgccagcgtcagtatctcttcagccgccagcgcatcactgcggtattcaccgactggttgcttagccgccaggcattcagccatcgcttcatcacgatgaatgagcatcggcagcaatcggcgctggctttgcaaccaaagctggtaaatatcgtcctgaacctgactgccaatacggaagtcattaatcaaaatatgtgcgccatccggcagcgcttgctgatgcagtcggatatggcagttggcatccacattgacgattgccagcgagtgatcgcacaaactcagcagctggtgggttatctgcgaggcatcacgcggtaagtcgattaaaatccactggtaacgcccgctggcttttagttgctgtaagccggagcaaatatcgctcagccgggtttgccagtgctgtggattttcttgttcttcaatggataactgaccaaaaggcagcaaatcgagctgcgaggtgtagcgcaacccagcgtcacgccagtcctggccatccagcatcgctctggcccagccctgacggtgggtaaaatcaacattaaatgacaggcgcaacaagttgtccgggcaggcatcgaccaccagaacattttctcccaacatttgtaatgaccaggctaatgcggcggtgatggttgttgtccccacgcctccccgcaccccctgcaatcccagtacggccattcaccaatcccctacttttgttgcgcaaactctgccagcaacggccagcgttttaatgccgcggccaactgttcgcgttgggaaatatcggcataatcaatatcaggcagtgaaaatgcctgctttaacgccacaatatcattctggaagatatagcctatcgcgggatcaggcagagtatctggttcattgttattcattttgcttgatccctatgaaataactgtaccgttcatgagacaattctaaccgtgagcatttcgccggtttattgtttacggcgagacgggaatttgctcactttttgactttccgttacgcaacagaaaaagttaaaaacgaaaagactaaaatcacacgtcttgtgaccttctaaattgattcacatgctaaatctgataagttttaatttcaatggtaggtttatttcttagctttcgctagtaaactgataatcagacaaaatggtgacatgagggacattgtggaccctgtattctctatcggtatctcatcattatgggatgagctgcgacatatgccagcaggcggcgtctggtggtttaacgtcgatcgccatgaagatgctatcagtctggcgaatcaaacaattgcatcccaggctgaaaccgcacacgtcgcggtcattagcatggacagcgatccggcgaaaatctttcaattagatgattctcaagggccggaaaaaataaaattattttcaatgctaaatcatgaaaaaggtctatactatttgacccgtgatttgcagtgttctattgatccccataattacctttttattcttgtttgcgcaaataacgcatggcaaaacattcctgccgagcggcttcgctcatggttggataaaatgaataaatggagcaggttaaaccattgttcgcttttggtaattaatcccggaaataataacgataaacaattttcattgttgcttgaggaataccgttcactttttggtcttgccagtttgcgttttcagggtgaccaacatttgctggatattgccttctggtgcaacgaaaaaggggtcagcgcccgtcagcagcttagcgttcagcaacaaaatggtatctggacattagttcaaagcgaagaggcggagatccaaccacgcagcgacgaaaaacgcattctgagtaatgttgctgtactggaaggtgcgccgccgctatcggaacactggcaactgttcaacaataacgaagtcctgttcaatgaagcccgtaccgctcaggcggcgacggtggtcttttctttacagcaaaatgcgcaaatcgagccactggcccgcagcattcataccctgcgtcgccagcgcggtagtgcgatgaaaatcctcgtgcgggaaaataccgctagcctgcgcgccaccgatgaacgtttgttattggcctgcggtgcaaatatggttattccgtggaatgcgccactctcccgttgtctgacgatgatcgaaagcgtgcaagggcagaagtttagtcgctatgtgccggaagatatcactaccttgctgtcaatgacccagccgctcaaactgcgtggtttccagaagtgggatgtgttctgtaatgccgtcaacaacatgatgaataaccctctattacctgcccacggtaaaggcgttctggttgccctacgtccggtaccgggtatccgcgttgaacaagccctgacgctgtgtcgccctaaccgtaccggcgatatcatgaccattggcggtaatcggctggtgctgtttctctcattctgtcggattaacgatctggataccgcgttgaatcatattttcccattgcctactggcgacattttctcaaaccgtatggtctggtttgaagatgatcaaatcagtgccgagctggtgcagatgcgcttgcttgccccagaacaatggggcatgccgctgcctttaacgcaaagttctaaaccggtcatcaatgccgagcacgatggtcgccactggcgacgaataccagaacccatgcgactgttagatgatgctgtggagcgctcatcatgatgaccatcagcgatatcattgaaattattgtcgtttgcgcactgatatttttcccgctgggctatctggcgcggcactctttgcgacgcattcgcgacaccttacgtttgttctttgctaaacctcgttatgttaaaccggccgggacgttacgccgcacggaaaaagccagggcaaccaaaaaatgactcaatttacgcaaaataccgccatgccttcttccctctggcaatactggcgcggcctttccggctggaacttctattttctggttaagttcggcctgttgtgggcgggatatcttaacttccatccgctcctcaatttggtgtttgccgcgtttctgctgatgcccattccgcgctacagcctgcatcgcttgcgccactggattgccctgccgatcggctttgctttgttctggcatgacacctggttgcctggcccggaaagcataatgagccagggttcgcaggtggcggggttcagtaccgattatttaatcgaccttgtcacacgctttattaactggcagatgattggggccatttttgttttattagtggcctggttattcctgtcacaatggattcgcattactgtttttgtggttgccatactgctatggctgaacgtacttaccctggcgggaccaagtttctccttgtggccagccggacaaccgacgaccactgtaacaacgacgggtggtaacgcagcggcaaccgttgcggcgacgggtggcgcaccggtagtgggtgatatgcccgcacaaactgcaccgccaacaacggcgaaccttaacgcctggctgaataatttctataacgcggaggcgaaacgtaaatcgaccttcccgtcttcgctgcccgctgatgctcagccatttgaactactggtgattaacatctgttcgctttcctggtcggatatagaagccgccgggttgatgtcgcatccactgtggtcgcatttcgatattgagttcaagaactttaactccgccacctcctacagtggcccggcggcgatccgtttactgcgcgccagctgcgggcagacttcgcacactaatctgtatcaaccggcaaataacgactgctatctgtttgataacctttcgaaactgggctttacccagcacctgatgatgggacataacggccagttcggcggttttttgaaagaagttcgcgaaaatggcggcatgcagactgaattgatggatcaaacaaatctgccggttattttgctgggctttgatggttcgccggtttatgacgataccgccgtgcttaaccgctggctggacgttaccgaaaaagataaaaacagccgtagtgccacgttctacaacacgcttccactgcatgacggcaaccattatccgggggtcagcaaaacagcggattacaaagcgcgggcgcagaaattctttgatgaactggacgccttctttactgaactggagaaatcgggtcgtaaagtgatggtggtcgtggtgccggaacacggcggcgcgctgaagggcgacagaatgcaggtatctggcctacgtgatatccctagcccgtctatcacagacgtccccgttggggtgaaattcttcggcatgaaggcaccacatcagggggcaccgattgtcatcgaccaaccgagcagcttcctggctatctccgatctggtggttcgcgttcttgatggcaagatttttaccgaagacaatgttgactggaaaaaactcaccagtgggttgccacaaacagcaccggtctccgagaactcaaatgcagtagttattcaataccaggataaaccgtacgttcgcctgaacggcggcgactgggtgccttacccgcagtaagcactaaaaaggccgcagagtttaacctctgcggcctgatccgggcgcaaattgccattacggcagcctgacgcccgcatgacacgttacttccgcttattcagccagttcacgatcatactggcaagaatgccagcaatgaccggagccgctaaatcatgccagaaggccatgcccagctctgcgaacgtcatatagccgcctgtgttgtaatgacaacgtttcgcggctattcttgagtggtctagagtcaagattagcccccgtggtgttgtcaggtgcatacctgcaacgtgcgggggttttctctctccagcaaccaatgccaccagggataaagcccccgcaacattgcgcctcaccggaacctttccggcttgccgctgattctacgattgctttttactgtcagcacccggcaatcttcctcattgcgcgatgccttccagcttaatttctttatttgcaatagttgcagttcatatccgggctgactccagactggtagtgaaatgcgcaattttgtagaattgcgcctcctcgcgacctccccagtgaatctgttgcctcattttttacatactgcgtattcgacttctccacctgttgcgcaagagaaactgggtttattcatttttgcgaggccgacttctttctggacaggactttatgcagcacaacacactatcgaaacacaatcagaaattgccgtttacacgctacgacttcggctgggttttattatgcataggcatggcgattggtgccggaaccgtgctgatgccagtacaaattggcttgaagggaatttgggtatttattaccgcagcgatcattgcttatcctgccacctgggtagtgcaggacatttatttaaaaaccctttctgaaagcgattcctgtaatgactacaccgatattatcagtcattacctggggaagaactggggaattttcctcggggttatctactttttgatgattatccacgggatttttatctactctctctccgtggttttcgacagcgcctcgtacctgaaaaccttcggtttaaccgatgccgatctttcacaatctctactttataaagtcgctattttcgccgtactggtggcgattgcgtctggtggtgaacgattactgtttaagatttccgggccaatggtggtggtcaaagtagggattattgtcgtgttcggttttgcgatgatcccgcactggaatttcgccaatataaccgccttcccgcaagcctccgtctttttccgcgatgtcttgcttaccattccattttgcttcttttctgcagtatttattcaggtacttaacccaatgaatattgcctatcgtaaacgggaagcggataaagtactggcaacccggctcgcgctgcgtacccaccgaattagttatatcacgctcatcgcggtgatcctgttttttgccttttcgtttaccttctcaattagccacgaagaagccgtttctgcctttgaacaaaatatctcagcactggcgctggccgcgcaggtgatccctgggcatatcattcatatcacctctacggtgcttaatatctttgccgtactgaccgcattctttggcatttatctcggtttccacgaggccattaaaggcattattctcaatctgttaagccgaattattgataccaagaaaattaactcacgcgtgctgactctggcgatctgcgcttttatcgtcattacgttgacgatttgggtttcgtttcgtgtatcggtgctggtgttctttcagttgggaagcccgttatatggtattgtgtcgtgcctcattccgtttttcctgatctataaagtcgcacaactggaaaaacttcgcggatttaaagcctggctgattctgctgtacggcattttgctatgcttgtcgccactgttgaagctgattgagtaaaccggagcgcatggccccggttttgtgagttaacgctgcggattttcatcctgatcaacagcaaaacaagctaccagttgaccgccgtagtcttttagctgcggctgcaactgggtgcaggggccgaagcgccgacgacagcgggcgttgaaggcgcaacccggcggtggattcagtgggcttggtagttcaccgctgagcttgatgcgctcgcggcgatcgtccgggttcaggcgcggcgtcgcggaaagtagcgcctgagtgtacggatggcgcgggttattgaagatttggtctttcgttcccttctccacgcagcggcccaggtacatcaccatcacttcatcagcaatgtgctccaccaccgacaggtcgtgggagataaagacataagacagccccaactcctgctgcaaatccatcatcagattcagcacctgcgcgcgcactgaaacatccagcgcggaaaccggttcatcggcaatcaccacatccgggtcgagcatcagaccacgggcgatggcgatacgctgacgctgaccgccggagaacatatgcggatagcggtcatagtgctcggttttcaggccgactttcgccatcatcgacagggctttttcccgacgctgttctttgcttaagctggtgttgatcagcagcggctcttcaagaatttgcccgacttttttacgcggattcagcgaaccgtaagggttctggaagacgatctggattttctgccgacgcagcttctgcgcctgcggatcgtgcttaagcagatcctgcccctggtaatacagctcgccaccggtgggcatttcaatcatcgtcagcaaccgaccgagggtcgatttaccgcagccagattcgcccactactgccagcgttttgccacgttcaaggttaaacgaaacgccatccagcgctttaaccagacgttccggcgcgaacatgcctttcttcaccggataatgttttttcaggtcgatagcctgcaacagcggttgttgcagggtggcctcttgcgtactcatagtgtcggcctcccggcatcatcaagtgggtaatggcatttggactgacgcccgtcagcgagcatattcagcgccggttcttcagcgcgacatctgtcagtggcataggggcagcgcgggttaagcaggcagccgttcgggcggtcgtacttgccgggaacgacacctggcaacgacgccagacgttctttgtcctgagcaaattctggcagcgcacgcagcaatgcctgagtatacgggtgacgcggcgcatggaagatggcgtgcgcatcaccggtttccaccacctggcctgcatacatcacgatgattttatgtgccgcttccgccaccagcgccaggtcatgggtaattaacaccagcgccatgttctctttctgctgtagctccagcagtagttcgatgatttgcgcctgaatggtcacgtccagcgcggtggtcggttcatcggcaatcagcagttttggccgacaggcaatcgccatggcgatcatcacgcgctggctcatgccgccggaaagctgatgcgggtaaacatccagacgcgatgccggatcgggaataccgacctgattcagcaggtcaatcgctcgctgacggcgggtacttttgttgccgccctgatgcaccttaatcgcttccataatctggaaacccacggtgtagcacgggttaaggctggtcatcgggtcctggaagatcatcgccacttcggcacccaccaggttgcggcgctctttttctgagatacgctgcaaatcctggccgttaaactccagtttttctgccattacgcggcccggataatcaatcagccccataatcgccagtgaactgaccgacttaccggagccggactcacccacaatcccgaccacttcgccctgttttacgctgtagctgatgcggtctacggcgcggaacggcgcgctttcgtcgccgaaatgcaccgataatttatctacatttaataacgccatctcgaacctcttactgcttcagtttgggatcgagcgcgtcacgcagaccgtcacccatcaggttaaatgccagcaccgtcagcaggatcgccagacccgggaaggtcacgacccaccaggcgctttgcgcgaactgcaacacgtcggagagcatggtgccccactcaggcgttggcggctgtgcccccatgccgaggaaaccaagagcagccatatcgagaatggcgttagagaaaccgagcgacgcctgaacaatcagcggcgcaaggcagttcgggaagatgttaataaacatctgacgcatcgccccggcacccgccacgcgagacgcggtgacgtaatcgcggttaacttccaccagcacggcggcgcgggttaagcgcacatagtgcggcaaggcaacgaaggtcagtgccagcgcggcgttaccaatcgacgggccgaaaattgccaccagcaccagcgccagcagcagacttggcagcgccagcatgatatcgaccacgcgcataatgatgttatcgaccaggccgccaaagtaaccggcgatcaggccgagaataacgcccataatcagcgataacacaactaccagacagccaaccagcagcgacaggcgcgcaccgtacatcaggcgcgacagcacatcacggcctacgtcatcggtgcccagcaagtgcgccatgctgccgccttcctgccaggctggcggggcgagcagtgcatcgcggaactgttccgccgggttatagggtgcaatccagttggcaaagatcgcgatgaacagcacgatgacgacgtaaaccagcccgacgaccgcgcctttgttgcgtttaaaatagtgccagaactcctgtaacggggtcatcggcaccggtgcgctaatcactttattttcagtaacctgtgacatgatgtccccttacttcttatgacgaatacgcgggttcaccacgccgtacagcagatcgaccagcaagttgacgaggataatcatcgtcgccaccagcaatacgccgccctgcactaccggatagtcgcggcgttgcagtgcgtcaatcaaccagcgtcccagaccgggccacgagaagatggtttcggtcagaatcgcccccgccagcaatgttcccacctgcaggccgataacggtcaccaccggcagcatcgcgttacgcagcgcatggacgataatcacccgcatgcgggttagccctttggcgcgcgcggtgcggatgtaatcctcgcccagcacttccagcatcgaggagcgtgtcatacgcacaatgaccgccagcggaatagtacccagcacaatggcaggcaagatcatatgggcgacggcatcgataaagttgccgtcttcaccccagatggcggtgtcgattagcataaaaccggttaacggattggagtcatcgaggaacaccatatcgctcacgcgaccggagacgggcgtcaggttccagtgcaccgaaaccagcatgatcagcatcatgccccaccagaagataggcattgaataacctgtcagcgccaggccaaccgctgtgtgatcgaaaatggaaccgcgtttaaccgcagccagcacgccgaccggaataccgactgccgtagcaaaaatcatcgcgcagacgccaagttccagcgtggcctggaagcgcggcacgaactcttcccaaaccgggatgcggcttttcattgaaatgcctagatcgccatgcataacgccccaaatgtaatggagatactgctgccacatcggtttatctaagccgagttcagccagcagctgcgcgtgacgctctggggagatcccacgttcgcccgccatgatcatcaccggatcgcccgggatcatgtggacaaaggcaaatgtgagaagggtaataccgataaacgtggggatgacgagtcccaaacgtcggagaataaactgcaacataacccggattctctatagtgacccgcagcctggaactgcgtgtctgtattgctcacaaatcaattcccgcccttatcggacagggaatgaagtattgctgccggatggcgctgcacgcagaggcacagcgccaccgggtatacagattgttgacaaagtgcgctttgtttatgccggatgcggcgttaacgccttatccggcctacaaaatcgtgcaaattcaatacattgcagaattttcgtaggcctgataagcggagcgcatcaggcatttttgcctttgccatcagtcttgtatggcttttaattattcgatagagacgttttcgaagtgatgtttgcctaatggatcaaccacatagcctttaacttctttacgtaccggttcaaacacggtggagtgagcgatgatcagtgccggagcctgatcgtgcatcaccacctgcgcttgtttgtacagttcaacgcgtttattgtggtcgtcggtagcacgcgccggttgaatcagatcttcaaacggtttgtagcaccattttgagtagttggagccttgttcagaggcggcgcagctgaacagggtggcgaagaagttatccggatccccgttatcgccagtccagcccatcattaccgtctggtgctcgccatctttcgcacgcttgaggtactcaccccattcgtaggtgacaattttggcctgcacgccgactttcgcccagtctgcctgaatcatctccgccatgcggcgagcgttcgggttatacggacgttgtaccggcatcgcccacaggtcgatggagaaacctttttccagacccgcttctttcagcaaggctttcgctttttcaggatcgtaggtgtagtcctgaacgtcgtcgttatagccccacatggttggcgggatcaggtttttcgctgatacgcccgcgccctgataaaccgctttgatgatcgcgtctttgttcaccgcgtaggtcagagcctggcgaactttcacgtcatcgagtggttttttctgcacgttatacgagagataaccgacgttcagccccggcatttccatcagattgatggatttatcctgcttcatgcgagcgatatctgccgggttcgggtacggcatcacctggcattcattcttctgcaatttcgcgtaacgcacggaagcgtcaggggtaatagagaaaaccagcgtatcgatctgcggtttggtgccccagtagccatcaaacgctttgtagcggatacgggaatctttttgatactgctgtaactggaacggaccggttccgattgggttgaggtccagtttttccggtgtaccggctttcatcatcgcatcagcatattcttttgacagaatagaggcgaagtccattgccaggtcagcgaggaacggcgcttccgggcgagtcagcacaaactgaacggtgttgtcgtccacctttttcacttcactgatcagctctggcaagcccatgccttcgaagtattcgtagctgccgccagaaactttatggtacgggttttgcgcgtttttctgacgatcgaacgagaacaccacatcatcggcgttcagttcacgcgtcggtttgaattctttattgtcgtgccacttcacacctttacgcagatggaaggtataggttttaccgtcttcgctgacttcccacttttcagcgaggcccgggatcacttcggtggtgccgattttaaattcaaccagacggttataaagcgggacggaagaggcgtcataggtggtgccggaggtaaacagctgcgggttaaacccttccggagatccttctgagcaataaaccagagttttagcctgaacacttgctgcgacggtcatagccaccaggctgagaccaagcttcagcatccctgactttttcaaggaaatacgcattattctgctccaattgtgatgtttgttgttttaaccctttgcagtgggttgtcgctgcctgaccttttttgttttttgcccggtcgggtcaacgttatgaggtggggatgccgtactaattaacatcagtgtaacagtgcggatcctccataaaatgcccctcgtgacctacaatctgtcaacagaatgtgaaaacgtcaatacagccaaccgggatttacaccaacggtgagaatccacaaacaaagattaaaaaaacttcaaacagctatttgcagcagagaaatttgtgctactccaacatgaccagaacaatcagcttaatatttagcaacatttggtgattaagttttatgcatttaatgaaaaaaatctgaggaaaaggtggatatctgagcgattaataccatgaacgctaaaacgcacagcggaaaatgccagggccagccataagtaacgcaaaaaaagatttaagcaaatataaaaaaagacaatggtttctgtcacaaatccgttaatggatagtgagatatggggcgcaaatttggcagggaaatgtgtgtcgtgtaggtcgaataaggcggtcgcgccgcatccgacaatggccggcacatttgcctgatgcgacgctgacgcgtcttatcaggcctacgtcgagtcgaacctccctgcccccggaggttctcatcctcatgagctgcagatgcaaaaaagcctgctcgttgagcaggcttttcgaatttggtcggtgatagaggattcgaacctccgaccccttcgtcccgaacgaagtgcgctaccaggctgcgccaatcaccgaatgcggggcgcatcttactgcgcagatacgccctcgtcaatcccttaatagcaaaatgccttttgatcggcgagaaagtcagcaggccgcttagttagccgctgcctcttttgcctgcgggatgtgacaccagttgttgttttcgttaattccaccatccggtgaagtatagccaagacaacccatgatggtatcgtacagctctacgtgacggcgtggcactttcatgtcggcttcttttttcagctgcgcaaacgcctgcgcattggccggattttccagatatttatctgacatccagaccatcatcggtacgcggaactgctccggcggtgccagttcacgcggcgtgccgtgcaggtgctcgcgttcattaattgactcaccgtggtcagctgcgtagaacacaatcgctttcttatcgcgaacctgatcaatcacgctggagataaagtgatccacataggtcaccgagttgtcataggagttgatcatctgcgctttggtacagccgctatcaacaccaatacattccggcttccactgcgcgaagctacgcggataacgctgggtgtagttaaaatgcgaacctttggtatgcagaatgatcagatgcttaccatccgggttgcgccctagcgattgctgcatttcgtctaccagcaacatatcatctaccggcttgccacgattacgtggctccgcaccaatctgctcacgataagcaatgttgtccgccatcgtgttgctgtagaaccacatttcgctctgcatagcgtagaggtcagaactgaatcctaactgcttcagaaccgcgaaaatgttctgttcttttaatgtgcgctgcggattatcttccgcgcccccctgacgtacaaacatgcaacgcagtgagagtttggttgcggtatcacaggagtaaccacggaacgccgccagatttttctcctgggccagtttcggcgtggtattacgctcatagccgaaaatacccatatggtcccaacgcgtggtttcaccgatgataaacacgacataagtgtcatcaacgttttgcggtgcctgataagtgaatttcttcgccggattaagcaatgaattattatcggaagattcatcgacccgcgcccaggcatacagccccaacgcagaaagccagtttgatggcagataagagttcgctacgacaccgccataactcggcaaatcaacgccggtcgccctctccactttcttctgctggatatccagcaaacgaatcggtgcccaaaccataatacccgccagtacgacgaccgccaggctgcgaatacgctgccctggggttcgcagttgtcggagcaaggtgtagcgacagcggttattccagataaggataagaggcaatgcactaacggcgattaaccagagaataaagttcagaccaacaacttcttttgacaggtcgatatcggtggtcatgacggaagcgatgatgccataaccaatgaccacattaaggaaggtcatgtaatagctggcacctgcggaaaagagcaccaccagcgatgccagaatacgccagctgcggcggccaaacagcgaaagaagacgtagtaaaaagaaggtcaccagtacggtggcggccagttcaacaacagcagaaatgcctttccagacggtaaaatcgtgcgcatagctgccgaagcggcggtaaaaaaccgcgccattcataaaaaggccaatatagattgcaagcaaaaagctcagcttctgctgtgtaatcgatttgatgtatctcatgcaaacaaaccctggacaaacaggtgataacaccctgcttagtggcttttcaggcccggcagggaaaaagtgcggaggtagtcagataagtaaaatctacacgcgcgaataagtagaccacagcaaagggaaaaagtgtggggaaagagtgtgcatgaagcacaaatttacaaaaatgcaagtttgaaaagagactttagcgttacaaaaagcagtaaaaagggccagttaattggcccaaattttacgagtcattgtttatacatttcgttgatgcgtttgatgcacacggaagctgaagcccagtagctcgcggctgagcattaaagggagccatgcgcctcacgcaacattttctgctctggctgacgaatcgtcgtagaaagcgccaatgacagaatcagcagagcaaagatgacgtagaacgtcacatagaagccgccaaacagtgaggcgataatcgaaccacaaatgctaccgataccgaaaccgaggtaaatcacaccgtagtttttcgccaggttattgaggccgaagaactcactgaccagtgacggaaagacggtaatagtgccgccaaagttaaatgccacgcaggcaatcgctgcaaagaacgtcactgcattcaatggtgcaaacagcagggccgccatacccacaagcgaaattacctgaccaatggtgataacacggatacgggcgattttgtcagacagaatgcccagcaccagacgacctgaaaggttggcgatggaaataacagtgactgcattggctgcggaaaccacatcaaggtgtgccagactttgggcgatatctttcgctaccccaatcacatacaggccgctcatgcaggcagtcaggaacattaccgctaacatccagtactgcggtttacgcatcgactctgccagcgtgtaatctttctccactacgccattgctggttttcacttcctgttttggtgcgtctttcattaacgttgcgccgaaaacaatcatcaccagcgcaatcgctccccaaatcacaaaggttttttccagaccgaccgtttccagcagctgcgtgtcgataaatttgaaacccaggctacccagaccataagaaccgatagcgaacgcggagatcagacctttacgctccgggaaccatttcacgcagttagagagcgtcagcaggtaacccgcgccatccgccagaccgaccagcacaccggcgcttaaccacagcatcatcaggttgtcagaatgcgctgtcaggaagaaccctaatcccagcaaaatgccggaagcgattgtgacgcgtttaacaccaaaacgttcctgcaatttgcccgcaacagaagacgaaattgccagccccagacttaacaagccgaaagagaaagcgacttggcttaccggcgcatccagcttggcggaaagcgcgccgttaaacaggctccaggtataaaccgaccccagcgcaaactgggtaatgatagtaccgatgagtgtcagccagcgggtacgctgataatttgaaggtgtcatggcagtattcctgcagtaataaaaaggaaaaatctctgccgacaaccataacgaagtgcactttatgcctggggaaaaacggcatgaaatgccatcagaacggaatgaaatgccttagttcaggaatgaatgacgcgacaattattcaccaaatttattatttggtaagttagcacccactatcgccacaactattgttattcaatggtttcaattgtgattgttacgttaaaatctggcactaacccccatcgtatacagataatcgctattgttagtggtattttctgcctgagatagcgcggcataggcggcaatattttgattgagcaacatatcagcgcctacggtgacatccagccagttgccgttctggtttgtcgccgtcatccggctcaggcctgattgcgccttccagatattctcgccaaattgctggttatagctgatttgcgcccagggtcggagatcgccaagccgggagtcaacacgccagcctaaggtactcacgctggcatgccataacggatcggtcagcgtggtagtactgtcgccaaactcgttatacatcgaggtggttgtgccatcgtaatgtaatgccgcgaccgggccagttgtaacctgttcatataaaggaaaattccagcccatactcatactgctggtcacatccacaggggtttcttccgccagattgacttccagtcccagcgccctttggctactttgaatacgttgcgacaaaatatcgttgtaatcaggttgatgatcactatcccaagtgtaacgctctgtggaatgcccgggttgcgtatcaacgatatattcttgttgccaggcgtaagctgtgttgagaaaaaaggcactgattaccacactcgccagcaggcttagctgccagcgaccaccgcttttttttatgatcattaacacgactccagggaagagccgaattcggcaatattattgtcattgtatgaaggatatcgggcatagtagccctgtattaaatattgactttttcaccgatgcgtcaagaaaagcggctgaaatttttacgatcgggtacatagcgagggaaagtatggaacgttgcggctgggtgagtcaggacccgctttatattgcctaccatgataatgagtggggcgtgcctgaaactgacagtaaaaaactgttcgaaatgatctgcctggaagggcagcaggctgggttatcgtggatcaccgtcctcaaaaaacgcgaaaactatcgcgcctgctttcatcagttcgatccggtgaaggttgccgcaatgcaggaagaggatgtcgaaagactggtacaggacgccgggattatccgccatcgcgggaaaattcaggcaattattggtaatgcgcgggcgtacctgcaaatggaacagaacggcgaaccgtttgccgactttgtctggtcgtttgtaaatcatcagccacaggtgacacaagccacaacgttgagcgaaatccccacatctacgcccgcctccgacgccctatctaaggcactgaaaaaacgtggttttaagtttgtcggcaccacaatctgttactcctttatgcaggcatgtgggctggtgaatgatcatgtggttggctgctgttgctatccgggaaataaaccatgattcgggaagcgcaacgttcagaactccccgcgatcctcgaactgtggctggaaagtacaacctgggggcatccctttataaaagcgaattactggcgtgactgcattccgctggtgcgggatgcctatcttgccaacgcgcaaaactgggtctgggaagaagacggtaagcttctcggttttgtcagcattatggaaggccgatttctggcagcgatgtttgtcgcaccgaaggccgtcaggcgcggtattggtaaggcgctgatgcagtatgtgcagcagcgccatccccacctgatgctggaggtttatcaaaaaaatcaaccggcgataaatttttaccaggcacagggttttcacattgtcgattgcgcatggcaggatgaaacccaactacccacatggattatgagctggccggtggttcaaacgctgtaagtgtcagttccggaccgttgtatttttccagccatgccagcgccgtattacccgcacagccattccccagccgcgagctggggagatctttggtcagcacgttgactgcgccgtttttacaaataccgtcagcggttaaatccaaatccggccatgccccttcgtgaatacaaatcacgccaggtttaattccctcgctaatgaccgctccggcaagaatttgcccgcgtgcgttccacagccgaacagtatcgccatcttgaatgccgcgcgcctgagcatcgtcaggatgaatggtgacaggctcacggtttgctaccgcgtacaattcgcgcagagcactgtaattcagctggctgtgcaggcggtgcgccggatgggcagaaagtacctgcaactgttctggttcggcattgccctgccattcgtccggctccagccacattggatgcccagggcaatccgggtaaccgtaatcggcaatacgctgtgagaagatttcaatcttgccgctggcggtttttaacggatgcgccagcggatcgcggcaaaaatcagcgaagcgaataaaccgctcgctgtccgggttttccggcatctcaattaactggttggcttgccagaactcagcaaatggcggcaattcaacctgctggcttgccccgcgctgccgggcaacgttataaaacgtttccagccattgcagctgactttttccttccgtaaaccgcgcatagccgcccttctcccaacgttcactcaactcggcaaaaacatcaaaatcattacgcgcttcatagcgtggcggcaccacttgcttcatgggcaccagatgctgattactgtaatcaccggtcatggtgagatcattacgctcaaaagaggtagtcgcaggcagaacgatatccgcgtgtttcgccgccgccgtccagaagcattcagagatcaccaccagctccggtttttgccaggcacggatcagacgattggtatcctgatgatgagtaaagttggcaccgcccgcccaccagataaaacgaatatccgggaaatgtcggttcataccgttgtgttgatatgcgccaccagggttttccagtgcttcaacaatgcgggcaacagggattttatccaccgcatcgcagccacccggcaagctgccctgcatggaagagagcaccgcagaacgccgcgtggggttaccaccattggcaaaatggtaagaaagaccaaaaccgccgccgggtgtgccgatttgccccaacattgctgccagcgtgacgatcatccagtgtttttgctcaccaaactgttggcgctgcattccccagcctgccatcagcatggtggtattttggtggaaaatagccgccagctcgcggattttcgctgcgccaacaccacaaatctctgctgcccattcggcgtttttcgctattccgtcactctcgcccagcaaataagaggcgaagacggcataacctgtggtgcaacgcgccagaaacgcttcgtcgtgccaaccattttccaccagcgtatgggcgatccccagcatcagcgcaacatcggtgcccatgtgcggtgccacccactccattttatcgccaaagaaatcgacggtttccgatcgcattggatcaatacagatcagctttttcccactgtcacgcagtgcagaaaagtaagaaagcccctgctcatcggatgcattccacgcaattttcagcgtattgagtggattagcactccacagcaccacgacatcgctatgttccagcaccagcggccaactggtttgctgttgataaacttcgctgccacctacgacatacggcatgatcgcctgtgccgcaccagtcgaataatcccccagatgcccggtataaccgcctgccagcgccatatagcgttgtaataatgtcgaggccttatgcagcacgccgtttgaacgccagccgtaggaaccagcaaaaatcgatgccggaccataagcctcacgaatgcgtttatgttgttggtgaataagatccagcgcctcatcccaactcacgcgaacaaattcatcctgcccacgaatgccttgcgggttttccggtgacgcgagaaagcctttgcgcaccattggaaatcgtacccgcgtattgctgtgaacctggtcgcgaaccgcgctctgcaaggagttttccattcctgtggctaacgcgccacgcgagctaaacacggtttcgccgtcggtttcaaccagcatgggcccccagtgggcggcagtcagaacggaatatcgtgaggatgagttggccaaaccgaagactcctgaaaggttagatgtattgagcagttaaatattacttacaaatttccgagtattcccaggaataatcttcatgttcacgcggcataatctcccgccacggaacccgtggcaaagaataaaaaggttattaaggattaacaatgaagaaacgtgtttatcttattgccgccgtagtgagtggcgctctggcggtatctggctgcacaactaacccttacaccggcgaacgcgaagcaggtaaatctgctatcggcgcaggtctgggctctctcgtgggcgcgggtattggtgcgctctcttcttcgaagaaagatcgcggtaaaggcgcgctgattggcgcagcagcaggcgcagctctgggcggcggcgttggttattacatggatgtgcaggaagcgaagctgcgcgacaaaatgcgcggcactggtgttagcgtaacccgcagcggggataacattatcctcaatatgccgaacaatgtgaccttcgacagcagcagcgcgaccctgaaaccggcgggcgctaacaccctgaccggcgtggcaatggtactgaaagagtatccgaaaacggcggttaacgtgattggttataccgacagcacgggtggtcacgacctgaacatgcgtctctcccagcaacgtgcggattccgttgccagcgcgttgatcacccagggcgtggacgccagccgcatccgtactcagggccttggcccggctaacccaatcgccagcaacagcaccgcagaaggtaaggcgcaaaaccgccgtgtagaaattaccttaagcccgctgtaatccctttcatgccaggtgatgcagaaatcacctggcattcttcagttttccttcatcatatttcaggctaaggtgatcgccttatcagtgaatggagagaagcatgaagccgtccgttatcctctacaaagccttacctgatgatttactgcaacgcctgcaagagcatttcaccgttcaccaggtggcaaacctcagcccacaaaccgtcgatcaaaatgcagcaatttttgcagaagctgaaggtttactgggttcaaacgagaatgtaaatgccgcattgctggaaaaaatgccgaaactgcgtgccacatcaacgatctccgtcggctatgacaattttgatgtcgatgcgcttaccgcccgaaaaattctgctgatgcacacgccaaccgtattaacagaaaccgtcgccgatacgctgatggcgctggtgttgtctaccgctcgtcgggttgtggaggtagcagaacgggtaaaagcaggcgaatggaccgcgagcataggcccggactggtacggcactgacgttcaccataaaacactgggcattgtcgggatgggacggatcggtatggcgctggcacaacgtgcgcactttggcttcaacatgcccatcctctataacgcgcgccgccaccataaagaagcagaagaacgcttcaacgcccgctactgcgatttggatacactgttacaagagtcagatttcgtttgcctgatcctgccgttaactgatgagacgtatcatctatttggcgcagaacaattcgccaaaatgaaatcctccgccatattcattaatgccggacgtggcccggtggttgatgaaaatgcactgatcgctgcattgcagaaaggcgaaattcacgccgccgggctggatgtcttcgaacaagagccactttccgtagattcgccgttgctctcaatggccaacgtcgtcgcagtaccgcatattggatctgccacccatgagacgcgttatggcatggccgcctgtgccgtggataatttgattgatgcgttacaaggaaaggttgagaagaactgtgtgaatccgcacgtcgcggactaagccgcgactgcgtggagtaaagcccgataatcgctcgggcttttactctttattgggttgcagtaactgctgtagtccaggcctgattaaacgcctgatgttgtgccggtaatggcgcaatcagtttgttatattcacttgcctgctgtgaagtcgggaactggatgccatttgctacaaagctcacctgagtaccttgttgggcaatgtagtctccaaccatcaccagttgttgcgtgaaagtttgtgccgccggaatcaacggttgcaatgcatcagctggcgtcgttaccactttggtgaatgcctgatcaaagaccggtttcaggtcatcactctgttttagcgcagagtgcgcagcatcggcctgcaacttcgcattttgcagttgttgcgccagcacacccagcgaaccattcatttcacgcagcggaccgctttgcgtaacgtaatcctgcggtacgcgaattgcgttaacgctgtctacaaccgggcgcagaccggaatccatcgcctgattcacctgctgagaataaccatacagaatcgcgtaatcagagacaaaaggaccaaactgttttttctgatcggcagtcagggttggtagacgttcaccgctacgcatcactgtattctgcaggaagtcgataaacgctttacgctgatcgccttctttatcaaaacacccactcaggctaactaccattaataacgccgcaagaggcgcaaaccagcgagagcaggactttcctgtcgccattttcttactcctttcacccaaaaaaagcgcacaacgacacacgcgtgtctgacgtgacaaggatagtccaggacaggcttgcaggataccctttctacgtaatcttcctggtaaaatcatggagaaaatgaaacaaggttaatttgttgtttcattgttaaaaaatgatagtgccgttgccttttttgtagccagagatttacgccttcgcagaaggttagattttcgaaatctttacaaaacaggagtggtaagagatatatcggcatttatcagatcgttaggtggctataagtcacgctaaatgacaggctgaatcgaatcatagccagagcatgccctgacttcaccccgctgtgtctgcttttcccgactattcttaatgagcttcgatgcaattcacgatcccgcagtgtgatttgaggagttttcaatggaatataaagatccaatgcatgagctgttgagcagcctggaacagattgtttttaaagatgaaacgcagaaaattaccctgacgcacagaacaacgtcctgtaccgaaattgagcagttacgaaaagggacaggattaaaaatcgatgatttcgcccgggttttgggcgtatcagtcgccatggtaaaggaatgggaatccagacgcgtgaagccttcaagtgccgaactaaaattgatgcgtttgattcaagccaacccggcattaagtaagcagttgatggaatagacttttatccactttattgctgtttacggtcctgatgacaggaccgttttccaaccgattaatcataaatatgaaaaataattgttgcatcacccgccaatgcgtggcttaatgcacatcaacggtttgacgtacagaccattaaagcagtgtagtaaggcaagtcccttcaagagttatcgttgatacccctcgtagtgcacattcctttaacgcttcaaaatctgtaaagcacgccatatcgccgaaaggcacacttaattattaaaggtaatacactatgtccggtaaaatgactggtatcgtaaaatggttcaacgctgacaaaggcttcggcttcatcactcctgacgatggctctaaagatgtgttcgtacacttctctgctatccagaacgatggttacaaatctctggacgaaggtcagaaagtgtccttcaccatcgaaagcggcgctaaaggcccggcagctggtaacgtaaccagcctgtaatctctgcttaaaagcacagaatctaagatccctgccatttggcggggatttttttatttgttttcaggaaataaataatcgatcgcgtaataaaatctattattatttttgtgaagaataaatttgggtgcaatgagaatgcgcaacgccgtaagtaaggcgggaataatttcccgccgaagactcttactctttcaatttgcaggctaaaaacgccgccagctcataactctcctgtttaatatgcaattcacacagtgaatctcttatcatccaggtgaaaaataaaagcgtgaaacaaatcactattaaagaaagtaatctatatttctgcggcattcccagcctcctgtgttgatttccaacgagtatgtactgcacccattttgttggacgatgaaatggaatagcccctaatatgtcaaagccaaaatacccttttgaaaagcgccttgaagtcgtgaatcactacttcacaactgatgatggttacaggatcatctcggcacgttttggtgtcccccgaacccaggtcaggacatgggttgccctctatgaaaaacatggagaaaaaggtttaattcccaaacctaaaggcgttagtgctgatccagagttgcgtattaaggtcgtgaaagctgtgatcgagcagcacatgtcccttaatcaggctgctgctcactttatgcttgctggtagtggttctgtagccaggtggctgaaggtctatgaagagcgcggagaagctggtttacgcgcgctcaagattggcaccaaaagaaacattgcaatatcagttgatccagaaaaagcggcatcagcattggagctgtcaaaagaccgacgcattgaggatcttgaaaggcaagttcgatttcttgaaacgcggcttatgtatctaaaaaagctgaaagccttagctcatcccacgaaaaagtgaaagtactcaacgagctaaggcagttttatcctcttgatgagcttctcagggctgcggagataccgcgcagtacgttttattatcatctaaaggctctcagcaagcctgacaagtatgcggacgttaaaaagcatattagtgagatttatcacgagaatagaggccgatacggataccgtagggtaacgctgtctcttcatcgagaagggaaacagattaaccataaagctgttcagcgcctgatgggaaccctctcacttaaagcagcgattaaggtcaagcgataccgctcttacagaggagaggtagggcaaaccgcccctaatgttctccaaagagatttcaaggctacgcggccaaacgagaagtgggttaccgatgttactgaatttgcagtcaatgggcgcaagctgtatttgtctccagtaatagatctcttcaacaacgaagttatttcttacagcctttcggaaagaccagtgatgaacatggttgagaatatgctcgatcaggcattcaaaaagcttaatcctcacgagcatcctgttctgcactctgaccagggatggcagtatcgtatgagaagatatcaaaatatccttaaagaacatggtattaaacaaagcatgtccagaaaaggcaattgtctggataatgctgtggtggagtgtttctttggaaccttaaagtcggagtgtttttatcttgatgagttcagtaatataagcgaactgaaggatgctgttacggaatatattgaatactacaacagcagaagaattagcctgaaattaaaaggtctgactccaattgaatatcggaatcagacctatatgcctcgtgtttaactgtccaactttttggggtcagtacaaactttgatttatagtcaggtggggcttttctctgtctgcctttcggtgaatacctgagacaaacagtctcaagcacccgtggctattctagcttaataagtttgtttcttctccttgatataatcctaaaaaaatctcataaaattaatatatgagataatctttattcagcagaagattattaaaggttgctgtattatttagcgataaaaaaagcctgccagatggcaggctatttaataacggcgttattattgcaacagcgaaatatccgcaacgcgcaggaacagttcgcgcagtttctccagcatggtcagacggttgatacgcaattctttgtcatcaaccatgaccatcactttatcgaagaaagcatcaaccggttcacgcagctcagccagttcgaccagcgcatcctggtaacgaccttccgtaaagtacggctccagcttgtcacgtagcaccacaacctgcatcgccagtttaatttcttccggctctttcagggtagaggcattcacgcggtcgctcagcacttcgtcagatttcgccagaatgttagatacacgtttgttcgccgccgccagtgcagcagctgcatccagggtacggaaatgcgataccgctttcatacgggcatcgaaatcagccggacgagtcggacgacgcgccagtaccgcctggatggtgtcaacggtataaccttcgtcctgataccaggcgcggaagcgaccgagcataaagtcgataacatcatcaactacgttggcattagtcagcttatcgccatacagacgcaccgcttcttcggtcagcgtttgcagatcaaggttgaggttcttctcaacgataattcgcagcacgccaagcgcggcacgacgcagcgcaaacgggtctttgtcgcctttcggatgctgaccgataccgaagatacccgccagggtatccatcttgtcagcaatcgccagcgcacaagctactgggttggacggcaggtcatcaccagcaaaacgcggctgatactgctcattcagcgccaccgcgacatcttccgcttcgccatcgtgacgcgcatagtgcatccccataacgccctgggtgtcggtgaactcgaagaccatgttggtcatcaggtcgcacttagacagcagacccgcacgggtagcgtggttaacgtcagcgccaatctgttcagcaatccagccagccagcgcctggatgcggtcagttttgtcgcgcagcgtccccaactgttgctggaacaacacggtttgcaggcgcggcaggttatcttcaagacgttttttacggtcggtgttgaagaagaactcggcatccgccagacgcggacgaacgactttctcgttaccggagataatctgctgcggatctttcgattcgatgttggcaacgaagataaagttcggcagcagtttgccgtcgttcgcatacaccgggaagtatttctggtcacctttcatggtgtaaaccagcgcttcagccggcaccgcgaggaatttctcttcgaattttgcggtcagaacgaccggccactccaccagcgaagccacttcttccagcaggctttcgcttaagtcagcgttaccgccaatcttacgcgctgcttcttcggcatcggctttaatcttcgccttacgttcttcgtaatcggcgatgactttcccacgctcacgcagaatttccggatactgatcggcgttatcgatggtgaattccggctcgcccataaagcggtggccgcgaatcacgcgatcggactgaatgcccagaatggttgccggaatgactttgtcgcccagcagcagggtcacggtgtgcaccggacgcacgaagtgcacgtcgcttgcgccccaacgcatcagtttcgggatcggcagtttcgccagagaagtcgcaaccatattcggcagcagtgcttcggtgctttcgcccttcacatgggcgcgatacagcagccattcgcctttatcggtagtcagacgctcagcctggtcaacggtaataccgcaaccacgcgcccaaccttctgccgctttgctcggtttgccttcagcgtcgaacgcctgggcaatcgccgggccgcgtttttcgatttcacgatccggttgcgcttccgccaggttagctactttcagcgccagacgacgcggagcagcaaaccattgaacggtgccgtgtgcgaggccagcgttatccagctccgcagtaaagttcgcagcaaaggactcagccaggctgcgcagtgcttttggtggcagctcttcagtgccgatttccaccagaaaagttttctcagacatagccgcctcttacttatctttgttgcacatcgggaagccgagggcttcacgggaagcgtagtatgcttctgccactgctttggtcagggtgcgaatgcgcagaatgtagcgctgacgctcggtgacggagatggctttacgcgcatccagcaggttgaagctgtgggcggctttcagaatacgctcgtaggctggcagcggcagcggattttccagcgccagcagctgctgcgcttctttctcgtactgctcgaagcaggtgaacaggaagtccacatccgcgtattcgaagttgtaagtggactgctccacttcgttctgatggaacacgtcgccgtaggtggttttacccagcgggccgtcgctccagaccaggtcgtaaacgctgtctacgccctgaatgtacatggccagacgttccagaccgtaggtgatctcgccggtaaccggtttacactccagaccaccaacctgctggaagtaagtgaactgcgtcacttccatgccgttcagccacacttcccagcccagtccccaggcacccagcgtcgggttttcccagttatcttccacgaaacggatgtcgtgaatagtcgggtccatgcccagctctttcagagaaccgaggtacagctcctgaatattgtccggcgatggcttaatgaccacctggaactgatagtagtgctgtaaacggttggggttttcgccgtagcgaccatcggtcgggcgacgagaaggctgaacataagcagccgccatcggttctggccccagcgcgcgcagacaggtcattgggtgagaggttcccgcgccgacttccatgtccaatggttgaacaatggtgcagccctggcgagcccagtaatcctgtaaggtcaggatcaagccctggaaggtcctggtatcaaacttttgcatattatttcgtgctggatacgtgtggatttaaaggaagggatcagtatacccgctggatggaagatatacagtacgaaacgggaaaaagcagggcttaacgcatggaaagatgcaaaaaatggccatccgcgtcaaaagaacagacaaactgctctttacggaaggtataaccgcgcatttcatagcttccctggaactgttcgaaggcggtgacgtcgattttttgctcgccggtgttataacgttttgccgcctgatccttgcataacgcttccatattcaacgaacgcagaggatcaacctttacccgttgtgctttctgcacgggtgacggtatagaacaacccactagcaccataagcgccattgccggaaagaaagcgttcatcatcattaaattaccgtctggtttgcaggtgagtcttattatttatatcggtatagtggctgatatcttacgaatttccttaagcctctataagctgtagtgataaaactcagattattccagtgcgccaaccaaatgatttatcggtcagactttttttaaccagatacagagacacagatgcagcccaaaatttactggattgataacctgcgagggatagcgtgtttaatggtggtgatgattcacaccactacctggtatgtgaccaatgctcatagtgttagccccgtcacatgggatatcgccaatgttctgaattctgcctctcgtgtcagcgtgccgctatttttcatgatttccggctatctcttttttggcgaacgcagcgcccagccgcgccatttcttgcgtatcggcttatgtctgattttttatagcgcaatcgcactgctctacattgcgctgtttacctccatcaatatggagttagcgctgaaaaacctgctgcaaaagccagtgttttaccacttgtggtttttcttcgcgattgcggtgatttatctggtttcaccgctgattcaggtgaagaacgtcggcggaaaaatgttgctggtgctaatggcggtgattggcattatcgctaacccaaacacagtgccgcagaaaattgacggttttgaatggctgccaattaacttatatatcaatggcgatactttttactacattctgtatggcatgttgggccgcgctatagggatgatggacacacagcataaagcactgtcgtgggtgagcgccgcgctgtttgcgacgggggtttttattatctctcgcgggacattatatgaattgcagtggcgcggaaattttgccgatacctggtatctttactgtgggccgatggtttttatctgcgcaatcgcgctattgactctggttaaaaacacgctggatacgcgtaccattcgcggacttggcttaatctcccgccattcattgggtatatacggattccacgccttgattatccatgcgctgcgcacccggggaattgagcttaaaaattggccaatactggatattatttggatcttttgcgcgacgttggcagcgagtttgttactttctatgctggtacaacgaatcgacagaaacagattagtgagttaagtaaaagcccggtcacattggactgaccgggcttacgtgagttattcgctgtattcttcctgggtaacctgtgtttcttttggtgggtttattccggcatcacgaatatttttctgcaccgctactgcaccaaacaagcttaagaagaaagccagtccataaaaacctttttcgctgagtaataatgtcgcattccacagacctaccatcagtaatgcaacagagataataaagacagtcaggcaggtcatataataaatggaagtggtcggtatgccttcatacttgtcccgaacggtcttttgataagacgccgcagaaaacagtcctaataccagtacggcaaaataatatcctttttcatttaactgcatctctgcattccatagccctaacagataggtaacgataccaccaacgagagctatccatgacacaatactaaaggccggtgaataggttgatattttgttgtccatcacagtattcctttcattcctgaatatgtaagagctttatgttgctcatgccgagcgaaacaaacgcatttgaccaaacaagcagacaaaaaaggcgatgggatagatcaccatttcataagtattgataggtgcgtttaaaacaccgataaacaagagaccgatagtgattaacgcaactaactggcagatatgggtaaaaaaatcatccagttgcccgagtttttctgcgcgaagatatgcatagttgccaaaagttgctgtcattaacacgccaagaaaatagccttttccacttaacaatgggcatgagatccatagcccaaccagataaaccagcgccccgacaacaaataatagttttgccacagtctttgaggttttcataacgatctccatatctaccagcgatacattacgagtaaccaacgaaagacaaaactgaaaaatgccattaacaaatgattttcagaataaattcatactaaatattaattaattactgagatatatagatgtgaattatcccccacccggtcaggcaggggataacgtttacgccattaatggcagaagttgctgatagaggcgacggaacgtttctcgtcgtggctgataagcggcataacgctgcgcatctggtagatgcgactgttctaacggtagttgcggcaacaattcaatgagcgatttctctggattcgccgcgatctgcgccagccttgctgcgcccagtgctggccccacatccccccccgtacggtaatcgagctgctgaccgctgatatccgccaacatctgacgccagtactcactacgcgccccgccaccaatcaacgtaacactttgcggtttaatgccgcaggcatgcacgacatccatgccatctgccagcgcataacccacgccttccagcactgctcgcgccagttcattggggccatgttgatgagtcaaaccaaagaaaacccccttcgcctggggattattgtgtggcgtacgctcgccggaaagataaggcagaaaccaaactggctcggcactttcatcagcctgttgagctgcagcgattaaagctggaacattgctcaggccggttaatttcgcggcccaatccagacacgacgccgcactcagcattacagacattaaatgccaacgttgcggtagcgcatggcaaaagctgtgtacggcgctttctggcttgcttaagaacccttcgctgacagcaaaatagacccccgacgtccccagcgataacattgcctgattagcatcaaccattcccacaccaaccgcaccagctgcattgtcgccaccgcctgcgacaactggcaccgtcgccataccccacgctttcgcaacttcaggtaacaaagcaccagtaatttcgctgccttcgtataatgcgggcatctggtcacgagataagtcgcaagcctgcagcatgacgtcactccagtcacgctttgcgacatccagccacatggtgccagctgcgtcagacatatcgctggcaaactcccccgtcatacgcagacgcaagtaatctttcggtaataatactttgtcgatttgacggaatatctccggctcatgccgctgaacccatagcaatttaggcgcagtaaatccgggcatcatcaggttgccggtaatcacccgcgattgcggaactcgcgcttccagcaaagtgcactcttgcgcacagcgcccgtcgttccacaaaatggcagggcgtaacacccgttgctgagcatccagcaaggttgctccgtgcatctggccggcaatacccaatgctttaacgtcctgcagagaatgctgatcgcccagagctttcattgcgcgatcagttgcctgccaccactgttccgggtcttgttccgaccagagtggatgcgggcgcgaaacggtcagcttttccgtttgcgcagcaaccacctcaccctgctcgttgagcaaaataacttttacgcccgaggtgccaagatctatcccgatatacatatcgatcgttccttaaaaaaatgcccggtatcgctaccgataaccgggccaacggactgcacagttagccgttatttgtcgaacagataatggtttaccagattttccagttgttcctggcgaccactctgatgcaccggagacaaatgatgttcctgagcatatttggctaaatctgccagtgacatttggcctttcaggatttgctggcccaattcgctattccagccggaataacgctgcgcgatgcgtttatccagctcgccatcttcaatcatgcgcgctgcaattttcagcgccagtgccatcgtatccatcgcgccgatatgaccgtaaaacagatcatatttatcagtactttgacgacgtactttggcatcgaagttcagaccaccggtggtgaaaccgcctgctttgagaatttcatacatcaccagcgcattctcttccacactgttcgggaactggtcggtgtcccagcccagttgcgcatcgccacggttggcgtcgacagaaccgaacaggccaagcgcaatggcggtggctatttcatgatggaaagagtgacctgccagcgtcgcgtggttagcttcaatgttcagtttaatctctttttccagaccaaactgtttcaggaagccatagaccgtcgcggcatcgtaatcatattgatgtttggtcggttcttgcggtttcggttcgataagcaacgtgccctggaaaccgattttatgtttatgctcaaccaccatctgcataaagcggcccagttgttcacgctcctgacgcaagtcggtatttaacagcgtttcgtaaccttcacgaccgccccacaggacatagttttcaccgcccaatttatgggttgcttccatcgctgtaacaacttgcgttgccgcccagctgaagacttcaggatctgggttcgtcgccgcacccgcgccgtagcgagggtttgtaaagcagttggcggttccccacagcagcttcacgccgctctcttcttgcttgcctgccaggacatcaaccatttgcgcaaaattattgatgtactcttttaacgacgcgccctcaggggaaacatccacatcgtggaagcaataaaatggcacatgtaacttgtggaaaaactcaaatgcgacatctgctttacgcttcgccaacgccagtgcctcaccaggctgctgccacggacgattaaacgcccccacaccaaacatatccgccccgttccagcagaaggtgtgccagtagcaggcggcaaaacgcaagtgctcttccatacgcttacccaacaccagttcgtcgggattgtagtgacggaatgctaacgggtttgaggattttgagccttcataacgaacgcgatcgagctggtcaaaataggcttgcatattgaactccataatcaggtaatgccgcgggtgatggatgatgtcgtaatattgggcactccctttcagttgctcaattatgttatttcacactgctattgagataattcacaagtgtgcgctcgctcgcaaaataaaatggaatgatgaaactgggtaattcctcgaagagaaaaatgcaataagtacaattgcgcaacaaaagtaagatctcggtcataaatcaagaaataaaccaaaaatcgtaatcgaaagataaaaatctgtaattgttttcccctgtttagttgctaaaaattggttacgtttatcgcggtgattgttacttattaaaactgtcctctaactacagaaggccctacaccatgaaaataaagaacattctactcaccctttgcacctcactcctgcttaccaacgttgctgcacacgccaaagaagtcaaaataggtatggcgattgatgatctccgtcttgaacgctggcaaaaagatcgagatatctttgtgaaaaaggcagaatctctcggcgcgaaagtatttgtacagtctgcaaatggcaatgaagaaacacaaatgtcgcagattgaaaacatgataaaccggggtgtcgatgttcttgtcattattccgtataacggtcaggtattaagtaacgttgtaaaagaagccaaacaagaaggcattaaagtattagcttacgaccgtatgattaacgatgcggatatcgatttttatatttctttcgataacgaaaaagtcggtgaactgcaggcaaaagccctggtcgatattgttccgcaaggtaattacttcctgatgggcggctcgccggtagataacaacgccaagctgttccgcgccggacaaatgaaagtgttaaaaccttacgttgattccggaaaaattaaagtcgttggtgaccaatgggttgatggctggttaccggaaaacgcattgaaaattatggaaaacgcgctaaccgccaataataacaaaattgatgctgtagttgcctcaaacgatgccaccgcaggtggggcaattcaggcattaagcgcgcaaggtttatcagggaaagtagcaatctccggccaggatgcggatctcgcaggtattaaacgtattgctgccggtacgcaaactatgacggtgtataaacctattacgttgttggcaaatactgccgcagaaattgccgttgagttgggcaatggtcaggaaccaaaagcagataccacactgaataatggcctgaaagatgtcccctcccgcctcctgacaccgatcgatgtgaataaaaacaacatcaaagatacggtaattaaagacggattccacaaagagagcgagctgtaagcgttacgccccagcgcggagcgggggcgtgatttctctccatgccgcgtgaatgaattggcttaggtggagtcgttatgccttatctacttgaaatgaagaacattaccaaaaccttcggcagtgtgaaggcgattgataacgtctgcttgcggttgaatgctggcgaaatcgtctcactttgtggggaaaatgggtctggtaaatcaacgctgatgaaagtgctgtgtggtatttatccccatggctcctacgaaggcgaaattatttttgcgggagaagagattcaagcgagtcacatccgcgataccgaacgcaaaggtatcgccatcattcatcaggaattggccctggtgaaagaattgaccgtgctggaaaatatcttcctgggtaacgaaataacccacaatggcattatggattatgacctgatgacgctacgctgtcagaagctgctcgcacaggtcagtttatccatttcacctgatacccgcgttggcgatttagggcttgggcaacaacaactggttgaaattgccaaggcacttaataaacaggtgcgcttgttaattctcgatgaaccgacagcctcattaactgagcaggaaacgtcggttttactggatattattcgcgatctacaacagcacggtatcgcctgtatttatatttcgcacaaactcaacgaagtcaaagcgatttccgatacgatttgcgttattcgcgacggacagcacattggtacgcgtgatgctgccggaatgagtgaagacgatattatcaccatgatggtcgggcgagagttaaccgcgctttaccctaatgaaccacataccaccggagatgaaatattacgtattgaacatctgacggcatggcatccggttaatcgtcatattaaacgagttaatgatgtctcgttttccctgaaacgtggcgaaatattgggtattgccggactcgttggtgccggacgtaccgagaccattcagtgcctgtttggtgtgtggcccggacaatgggaaggaaaaatttatattgatggcaaacaggtagatattcgtaactgtcagcaagccatcgcccaggggattgcgatggtccccgaagacagaaagcgcgacggcatcgttccggtaatggcggttggtaaaaatattaccctcgccgcactcaataaatttaccggtggcattagccagcttgatgacgcggcagagcaaaaatgtattctggaatcaatccagcaactcaaagttaaaacgtcgtcccccgaccttgctattggacgtttgagcggcggcaatcagcaaaaagcgatcctcgctcgctgtctgttacttaacccgcgcattctcattcttgatgaacccaccaggggtatcgatattggcgcgaaatacgagatctacaaattaattaaccaactcgtccagcagggtattgccgttattgtcatctcttccgaattacctgaagtgctcggccttagcgatcgtgtactggtgatgcatgaagggaaactaaaagccaacctgataaatcataacctgactcaggagcaggtgatggaagccgcattgaggagcgaacatcatgtcgaaaagcaatccgtctgaagtgaaattggccgtaccgacatccggtggcttctccgggctgaaatcactgaatttgcaggtcttcgtgatgattgcagctatcatcgcaatcatgctgttctttacctggaccaccgatggtgcctacttaagcgcccgtaacgtctccaacctgttacgccagaccgcgattaccggcatcctcgcggtaggaatggtgttcgtcataatttctgctgaaatcgacctttccgtcggctcaatgatggggctgttaggtggcgtcgcggcgatttgtgacgtctggttaggctggcctttgccacttaccatcattgtgacgctggttctgggactgcttctcggtgcctggaacggatggtgggtcgcgtaccgtaaagtcccttcatttattgtcaccctcgcgggcatgttggcatttcgcggcatactcattggcatcaccaacggcacgactgtatcccccaccagcgccgcgatgtcacaaattgggcaaagctatctccccgccagtaccggcttcatcattggcgcgcttggcttaatggcttttgttggttggcaatggcgcggaagaatgcgccgtcaggctttgggtttacagtctccggcctctaccgcagtagtcggtcgccaggctttaaccgctatcatcgtattaggcgcaatctggctgttgaatgattaccgtggcgttcccactcctgttctgctgctgacgttgctgttactcggcggaatgtttatggcaacgcggacggcatttggacgacgcatttatgccatcggcggcaatctggaagcagcacgtctctccgggattaacgttgaacgcaccaaacttgccgtgttcgcgattaacggattaatggtagccatcgccggattaatccttagttctcgacttggcgctggttcaccttctgcgggaaatatcgccgaactggacgcaattgcagcatgcgtgattggcggcaccagcctggctggcggtgtgggaagcgttgccggagcagtaatgggggcatttatcatggcttcactggataacggcatgagtatgatggatgtaccgaccttctggcagtatatcgttaaaggtgcgattctgttgctggcagtatggatggactccgcaaccaaacgccgttcttgattttgataaaaattttctcaaagccggttacgtattaccggttttgagtttttgcatgattcagcaggaaaagaaccatgtttactaaacgtcaccgcatcacattactgttcaatgccaataaagcctatgaccggcaggtagtagaaggcgtaggggaatatttacaggcgtcacaatcggaatgggatattttcattgaagaagatttccgcgcccgcattgataaaatcaaggactggttaggagatggcgtcattgccgacttcgacgacaaacagatcgagcaagcgctggctgatgtcgacgtccccattgttggggttggcggctcgtatcaccttgcagaaagttacccacccgttcattacattgccaccgataactatgcgctggttgaaagcgcatttttgcatttaaaagagaaaggcgttaaccgctttgctttttatggtcttccggaatcaagcggcaaacgttgggccactgagcgcgaatatgcatttcgtcagcttgtcgccgaagaaaagtatcgcggagtggtttatcaggggttagaaaccgcgccagagaactggcaacacgcgcaaaatcggctggcagactggctacaaacgctaccaccgcaaaccgggattattgccgttactgacgcccgagcgcggcatattctgcaagtatgtgaacatctacatattcccgtaccggaaaaattatgcgtgattggcatcgataacgaagaactgacccgctatctgtcgcgtgtcgccctttcttcggtcgctcagggcgcgcggcaaatgggctatcaggcggcaaaactgttgcatcgattattagataaagaagaaatgccgctacagcgaattttggtcccaccagttcgcgtcattgaacggcgctcaacagattatcgctcgctgaccgatcccgccgttattcaggccatgcattacattcgtaatcacgcctgtaaagggattaaagtggatcaggtactggatgcggtcgggatctcgcgctccaatcttgagaagcgttttaaagaagaggtgggtgaaaccatccatgccatgattcatgccgagaagctggagaaagcgcgcagtctgctgatttcaaccaccttgtcgatcaatgagatatcgcaaatgtgcggttatccatcgctgcaatatttctactctgtttttaaaaaagcatatgacacgacgccaaaagagtatcgcgatgtaaatagcgaggtcatgttgtagcgatgatgagaattgtcggcgtcacatcaggtaacgctgcgtggttgtcggatgcggcgtgaacgccttatccgacctacccgccaggcatgataaaacgcaccaacaacgcttcaggctcgtagctcaactgcctgagacaaagtaaaaagccttatccgactgacaagtcggataaggctcaaggaaatgcaattacatatgcgccgcgattaaccgttggttatcctggtacattgcgaacaggtagttgttataactcttccctttggtcgagtagcccttcagcttgtgaatcatcgctgtggcagtcacttcctgatccgctttacgcagctgcgcacgcgatttacggaacgaagagtaagccgggtgcgtattcaggttagtgacataggcgctcaccgattctttgacagaactaaactgtgagtaccctttcactttacctggcgcattggtacaacgtcctttcatgcatttcatgccgaacaggttgttgttgttgcgcgccagcttcgacgttccccaaccgctttctgctgcagccatcgtcgccaccatactggtggggataatgtctacgcgttcaagcaaggtattccacgggatttttcgcgtattaccggaccacttcaccttgtagcgtttggcgatgtctttcagacgcgcacgctcagcaggtgaccattggccctgatactgttttgaaatgagccagttacgttccgcagtaatggccgcattttggctggtaatgtaaggcattacggtccggagaaacgcctttttccttggtgttccggaagggtattttcgcaaatcaggaagtgaactactctttgcactattgcgagaatactcttgtttactgcttacctgtttattactagctttagttaagtgggacttttgactcgctgttgttgtgtgcgtcttcgctaacacctcactcgaaaacaccagagtgagtaacataagaatcatcgccccatatcgtcgtatgggagtcaaaatcatcaggtctcctggtcggatttaatcattccaacaccttatatttttcacaaatttgagagttgaatctcaaatcatatcaaaaatagctgtcaagagcaccccaaggaatagtccaaatctgaaactatgtcacgtgttaacgattcagattggcgctaaatcgcagaaaatgtgggggttatcgcaaaattcagccgttttttgcgcgagatcgctcacccttgcttctcatcctgtggacttaccgctcagggatgagttttgtttggcttatcgctggcaaactgtctgaaatcgcagcaataaggactcatccgccatgaaactcgccgcctgttttctgacactccttcctggcttcgccgttgccgccagctggacttctccggggtttcccgcctttagcgaacaggggacaggaacatttgtcagccacgcgcagttgcccaaaggtacgcgtccactaacgctaaattttgaccaacagtgctggcagcctgcggatgcgataaaactcaatcagatgctttccctgcaaccttgtagcaacacgccgcctcaatggcgattgttcagggacggcgaatatacgctgcaaatagacacccgctccggtacgccaacattgatgatttccatccagaacgccgccgaaccggtagcaagcctggtccgtgaatgcccgaaatgggatggattaccgctcacagtggatgtcagcgccactttcccggaaggagccgccgtaagggattattacagccagcaaattgcgatagtgaagaacggtcaaataatgttacaacccgctgccaccagcaacggtttactcctgctggaacgggcagaaactgacacatccgcccctttcgactggcataacgccacggtttactttgtgctgacagatcgtttcgaaaacggcgatcccagtaatgaccagagttacggacgtcataaagacggtatggcggaaattggcacttttcacggcggcgatttacgcggcctgaccaacaaactggattacctccagcagttgggcgttaatgctttatggataagcgccccatttgagcaaattcacggctgggtcggcggcggtacaaaaggcgatttcccgcattatgcctaccacggttattacacacaggactggacgaatcttgatgccaatatgggcaacgaagccgatctacggacgctggttgatagcgcacatcagcgcggtattcgtattctctttgatgtcgtgatgaaccacaccggctatgccacgctggcggatatgcaggagtatcagtttggcgcgttatatctttctggtgacgaagtgaaaaaatcgctgggtgaacgctggagcgactggaaacctgccgccgggcaaacctggcatagctttaacgattacattaatttcagcgacaaaacaggctgggataaatggtggggaaaaaactggatcagaacggatatcggcgattacgacaatcctggattcgacgatctcactatgtcgctagcctttttgccggatatcaaaaccgaatcaactaccgcttctggtctgccggtgttctataaaaacaaaatggatacccacgccaaagccattgacggctatacgccgcgcgattacttaacccactggttaagtcagtgggtccgcgactatgggattgatggttttcgggtcgataccgccaaacatgttgagttgcccgcctggcagcaactgaaaaccgaagccagcgccgcgcttcgcgaatggaaaaaagctaaccccgacaaagcattagatgacaaacctttctggatgaccggtgaagcctggggccacggcgtgatgcaaagtgactactatcgccacggcttcgatgcgatgatcaatttcgattatcaggagcaggcggcgaaagcagtcgactgtctggcgcagatggatacgacctggcagcaaatggcggagaaattgcagggtttcaacgtgttgagctacctctcgtcgcatgatacccgcctgttccgtgaagggggcgacaaagcagcagagttattactattagcgccaggcgcggtacaaatcttttatggtgatgaatcctcgcgtccgttcggtcctacaggttctgatccgctgcaaggtacacgttcggatatgaactggcaggatgttagcggtaaatctgccgccagcgtcgcgcactggcagaaaatcagccagttccgcgcccgccatcccgcaattggcgcgggcaaacaaacgacacttttgctgaagcagggctacggctttgttcgtgagcatggcgacgataaagtgctggtcgtctgggcagggcaacagtaacttttccggcttcccgttcgtcagtacctcgggaagccgccaaccaggataaaatgtcagccctaatcagcgttgcaggataaagcaccgctcactcttcaacagaccgatttgcaccccagcaaatgtagcgttattgttaccttccttgctacagagttcgacagatatcccgctatgacattctccctttttggtgacaaatttacccgccactccggcattacgctgttgatggaagatctgaacgacggtttacgcacgcctggcgcgattatgctcggcggcggtaatccggcgcagatcccggaaatgcaggactacttccagacgctactgaccgacatgctggaaagtggcaaagcgactgatgcactgtgtaactacgacggtccacaggggaaaacggagctactcacactgcttgccggaatgctgcgcgagaagttgggttgggatatcgaaccacagaatattgcactaacaaacggcagccagagcgcgtttttctacttatttaacctgtttgccggacgccgtgccgatggtcgggtcaaaaaagtgctgttcccgcttgcaccggaatacattggctatgctgacgccggactggaagaagatctgtttgtctctgcgcgtccgaatattgaactgctgccggaaggccagtttaaataccacgtcgattttgagcatctgcatattggcgaagaaaccgggatgatttgcgtctcccggccgacgaatccaacaggcaatgtgattactgacgaagagttgctgaagcttgacgcgctggcgaatcaacacggcattccgctggtgattgataacgcttatggcgtcccgttcccgggtatcatcttcagtgaagcgcgcccgctatggaatccgaatatcgtgctgtgcatgagtctttccaagctgggtctacctggctcccgctgcggcattatcatcgccaatgaaaaaatcatcaccgccatcaccaatatgaacggcattatcagcctggcacctggcggtattggtccggcgatgatgtgtgaaatgattaagcgtaacgatctgctgcgcctgtctgaaacagtcatcaaaccgttttactaccagcgtgttcaggaaactatcgccatcattcgccgctatttaccggaaaatcgctgcctgattcataaaccggaaggagccattttcctctggctatggtttaaggatttgcccattacgaccgagcagctctatcagcgcctgaaagcacgcggcgtgctgatggtgccggggcacaacttcttcccagggctggataaaccgtggccgcatacgcatcaatgtatgcgcatgaactacgtaccagagccggagaaaattgaggcgggggtgaagattctggcggaagagatagaaagagcctgggctgaaagtcactaaaaattgcctgatgcgctacgcttatcaggcctacatgatttctgcaatatattgaatttggaagaatttgtaggccggatagggcgtttacgccgcatctggcataaacaaagcacgctattccggcgttgagaaacgccggaaaacgtttcaaacaggctgctgccgtagccgatgccgctgcactttctcgacatccatgcactgcaacgcctttgtcgggcaggcttcaacacaggccggtcccgtctcccgatgccagcacagatcgcacttaatcgccctcgcctttttgcgcgaagaaacgacctccatcgcaccaaacgggcaagccagcatacagcttttacagccaatgcaacgtgtttgttcaacgaaaatatgcccttgttcgcggcttatcgcgtcaacagggcagacattcgcgcacggtgcatcttcacactgatgacaggctactgccgtggtccagctgtggtctttaatgacacgaatacgggaaataaactcgtctggtgacaacgcagcgcaatcctgattctcctgatgcgacactgcgcaagccacttcacaggtacggcaaccgatacatttcgtcgcatccgcaataataaaccggttcatgatcactcctttgcactaaaacagcagagtgccagagagcgcgtccctactgctttgatccaacgaaggaaatgttaaagttttggcacttgtccaaagcgttatgtgatcgcgcccaggtcatccctgacagtaaatcccagttcattagaaatagcctgcgcggtttcacgcagtggtttcaggagatttttctctcccacctgtttcagacgtgatgtcgaaagcgaaatcgacacggcgtacggcacccgcccatgaatatcaaacaccggaacagcaatacaggagacgccgagttcgttttcttctctgtccatcgccgctccgctttcacgaatgtgcgccagttcgtcgaacatcgcgggcagctcggtaatggtattgcgggttaacggctggatctcatgctgatggctttcccagtatgacttcacgtagtccgggtgaccaaacgccatgtagatcttgcccattgcggaacagtagagcggcatatgctggccaatataggcacgggttcgcagcatcccggttgtcggctccagcttataaatcaaaatagcgtgatcgtcttcgcggctggagaagttaatggtttcaccagtggcgatgttcagtgcctcaagatgcggagcggcgatatgaatgatattcagcgaagacagcgccttctgcccgacggcaataaatttggtagtcaggcggtaactccctgcggcgggcgcggtggtcacatagccgcaggactgtaatccctgcaataagcgatggacggtactcttatttaaaccagccagctccgaaagatgcgccaacggacaaccgtttggatagttgctcaaaatctcaatcagcatcaacccgcgaaacagactctggcttccggctggacgctctttttcctgcgccatctcgttctctttttttcccatcacttctttccccattttgtcgcgtcctgatggtagcgcaaagtgtgccgtagttcacgatctcgacagataatttataaccacttgatttttatgtattttgaaattcatcaatcagattgctttgttaaaaagtgatcgatatatttgaaatcatgtttcgcatattgaaattttaagccaaaaaagcgatcaaaaaaacaaggaagcctgggatgaaagttacatttgagcagttaaaagcagcctttaatcgggtcttaatttcacgcggcgttgacagcgaaacggctgacgcctgtgcagagatgttcgcccgcaccaccgaatccggcgtttattctcacggcgttaatcgtttccctcgtttcattcaacaactggaaaacggcgatatcattcctgatgcccaacccaaacgtataaccagcctcggcgcaattgaacagtgggacgcccagcgttcgatcggtaacctgacagcgaaaaagatgatggatcgcgccattgaactggctgccgatcacggtattggtctggtggcactacgtaatgccaaccactggatgcgcggcggcagctacggctggcaggcggcggaaaaaggctatattggcatttgctggaccaactccatcgccgtaatgccgccgtggggcgcaaaagagtgtcgcatcggcactaacccgctgatcgtcgccattccttccacgccgatcaccatggtcgatatgtcgatgtcgatgttctcttacggcatgttagaagttaaccgtctggcaggtcgtcagctcccggtagatggtggctttgatgatgagggcaatttgaccaaagaacctggcgttatcgagaagaatcgccgcattttgccgatgggctactggaaaggttctggcatgtcgattgtgctggatatgatcgctactctcctttccgacggcgcatccgttgccgaagtcacccaggacaacagcgacgaatacggcatttcacaaatttttattgccattgaagtggacaagcttatcgacggtcccacccgcgatgccaagctgcaacgcatcatggattacgttactagtgccgagcgtgctgacgaaaatcaggccattcgcttacccggccatgaatttactaccctgctggccgaaaaccgccgtaacggcatcactgttgatgacagcgtgtgggccaaaatccaggcgttatgaggagataagtcatgatttttggacatatcgcgcagcccaatccgtgccgtttgcccgccgccattgaaaaggcgctcgattttctgcgcgctaccgatttcaacgccctggagccgggcgttgtcgaaatcgacggcaaaaatatttatacgcaaattatcgatttaaccacacgcgaagcggtggtaaaccgtccggaagtgcatcgtcggtatatcgatattcagtttctggcgtggggcgaagagaaaatcggcattgctattgatacgggaaataataaagtcagcgaatcactattagagcagcgcgatattattttttatcacgacagtgaacatgaatcatttatagaaatgataccgggcagctacgcaattttctttccgcaggatgttcaccgaccaggttgtattttgcaaacagcctctgagatacgaaaaattgtggttaaagtcgcattaacggcgctgaattaatcgaataatcgtctacgccagaacgactgggtaatgttattgctctaactatattaataatttaggttgctgcacatgcaacttgaattatgacagacatagcctcaaggaatagctatgaaaaaaatacttgaagcaatactggcgattaatctcgccgtactttcctgtattgtgtttataaacattattttaagatatggttttcagacaagcattttatctgtagatgaattgtcacgttatttatttgtctggttaacatttattggcgcgattgtggcttttatggataacgcccacgttcaggtcacctttctggtggagaaactctcccccgcatggcaacgacgagtcgctctggttacccattccttaatcttatttatttgtggcgcactggcctggggcgcaacgctaaaaacaattcaggactggagcgattattcaccgatcctcggtttacccatcggcctgatgtatgccgcttgtctgcccaccagcctcgttatcgcattctttgaactgcgtcatttatatcaactcatcacgcgtagcaattctctaacgtcgccaccgcaaggagcttaatcatggctgtgctgatttttctgggctgtctgttgggtggtattgctatcggtttgcctattgcctgggcactgttgttgtgcggggcggcgttaatgttctggctggacatgtttgatgtccagatcatggcacaaacgctggtgaacggagccgatagcttctccctgctggcgattccgttctttgtgctggcgggtgaaataatgaatgcgggcggcttgtcaaaacgcattgttgacctgccgatgaaactggtggggcataaaccaggcgggctgggctacgtcggcgtgctggcagctatgattatggcgagcctttctggttctgccgttgcggataccgccgccgttgccgctctactggtgccgatgatgcgcagcgccaactacccggtcaaccgggcggcggggctgattgcctctggcggcattatcgcgccaattattcccccttccattccgtttattatcttcggcgtttccagcggattatccatcagtaagctgtttatggcgggcattgcccctggcatgatgatgggcgcaacgctgatgcttacctggtggtggcaggccagtcgccttaatttaccccgccagcaaaaagcaacgatgcaggaaatctggcactcttttgtctccggtatctgggcgctgtttcttccagtcatcattattggcgggtttcgctccggtctgtttacccctaccgaagccggggccgttgctgctttctatgcgctgtttgtcgccacagttatttaccgtgaaatgaccttcgccacactttggcatgtactcattggcgcggcgaaaaccacctcagtggttatgtttctggtggcctcggcacaagtttccgcctggctgattaccattgctgaactgccgatgatggtttctgatttactgcaaccgttggtcgattcaccgcgtctgctgtttatcgtcattatggtggctatcctgattgtcggcatggtcatggatttaacgccgacggtattaattcttaccccggtattaatgcctttagttaaagaggcaggaatcgatccgatttatttcggtgtcatgtttatcattaactgctcaatcggcttaattacaccgcctatcggtaatgtacttaacgttatttcaggggtggcaaaactcaaattcgatgatgcagtcagaggcgttttcccttacgtcctggttttatattcattattagtcgtatttgtttttattcccgatctcatcatcctccctttgaaatggattaattaaaaggaaaatattatgaaattacgctctgtaacctacgcattattcattgctggcctggctgcattcagcacatcttctctggcggcgcaatctttacgtttcggttatgaaacctcacaaaccgactcgcaacatattgcggcgaaaaaattcaatgatttattgcaggagagaaccaaaggcgagctgaaattaaaattgtttccggatagcaccctcggtaacgcgcaggcgatgatcagcggcgtacgtggcggcaccatcgatatggaaatgtccggctcgaataactttgccgggttatcaccagtgatgaacttgcttgatgtccctttcctgttccgcgataccgctcacgcgcataaaacgctcgacggcaaagtcggtgatgatctgaaagcctcacttgaaggtaaaggactaaaagtactggcctactgggaaaacggctggcgcgatgtcaccaactcgcgcgcaccggttaaaacccccgccgacctgaaagggctgaaaattcgcaccaacaatagcccgatgaatatcgccgcattcaaagtctttggcgctaacccgatcccgatgccgtttgccgaagtctataccgggctggaaacccgcactatcgacgctcaggaacacccgatcaacgtcgtctggtcagcaaaatttttcgaagtgcagaagtacctttctctgacgcaccacgcctattccccgcttctggtggtgatcaacaaagcgaagtttgatggcttaaccccggagttccagcaagcgctaatttcatctgcgcaggaagcgggtaactaccagcgcaaactggttgccgaagatcagcaaaaaatcatcgacggcatgaaagaagcgggcgtggaagtcatcaccgatctcgaccgcaaagcctttagcgacgcactgggtactcaggtccgcgacatgtttgtaaaagatgttccgcagggtgctgatctactgaaagccgtggatgaggtgcaataaaccatgacgcaatactggctggggttagattgtggcggtagctggctgaaagccgggctgtatgaccgcgaaggccgggaggcaggcgtgcagcgcctgccgctgtgcgcattaagcccgcagccaggttgggcagagcgcgatatggcagaactgtggcaatgctgcatggctgtcattcgcgccctgcttactcattctggtgttagcggggaacaaattgtcggtatcggcatctccgcacagggaaagggcttgtttttgctggataaaaacgacaaaccgctcgggaatgctattttgtcctcggaccgccgggcgatggaaatcgttcgtcgctggcaggaagatggcatcccggaaaaactctacccgctgacccgacaaaccttgtggaccgggcatccggtgtcgctgttacgctggctgaaagagcacgaaccagaacgctacgcgcaaattggctgcgtgatgatgacgcacgactacctgcgctggtgtttaactggcgtcaaaggctgtgaagagagcaatatttccgagtccaacctctacaacatgagtcttggggaatatgacccgtgcctcaccgactggctggggatcgctgaaatcaatcacgccctgccgcctgttgtcggatctgccgaaatctgcggggagatcaccgctcagacagccgccctgaccggtctgaaagcgggtacgcccgttgttggcggcctgtttgatgtggtttccaccgcactctgcgccgggatcgaagacgaatttaccctcaatgcggtgatggggacctgggcggtgaccagcggcataacccgcggtttacgtgacggtgaagcgcatccgtatgtctatggtcgctacgttaacgatggtgaatttatcgttcacgaagccagccctacctcttccggcaacctcgaatggtttaccgcacagtggggagaaatctcgtttgatgagatcaatcaggccgttgccagcttgccgaaggctgggggcgatctctttttcctgccgttcctgtacggcagcaacgccggactcgagatgaccagtggtttctacgggatgcaggccattcacacccgcgcgcacctgttgcaggccatctatgaaggggtggtgttcagccatatgacccacctcaaccgaatgcgcgaacgttttactgatgttcacaccctacgcgtcactggcggcccggcgcactccgatgtctggatgcaaatgctggcggacgtcagcggtctgcgtatcgagctgccgcaggtggaagaaaccggctgctttggtgcggcccttgccgcccgcgtcggcaccggggtttatcacaacttcagcgaagcccaacgtgacttgcgacacccggtgcgcaccctgctgccagatatgaccgcccatcagctttaccaaaaaaaatatcaacgttatcagcatctcattgccgcacttcagggctttcacgcccgcattaaggagcacacattatgagccgaccacttctgcaactggccctcgaccactcatcacttgaagccgcgcagcgcgacatgacgctgttaaaagacagcgtcgatatcgtcgaagcgggcaccattctctgtttaaacgaagggcttggcgcggtgaaagccttgcgcgaacagtgcccggacaaaatcatcgttgctgactggaaggtcgccgacgctggtgaaacgctcgcgcaacaggcgtttggcgcaggcgctaactggatgaccatcatctgcgccgcgccgctcgcgacggtagaaaaaggccacgcaatggcacaacgctgcgggggtgaaattcagatagagctgttcggtaactggacgctggacgacgcccgcgactggcatcgtattggcgtgcggcaggccatttatcatcgcggtcgtgatgcacaggccagcgggcaacagtggggcgaagccgatctggcacgcatgaaggcgctttcagatatcggccttgagctttccattactggcgggattacccctgctgacctgccgctgtttaaagatatccgcgtgaaagcgtttattgccgggcgggcactggcaggcgcggcaaatccggcgcaagtggctggcgatttccatgcgcaaatcgacgctatctggggaggtgcgcgtgcgtaatcatccgttagggatttatgaaaaagcgctggcgaaagatctctcctggccggagcggctggtgctggcaaaaagctgcggttttgattttgtcgaaatgtcggtggatgaaaccgacgaacggctctcacgtcttgactggagcgccgcacaaaggacttcgctggttgccgcgatgatcgaaacaggtgttgggatcccgtcgatgtgcctgtccgcacatcgtcgctttccctttggtagccgtgacgaggcagtgcgcgaacgggcgcgggaaatcatgagtaaagcgattcgcctggcgcgcgatctcggcattcgcaccatccagctggcaggttatgacgtctattacgaagaccacgacgaaggcacccggcaacgttttgctgaagggctggcgtgggcagtcgaacaggcggcggcatcacaagtaatgctggcgatggagattatggataccgcgtttatgaactccatcagcaaatggaaaaaatgggacgagatgctcgcctcgccgtggttcaccgtctacccggacgtcggcaacctcagcgcctggggcaatgatgttcccgccgaactgaaactgggcattgaccgtatcgccgcgatccacctgaaagacacccagccagttaccgagcaaagtcccggacagttccgcgacgtgccgtttggcgaaggctgcgtcgatttcgttggcatcttcaaaacgctgcataaactgaactatcgcggttctttcctgattgagatgtggaccgaaaaagccaaagagccggtgctggagattattcaggcgcggcgttggattgaagcgcgtatgcaggaggctggatttatatgttagagcaactgaaagccgacgtgctggcggcaaatctggcgcttcccgctcaccatctggtgacgttcacctggggcaatgtcagcgcggtagacgacacgcggcaatggatggtaatcaaaccttccggcgtcgaatacgacgtgatgaccgccgacgatatggtggtggttgagatagccagcggtaaggcggtggaaggcagcaaaaagccctcttccgatacgccaacgcatctggcgctctaccgtcgctatgcagagatcggtggcattgtgcatacccactcgcgccacgcgaccatctggtcacaggccgggctggatctccccgcctggggcaccacccacgccgattatttttacggtgccatcccctgcacgcgccagatgaccactgaggagatcaacggcgagtatgaataccagactggcgaagtgatcattaaaaccttcgaagaacgtggtttgaacccggcacaaatcccggcggtactggtacattctcacggcccgttcgcctggggaaaaaacgccgccgatgcggtgcataacgccgtggtgctggaagagtgcgcctatatgggcctgttctcgcgccagcttgcgccgcagctccctgccatgcaaaacgaactgctggataaacactacctgcgtaagcatggagacaatgcctattacgggcagtaatccctcacgccggggcttcatcgccccggcactacgaattgatatgttccttgctgtaacgccgtttccacgctgctggcgttaaaccggtgtgtttgcgaaaaatctgccggaaaaagccaacgtcattaaaccgtattgcatggagcaggccgacaacgtcgagtcactgcataacctgttgctgcccgccgatgcgccatttacgacatttgaaggcaagggattgttcagccataagatcctgattcagacgccaggttcccggtatgaacagagcaatccagagcaacaacctttgtggcattacgacggagcaccagccgcaccaacatccaccggtgaattaaaaacgccagctcacgccggtgacaaaggtaaaactctcattacgatcaatcatcgggctgtcggtaatctcttccggcagctcgctgtatcctgcactcgccatcaatacgacgtgctctcctatcgggtattttgccgtcaggctgacatagggcacccaggcatcctgcgcggaataacttgccagaccgctacgacgggactcactctctgaaatgccatagtaatagtcactgaaattctcgtcataatagagcacgcccagcgcaggtgtcagcgacaggcgacctatctgcattttgtggaaaaccgatagctcccccacccagccgttgctgttatccagaacgtccgcagccgcagaggctttcacagttccccaacgctcgtggtgataccaggcaacccccgccatagccgtactatcacgcttatcaagctgttgcatggcataatcgtcattatcggcagggtcaaattccagcggcatccaggatgcggtcaggctaagttcatttttttcactttgcgacagaataaaacctaacgtggtctgacgaacataaaaagaatcaccttcataactaatcaggggaattgcctttgtattttcattataaccgcgataaggcgattcattataagccgcaccggcaccaatggataattcagaagcagttgcgcttgccataaaaggcaacgcaaataacgccacaatattgcggttaattaacatgttcggtattccattttaaaataagataaaaaagagtcggcatagtaatgcttacaatttctccggtgcaagattcatatttatatagtaatatataaaattatatataattgggctgttgcgatgacaaaattacaacttaagtaccgggagttaaaaattatctcggtaatcgctgccagtgaaaatatcagccatgccgcgactgtacttggcatcgcacaggccaacgtcagcaaataccttgctgattttgaatcaaaagtgggtttaaaagtctttgaccgaaccacccggcagctgatgctcacaccttttggtaccgcgctgttaccgtacatcaacgacatgctggacagaaacgagcagcttaataattttattgcagattataagcatgagaaacgtggtcgggtcaccatctacgccccaaccggcataattacctatttatccaaacatgtaatcgataaaattaaagatatcggtgatatcaccttatcgctaaaaacctgcaatcttgagcgtaatgccttttatgaaggcgtcgaatttcctgatgattgtgatgttttaatcagctacgctccaccaaaagatgaatcgctggttgccagttttattacccaatatgccgtaaccgcttatgccagccagcgctatcttgagaaacatcctattagccgtcctgacgaactcgaacatcactcctgtattttgatcgactcgatgatgattgatgacgcgaatatctggcgcttcaacgtcgccgggagtaaagaggtgcgggattatcgcgtgaagggaaattacgtttgcgataacacgcaatcggcgctggagctggcacgaaatcacctggggattgtgtttgcgccagacaaaagtgtgcagagcgatctgcaagacggcacgctggtgccctgctttcagcacccgtatgaatggtggctggatctggtggctatcttccgtaaacgggaataccagccctggcgggtccagtatgtgctggatgaaatgctgcgtgaaattcgccaccagcttgctcagtcgcagcaactgcggcctgaacaagcggcggaaagcgaagattaatgatcgagataaaggtaatgcacccaactggtcatgcgtaacagcactttgcgcatcaccgagacatggctgaaatgatcagagtagaccgccacctgggcgtaaataccgtctggtaaagcgctcaaatcagtgtgctcatccagttcaatggtcgcgataacgccatctgaacccggcgctgtgtttaacgtctgtaaggtgccggtcgactgataagctccgccgggaacagctggactaatggctgccagcttaccgctgaacactttgcctggcagagcgttaaataccacttccgcatcatcgccgggagccaggcgcagcaaggagttctgacggaactgcgccacgatttgtcgtttctgatcgggtataaacaccatcaccggacgtagcggcagcgacgcggcataggtacccggacgaatcagcacctgggtcacataaccatcgctcggcgcacgcactatcgtctgctcaaggttatattttgcttccgcgagctgcgctttcaggctggcgatttgagaatgttcacccaacaccaggctatccagctggctctggatctgtttttgttccgccgccgatgactttacggaggcttcctgcgccagataattttgccgcgccacatcaatatcgcgttctgaaaacgggtttactttcgcctggctgccgcgtgcgtaacgctgatactctttagcgaatttatcccgcgtggcctttgcctgctgagtattcgccgccatctcatctaactctgcgcccaacgcccgctgtttatgttctgcggtaacgatatccgccatcagccgatccacccgcgcctgataacgcgtcgggtccagtcgaaatagcacctcaccttttttaatcagcgtatttttcttatccgtcacttcgatcaccacgcctgtcacctgtgggacaacaggaatagaaataaccgctttttgcgctttgaaggtatacggatggttatagttcattaacagaattaaaccactgacaataaatatgccacccagggccgctgtgggaatggtccatttatttacaggaattttgaagatcttaaacattgcccatgcaaaagccacataggtcaaaataatcagtaaatccataagtattactcggcagaagaggatttgatgtcggcgagctgtttctccagcccggcaatacgctgttgtagttgcacaacggaggagtcatggttttgcattccccatccccgctccgggcggtaaagcgtggcccaaatccacaaaaatggccagataacatgcagcgtaaaaagactcacccaaccagcaacatgaatggcgtcggcatgaggatgattacgttttttagcaatcaggtagggaatatcatgtaaaataataatcccatagaatatcaccagaaatacaaaaataagcactcccagtgcaaaataatccagaaacatatttacctcagagaatataaaaaagaacaattaacgcatattatgaaatcccatgatgcagtgcaatttccttatttatataacggcatattgttttttatatactttctgaagtgtgctgcgtggcttttcaacaggtcgaggtttatcatattgaaataatggaactattgaccaagctaatgaataactccagtaaaacatccacagtacagataaagcgtattaaaccttcaattatctaccgtttattgctgattggcctcggaacgccaatggtgatttacggcctggtttgcccgctcaccatcgaaacgcgagagtaaactcctggcaaaacacgccccagaaacgcacttctgttggcgtagtctgggttattgcgcacgtaggtttaaaacgtaaattgtaacaacgtgcgctttgtttatgccggatgcggcgtgtacgccttatccggcctacggtgaggttcccgtaggcatgataagacgcgtaagcgtcgcatcaggcaatgaatacccaatgcgaccagcttcttatatcagaacagccccaacggtttatccgagtagctcaccagcaggcacttggtttgctggtaatgctccagcatcatcttgtgggtttcgcgaccgatacctgattgtttgtagccaccaaacgcagcatgtgccgggtaagcgtgatagcagttggtccacacgcgcccggcctgaatgccgcgtcccatcttataggccagattaccgttacgactccagacgcctgcgcccaggccatattgcgtatcgttcgccagctccagcgcttcttccatcgttttgaaggtggtcaccgccagcaccgggccaaaaatctcctcctggaacacccgcatattgttctgaccaaacagaatcgtcggttcgaggtagtagccgtctttcagttcaccttccagcagcttgcgccgcccgccggtgagcacgtctgcgccctcttttttaccgatatcaatgtagttgaggatggtttccagttgcccgtgagaaacctgcgcgcccatttgcgtcacgctgtcgagtgggttaccgctgcgaatgctttcgacacggcggatggcgcgttccataaagcgttcgtagattgactcctgcactaaggcacgactcggacaggtgcaaacttcaccctggttaaaggcaaacagtgcaaagccttccagcgctttatcgaaaaaggcatcttcttcatccatcacatcagcaaagaagatatttggcgatttgccgcccagctccagcgtcaccggaataatgttttgcgtggcgtattgcataatttgttggcccacttccgttgagccggtaaacgccactttggcgatgcgtttcgaggtcgccagatattcgccaatttccccacctgcgccgttgaccacgttcaccacgcccggcggcagtaaatcaccgacgatttccattagcagcagtacagaaagcggggtaagacgtgcgggtttcagcaccacacagttgcccgccgccagcgcgggagccattttccagctcgccatcagcagcgggaagttccacgggataatctgccccaccacgcctaacggttcatggaaatgataggccacggtttcgctatcaacttcactgatcccaccttcctgcgcccgaatacacgaggcgaaatagcgaaaatggtcaatcgccagcggcacgtcggcagcactggtttcgcgaatgggtttgccgttatcccaggtttcagccgtcgctaacagctcaaggttttgttccattcgatcggcaatcttaaacagaatcgccgcgcgatcctgcaccgaggtgtgcgcccatttatctttcactttgtgcgcagcatccagcgccagatcgatgtctcgtttgcccgaagacgccacttcgcacagcagctgcccggtcaccggcgtcagattctggtaatactcgccgtcggcaggggctacccattcgccgccaataaagttgtcatagcgggcttttaacttgagggggaaaccatactcaccgggcttaatctgtgctgaagggggattattggtcatgatcgtctccttgcggtgtgaggtataacaagggtagacgtgactggcgaaatcttcgccagtcggtaacagctttacgacagctatcacgaatttacgggcaagggttacagagatagttgaaaaagcggctgacaatttgccagccgttgtggaaatgatgattacatcgctgcgcgataaatcgccacaatttcttcgtgagttgcctggatcgggttagtaaaaccacaggcatctttcagggcattagtcgccagaaccgcgaaatcttcttctttcacgttcaggtcgcgtaggcctgccgggatatccactttcttcgccagttcacggatggcgttaatgcaggcttcagcaccttccgcatcgtttttacctgtcacgttcacgcccattgcagcggcacagtcacgcagacgtgcggcggcgactttgctgttgaatacctgaacatgcggcagcaaaacggcgttacatacaccgtgtggcaggttgtagaaaccgcccagctggtgcgccatcgcatgaacataacccagagaagcattattgaacgccataccagcaaggaactgggcataagccattgcttcacgcgctttcgcattactgccatcttcaacggctaacggcaggttttcggcaatcatggtcacggctttcagtgcacaagcgtcagtgatcggcgtggcggcaatagaaacatatgcttcgatagcgtgcgttaaggcatccatacccgttgcggcggtcagtgacttcggcataccaatcatcagagaggagtcattgacagaaagcagcggagtgacatgtttatcaacaatcgccattttgatatgacgcgcttcgtcagtgatgatgcagaaacgggtcatttcagaggccgtacccgcagtggtgttgatggcgatcatcggcagctgcggttttgcagagcggtcaacgccttcgtaatcgcgaatatcgccgccattggctgccaccagcgcaataccttttgcgcagtcgtgtggagaaccaccgcctaaggagatcacgctatcgcaattattttctttaagtaatttcaaacctgcggcgacgttttccgtggtggggttaggttgggtgccatcataaataacgctaaaaatattgcgttcttccagtgctttttgcacatcacccgccatacctaatttcgttaacatactgtcagtgacaattaaggtacgggtaaatccataatctgccatcatattcattgcatcagtcaatgaatcagcgccgatgacattcacagaaggaataaagaaagttgaagatgccataacacactcctgaaagtgtaaaaaagggtgggcagcttactgaggattttcattcgaaaacatgatcattattattaattatcaaaattaatctaataaaaagcacattgtattcattaaacaatgtgctttttttaaaatcataagaaatttgtattaatttattttaaaaattaattaatcatttccttatttttccggaaataataatgcgtcgcgcaataaatgatcatttccacgacgacgcgtaaagccaatgcggtcaaaatattccagaatctgaattgccagctttcggcctacgcctaagcgatcgcggaaatccgccgcgcaggttgaaccacactcctgatcgagatcgcggatcatattggcaaattcgacaatccgatcgttacggtaataacgatctttgacgatcgcggtaattattccttgctgcgccgcctggcgcagcgtcaggcgcattgcctgctcgtcggttcccgtctcttttgccaggtcacgcacccaccacggctcgtcaccaaacagcggctctgctttttgccagatggcctgctgctcttcgctgaagcccgctttgtgatctggcagatgcagccaaccgtgatgactgaggatgtcgccgctttcgcgcatcttttcaatcagcaacagtaccagcgcttcatcttccattggcaacgccatacgtcgcagacgttcgcgcccaggaccaggttcatcgcgatgttgctcatgataagtcgctaatgtgtcgagaattttccgctgccagcgggcggcaactggcgcattcaacaagctataaccagcctgaatataaccaggctgttgcagcaattcgcgcatcccttcgccgttgagctggcgcgcccaggcgaaatccgcaaggttaaccgcgccgcgttccagatgaacagataacgcatcggcatcgctctgcgcccgtgcaagagacgccagccattgcagatattccggcttacgtttaccgcgacgcggcgggttaagcatcaccacacgcgcccccgccagcgtgttgcgggccgagatatcgcgcagcactaagcgatcgttatccgccagccacagcggcgtgtcgaacaccagctcggcaaggttatcttccagcagcgaaacgcgtcccgtaacgtggctggcggcgtggtgaatatgcagcggctgccactgggtcagcggcgtatgggtttgaagctcgacaatcacccgtgtgaacggctctggcggcgcatcggcaagcagccagtcgccacggttaatctgctctttttccgcatcacccgcgatgttaagcgcgatacgctgcccggcatgggccgtttctgttggctggttttgtgcatgcagcgcacgtacacggatcggtttatttacaccagttagccagagtgaatcgcctaccttcacttccccgcttaacgccgtaccggtgacgaccagcccggcaccttttacggtaaatgcgcggtcgatcgcgaggcggaaactatgttggctggcgtgttcacgttctggtaactgaagcagatgctcgcgcagggcatcaattccacgaccttcggttgctgcggtgataaacagttttgcctcagcaaaaccgtattcccgcagcacctcctttacctgacgttcaacctcatcaacacgcgcttcgtccacgcgatcggctttggtcagcgccactgtcagcatcgggttaccggtcagctgcaaaatcgccagatgctcacgggtctgtgccatcacgctgtcatcgcacgccaccaccaacagcgcgtgatcgataccaccaacgcccgccagcatgttggaaagaaacttttcatgaccgggtacgtcgataaaaccaggcacgcgaccatccggctgcggccagtaggcatagccgagatcgatggtcatgccgcgctttttttcttccggcagacggtcggcatttacgccagtaatcgcctgcaataaggttgttttgccgtggtcaacgtgtccggcagtcgcaataatcatttcaacaacatctccaaaaaccgttgctcatcttcaaggcagcgtaaatccagccacaatcgtccgtcataaatacgaccaatcaccggcactggcaattcacgccagcgggcggctaatgactcaaggtggctaccgcgtccatcatggggtgtaaacgttaatgccgcgctcggcaggcgatcaaccggcagcgaaccactgccaatctgcgaaagacatggcataacctgtaccgcaaactccgcgccgtaatgtgcggcaaggggagcctgtaaacgttgtgcctggatttgaatgacctctgcgctgcgggtaagcaggcgcagggtcggtaattttttactcagagcttcagggtgtaaataaagacgcaacgtggcttccagcgccgcaagggtcattttatccgcgcgtaatgcacgcttcagcgggtggctttgcaggcgggcgatcatctcttttttaccaacaataattcctgcctgcggcccgcctaacaacttgtcgccggagaaactcaccagactgacgcccgccgcaatcaactcctgcggcattggctctttcggcaaaccgtactggctaagatcgaccagcgagccactgcctaaatcagtcactacgggaacatccagctctttgccgagcgccaccagttccgcttcatctatcgctttggtgaatccctgaatgctgtagttactggtatgtactttcatcaacagcgcggtattttcattcaccgcctgacgataatcattagcgtgcgtgcggttggtggtccccacttcgtgtagggtgcagcctgcctgacgcatgacatcaggaatacgaaacgcgccgccaatctccaccagttcgccgcgagataccaccacctctttcccgctggcagtggccgccaacatcaataacaccgccgccgcattgttattaacgatacaggcatcttccgcccccgtaatgcggcacagcagctgcgccagcgcacgatcgcgatgtccgcgtccggcgtcgtccagatcgtactcgagggtcactggcgaacgcatagcctgcgcaacggcttccaccgcggcttccgcctgtaaagctcgcccaaggttggtatgcagcacggttcccgtcaggttgatcaccggacgcagcgcgctctgcgcctctttcgtcaaccgggcatcgacttcttgcgcccagttttcacaccatgcgggcagcgtctggctatcacgaatcacttctcgcgcttcgtcaagcatctgacgcagcaattccaccacgcgggtgtgaccataagtatcacgcaaagaaaggaaggagctatcgcgcaataagcgatcaatagccggaagttgactatagagggaacgcgtttcggttgtcataggaaacctggctgatcaaggccctctcacacggagaagggcgtttaacataaccacggattgtaacgtgagatgggtcaggaggacatatcgcgcatcaagcctttggcggttcggtgcgagcaaaactttcgcggctaaacaggttttcgaccagtttgactaagtgtgggcggtcgacacaccaacctggcgcaacgcggcggaaattgagatatccgacggcacaggcaatggcgatagtcgccagattgaccgtatcggttttgagtgtgccatcgaccagatatccttccagcacatccagactgcggttgattttctcccgctggcgtaacaattcatcttcagactgctgcgccgctggacgcgcctgttcacgcaccgataccagcccggcatccataatgccatccgccagtgcctcaattttgcgcacccgcaacgactccagcggatcgcgcggcaacatcgccggagcgacattcattaattcaatatattcagcgatgatcggcgaatcaaaccaacattcgccctcttcggtcaccagcaccggcacttttcctaacgggttaaattgcgccacgccgttgtccgcgttatagggcagttcattaataaattcgaaagttatgcccttttctaacaacagaatagaaagtttgcgtacaaacgggctggtgtagctaccgacgagtttcatgccgagtcctttgtgcgaggaaaaatatcagtatggcctggtgatgggaaaaagggcagaaaatgttgatggtttgttacttccaaataaatcacatatttatcatggtgatataaatattttcctaattgtttctatctgatggatatctcacttaaggctttcttataaatctgtagggttttgcctggaagcagacaaataacccgataaaacaaggatgagcagatgagcggaaaaccggcagcgcgtcagggcgacatgacgcagtatggcggtagcattgttcagggttcagccggggtgcgcattggtgcccccaccggcgtggcctgttcggtgtgccccggcggagtgacgtccggccatccggtcaatcccctgctcggtgcaaaggtccttcccggtgaaaccgaccttgccctgcccggcccgctgccgttcatcctctcccgcacctacagcagttaccggacaaaaacgcccgcgccggtggggagcctcggccccggctggaaaatgcctgcggatatccgcttacagctgcgcgataacacactgatactcagtgataacggcggcagaagcctgtattttgagcacctgtttcccggtgaggacggttacagccgcagcgagtcactgtggctggtgcgcggcggcgtcctgagactggatgaaggtcaccggctggccgcactctggcaggcgctgccggaagaactccgcttaagtccgcatcgttatctggcgacaaacagtccgcaggggccgtggtggctgctcggctggtgtgagcgggtgccggaagcggatgaggtgctgcctgcgccgctgccgccgtaccgggtactgaccgggctggtggaccgcttcgggcgcacacagacgttccaccgcgaagccgccggtgaattcagcggcgaaatcaccggcgtgacggatggtgccgggcgtcacttccggctggtactgaccacgcaggcgcagcgggcagaagaagcccggcagcaggccatttccggcgggacggaaccgtccgcttttcctgataccctgccgggttacaccgaatatggccgggacaacggcatccgtctgtctgccgtgtggctgacgcacgacccggaatacccggagaatttacctgccgcgccgctggtacgctatggctggacgccacgcggcgaactggcggtggtgtatgaccgtagtggcaaacaggtgcgcagctttacttacgatgataaataccggggccggatggtggcgcaccgtcacacgggccggccggaaatccgttaccgttacgacagcgacgggcgggtgacagaacagctaaacccggcaggcttaagttacacgtatcagtatgagaaggaccgcatcaccatcaccgacagcctgaaccgccgtgaagtgctgcacacgcagggcgaagccgggctgaagcgggtggtgaaaaaggaacacgcggacggcagcgtcacgcagagtcagtttgatgcggtgggcaggcttaaggcacagacagatacggcaggcaggacaacagagtacagcccggatgtggtgacgggcctcatcacgcgcatcaccacgccggatggcagggcatcggcgttttactataaccaccacagccagttaacgtcagccaccgggccagacgggctggaaatgcgccgcaaatatgatgaatccggccgtctgattcaggaaactgcccctgacggcgatatcacccgctaccgttatgataatccacacagtgacttaccctgcgcaacggaagatgccaccggcagccggaaaaccatgacgtggagccgttacggccagttgctgagcttcaccgactgttccggttatgtaacccgttatgaccatgaccgttttggtcaggtgacggcggtgcaccgcgaggaaggcctgagccagtaccgcgcatacgacagccgtggacagttaattgccgtgaaagacacgcagggccatgaaacgcggtatgaatacaacatcgccggtgacctgaccgccgtcattgccccggacggcagcagaaacgggacacagtacgatgcgtggggaaaggccgtccgtaccacgcagggcgggctgacgcgcagtatggaatacgatgctgccggacgggtcatccgcctgaccagtgaaaacggcagccacaccaccttccgttacgatgtactcgaccggctgatacaggaaaccggctttgacggccgcacacagcgttatcaccacgacctgaccggcaaacttatccgcagcgaggatgaggggctggtcacccactggtactatgacgaagcagaccgcctcactcaccgcaccgtgaagggtgaaaccgcagagcagtggcagtatgacgaacgcggctggctgacagacatcagccatatcagcgaagggcaccgggtggcggtgcattacaggtatgatgagaaaggccggctgaccggtgagcgccagacggtgcatcacccgcagacggaagcactgctctggcagcatgagaccagacatgcgtacaacgcgcagggactggcgaaccgctgtataccggacagcctgcccgccgtggaatggctgacctacggcagcggctggctggcaggcatgaagctcggcgacacaccgctggtggatttcacccgcgaccgcctgcaccgggaaacgctgcgcagcttcggccgttatgaactcaccaccgcttatacccctgccgggcagttacagagccagcacctgaacagcctgctgtctgaccgcgattacacctggaacgacaacggcgaactcatccgcatcagcagcccgcgccagacccggagttacagctacagcaccaccggcaggctgaccggcgttcacaccaccgcagcgaatctggatatccgcatcccgtatgccacagacccggcaggtaaccgcctgcccgacccggagctgcacccggacagcaccctcagcatgtggccggataaccgtatcgcccgtgacgcgcactatctttaccggtatgaccgtcacggcaggctgacagagaaaaccgacctcatcccggaaggggttatccgcacggatgatgagcggactcaccggtaccattacgacagtcagcaccggctggtgcactacacgcggacacaatatgaagagccgctggtcgaaagtcgctatctttacgacccgctgggccgcagggtggcaaaacgggtgtggcggcgtgaacgggacctgacgggctggatgtcgctgtcacggaaaccgcaagtgacctggtacggctgggacggcgaccggctgaccacgatacagaacgacagaacccgcatccagacgatttatcagccggggagcttcacgccactcatcagagttgaaaccgccaccggtgagctggcgaaaacgcagcgccgcagcctggcggatgcgcttcagcagtccggcggcgaagacggtggcagtgtggtgttcccgccggtgctggtgcagatgctcgaccggctggaaagtgaaatcctggctgaccgggtgagtgaggaaagccgccgctggctggcatcgtgcggcctgaccgtggagcagatgcaaaaccagatggacccggtgtacacgccggcgcgaaaaatccacctgtaccactgcgaccatcgcggcctgccgctggcgctcatcagcacggaaggggcaacagcgtggtgcgcagaatatgatgaatggggcaacctgctgaatgaagagaacccgcatcagctgcagcagcttatccggctgccggggcagcagtatgatgaggagtccggcctgtattacaaccgccaccgctattatgacccgctgcaggggcgatatatcactcaggatccgattgggctgaaggggggatggaatttttatcagtatccgttgaatccagttacgaatacagatcctctggggttagaagtttttcctagaccattccccttgccaattccatggcccaaaagccctgcacagcagcaagcagatgataatgctgcaaaagcattgacaaaatggtggaacgatacagcatcacaaagaatatttgactctctaatattgaataatccgggactagcattagatataacaatgatagcttctcgtggaaatgttgcagacacagggataactgatcgtgtcaatgacataataaatgacagattctggagtgatgggaaaaaacccgacagatgtgacgtacttcaggaactaattgattgtggtgatattagtgctaaagatgcaaaaagcacacagaaagcctggaattgtcgtcactccagacagtcaaacgataaaaaaagatagcccttgtggaggttcctgcaatgtcaaatacataccagaaaagaaaggcaagtaaagagtatggtttatataatcaatgtaagaaactaaatgatgatgaattatttcgcttacttgatgatcacaattccttgaaaaggatttcatctgccagagtattacagttaagaggtgggcaagacgctgttagattggcaattgagttctgctctgataaaaattatatccgtagagatatcggagcatttatactcgggcaaataaaaatttgcaaaaaatgcgaagataatgtttttaatattttgaacaatatggcattgaatgataagagcgcttgcgttcgagctacggcaatcgagtcaacggctcagcgatgcaagaaaaacccaatttattcacctaaaatagtagaacaatctcaaattactgcttttgataaatcgactaatgtcagacgtgctacagcatttgctatttctgttatcaatgataaagcaacaattccactattgattaatctgttaaaagatccaaatggagatgtcagaaactgggccgcatttgcaataaatatcaataaatatgataatagtgatattagggattgttttgtggagatgcttcaggataaaaatgaggaagtccgtattgaagcaataatcggactttcctacagaaaagataaaagggttttatctgttttatgcgatgagttaaaaaaaaatactgtttatgatgatatcattgaagctgcgggtgaattaggtgataaaacgctacttcctgttttagatactatgttgtacaagtttgatgacaatgaaattataacttccgctattgataagctgaagcgttcatagcgtgagttgcctatgcacagtgggggattcccgccggcacggtgcagatgctcgaccggctggaaagtgaaatcctggctgaccgggtgagtgaggaaagccgccgctggctggcatcgtgcggcctgaccgtggagcagatgaaaaaccagatgggcccggtgtacacgccggcgcgaaaaatccacctgtaccactgcgaccatcgcggcctgccgctggcgctcatcagcacggaaggggcaacagcgtggtgcgcagaatatgatgaatggggcaacctgctgagtgatgagaacccgcatcatctgcagcagctcattcgcctgccgggtcagcagtatgatgaggagtccggcctgtattacaaccgccaccgctattatgacccgctgcaggggcggtatatcactcaggatccgattgggctgaaggggggatggaatttttatcagtatccgttgaatccggtcataaatgtagatccgcaaggtttggttgatataaatttataccccgaaagtgatcttatccattctgtagctgatgagattaatatcccaggcgttttcacaatcggggggcatggtacccccacatctattgaatccgcaacgcgcagtatcatgacagctaaagatctagcatatctaattaaatttgatgggaattataaagatgggatgacagtttggttattttcttgtaatacaggtaaaggacaaaattcatttgctagccaattagctaaagagttacatacaaatgtaataggacctgacacgctatggacgtggtgggggcgaggaactaatggtaagttaaaaatggatacagtgctaacagcaccaacgaaccttaattcaaataaggatctaatggctataacaacaaaagaccttggtaattggataacatatgggccatctgggcaccccatttctaatatgcaaggtacgccagaaaaacccagtgatataagataggttgtagatgtatgaaagcatgcttgttactatttttttatttttctcttattggtcaattgcatggtgctgatgtgaaaataaaagaaaacgaaagtgtgatgggatctacagcaatgacctatgatttaagtgaagaaaagctgatgaaactgaagtataaatcacaacatggtgattcagaggcatcatttcgactatatcaatattactgctttactaaaaataatattgataaacaattgcgattcttggaaagatcagcatctcaggggaatgttacagcgcagtttaattatggggtctttttatcagatacaaatccaacattatcagaatattataatttgaatagagctatttattggatggaattcgctgtaaataacggtaatattgatgcaaagagcaaacttcaagagctcaaaaagctaaagcgaatggatagaaggaagaataaggagaatccgtaaaagcaatagttcatcagactgccgcagcagtagtatgatgatgaatcagggctgtactataactattatcggtaacattaaccgcagcaggggcggtataacactcaggctccgattgggctggaaggtaggtggaatttttatcagtatccgttgaacccgatttctggaatcgatccccttgggattagccacctgtttatacagcataactttaggtatgctttcgtgtgtttcagatataccatgtgatgataatttttatgatgtgcttagtattccagtcgcttctggtaataatatgcaatgtaaaaataatccccgttgtacacatttataaatagatggccaatacctcaaggcctatggagttggaatgttaatgacccgggagcaagcaatagaaaacctgacggcatacgattagtaccgtcagttaatacaggaacttataatcgcaatggattttcaatacatagttgtttaaacgcttttggtccgtctttaggacctcgattctgttccgagggttgtataactggtttatctaatgacatgcaaaaattaaatgagttaatattttcagagccagatagcacattaacagttacggactaaaaaatatggcaaggttattaacaattgtatttttttctctatttctgcgagtgcagttactgcaagacaatttcagagagagttagatttggcagacaaagcaatattatgggcactaatatcagccagtactaaagagggacgaaaagcgtgttcactaagctattttgcctgtaaggccgcagaggctgaactcggactggcatatatggctgcgaatgataacaaggaatttctcacatccttatctaatataatgaggtacaaaatagatgctggactttccgaatcctatacatgctatttattaagtaagggaaagatcataagaccatatctgaaaaatctaaatccactccaacttgccgctgattgcattgaaacagtaaataaaataaaagataagaataaaaaaaatcattgatataaattcagttaatatttgtagtgatgataaaaatataaaattgagagttaatagtactattatggccattgatgattctataaagtgcatcgatgaatgataacttaattttatttaaaaatatattaataactcactctccaggagtttttttaacttagttttataatgaatacgataattaaaagtgaagaagaaaatagttgtatacatatattccatgaccctacattgtgatctatagattaaatattttttaaatgtgactgtcatccttcagataataaagccatcatcgcaatagatggaaaagcactcctgctcttttttgattagagccgtcgcaggaggaacaactcatatcatcattgcgatctcgacgatgtatagtctcatcctgcggcagaacaagacggataaaaaatccaatgagagcacactcatccagaacttattaacataatgaatattaaagaaaaatcatcgcagctaatgaagtaatatgcaaaaataattagtccttacaaggagcaaagttccataatctcccccctccccctcaatgatccaaataaagataatgcatccagttggtcattcttagcagcactttccgcatcaccgaaacatggctgaaatggtcggagtaaaccgccacctgggcgtagatgccgtcgggtaaggcatcgatatcatcgttagggtccagttcaatggttcccagcacaccgtccgtgccgggcacgaccgttaatgattgcaataccccctgcgcctgataagaaccgcctggcacgacaggtaaaatactagtcagtttgccgtgaaacacctgcccaggtagcgcgttaaacaccacttccgcatcatcgccgggtttcagacgtaacagcgagttttgccgaaattgggcgacaatttgccgtttttgctcggggatgaagaccatcaccggacgcagcggcaaggcagctgcgtatgtacctgggcggatcagtacctgagtaacgtagccattgctcggcgcgcgaatgacagtctgctcaaggttatattttgcttcagtaagttgcgctcttaagctcacaatctgcgattgctcgccgttaaccatactgtcgagctggctctggatctgcgcctgctccgccaccgagcctttcaccagcgcatcctgcgcgaggaaattttgccgcgcatcgtcgatgtcacgttccgagaacggattcaccgccgcctggctgcctttcaagtaacgttgataatttttaaacagacggtcgcgctccgctgaaacctgggtggtgttggcctgcgcttcagtgagctgcgcacgcagcgtctttatattatgcgtcgccgtcatcaggtcagcctgaagtctgtcaactcgcgcctggtaacgaaccgggtcgagcttaaaaagcacctcgcccttttgaataagctgattattcttgtcagtgacttcagtaacaattcccgtcacctgtggcgtgatagggatcgctatcactgccttttgcgcggtaaaagtgtaagggtggttgtagttcatcaacaaaatcaaaccactcaccagaaacacgcctcccagcgccgccgtcgccagcgtccactgatttaccggaatgcggaagattttaaagaccgcccacgccagcgccacgtaagttaaaacaatcaatagatccataattagatctccgggaacgtggaatagtcagtctttttctcggcggcgagttgatgctccagccgggaaattcggtcagaaagtgaggcgatttccgggtcagtcgctttctcctgcgacgcaacatgtgactgcataccccagccacgctccggttgatagagcgtcgcccagatccacagaaacggccagataacatgcagagtaaacaggctcacccagcccgccgtatgaatagcgtcggcatggggatggttgcgctttttggcaatcagataagggatgtcatgtatcgcgatgattccataaaaaatcaccagaaagacgaagatcagcactcccaacgcgaaatagtttagaaacatatctgcctcggattcacgtttatcagtgttgtttttgggctggcagccagaagggagtcaggctgatattttgacaataatccgggttcgcgattctcgccataacaccaaagaataatttttagaggtgatgagttgcttagttacataacgattgtatgacgaaggcataacatgctgtagatcacatcaggtgaacgccgtaagaaaatatcttgtgattcagatcacaaagattcaacaaaccatcaaaacaaaaatgtgacactactcacatttaaatgccatttttagcgaaaatcgccgccttgttgcttttttacacaagcgttttgtgatgaacgtcacgtcaattacctctctaccccctatatttatgtgattgatatcacacaaaaggccgtcgactggacagttaaccgattcagtgccagatttcgcagtatctacaaggtccggctacctctgccgccacattaacaaaaaacctcgggcttccagcctgcgcgacagcaaacataagaaggggtgtttttatgtcatccgatattaagatcaaagtgcaaagctttggtcgtttcctcagcaacatggtgatgccaaatatcggcgcgtttatcgcgtggggtatcatcaccgcgttatttattccaacagggtggttaccgaacgagacgctggcgaagctggtcgggccgatgatcacttatctcctgccgctgctgatcggttataccggtggtaagctggtaggcggcgaacgtggcggcgtagtcggtgccatcaccaccatgggcgttatcgtcggcgcagacatgccgatgttcctcggttctatgattgcaggtccgctgggcggctggtgcattaagcacttcgaccgctgggtagacggtaagatcaaatccggttttgagatgctggtgaataacttctccgcaggcatcatcgggatgatcctcgctattctggcattcctcggcattggcccgattgttgaagccctgtccaaaatgctggctgcgggcgttaacttcatggttgtccatgacatgctgccgctggcgtctatctttgttgaaccggcgaaaatcctgttcctcaacaacgccattaaccacggtatcttctcgccgctgggtattcagcagtcccatgaactgggtaaatcaatcttcttcctgattgaagctaacccaggtccaggtatgggcgtgctgctggcgtacatgttctttggtcgtggtagcgctaaacagtctgcgggcggtgcggcaatcatccacttcctggggggtatccacgaaatctacttcccgtatgtgctgatgaatccgcgtctgatcctcgcagtcatcctcggcggtatgactggcgtgttcacgctgactatcctgggcggtggtctggtttctccggcatctccgggttctatccttgctgtactggcgatgacaccaaaaggtgcttacttcgctaacatcgcgggtgtgtgtgcggcgatggctgtctccttcgttgtctctgctattttgctgaaaaccagcaaagtgaaagaagaagatgatattgaagcagcaactcgtcgtatgcaggacatgaaagctgagtctaaaggcgcatctccgctgtctgctggcgatgtgactaacgacctgagccacgtacgtaaaatcatcgttgcctgtgacgccggtatgggttccagtgcgatgggcgcaggcgttctgcgtaagaaaattcaggatgcaggtctgtcgcagatttctgttactaacagcgcgatcaacaacctgccgccagatgtggacctcgtcatcactcaccgtgacctgaccgaacgcgctatgcgccaggttccgcaggcacagcatatttcgctgaccaacttcctcgacagcggcctgtacaccagcctgaccgaacgtctggttgctgcccaacgccacacggcaaacgaagagaaagtaaaagacagcctgaaagacagctttgacgattccagtgctaacctgttcaagctaggcgcggagaacatcttcctcggtcgcaaagcggcaaccaaagaagaagcgattcgttttgctggcgagcagctggtgaaaggcggttacgttgagccggaatacgttcaggcgatgctggatcgtgaaaaactgaccccgacttatctgggtgagtctatcgcggtgccacacggtacggttgaagcgaaagatcgcgtactgaaaacgggcgtcgtgttctgccagtacccggaaggcgtgcgcttcggtgaagaagaagatgacattgcccgtctggtgattggtattgctgcccgtaacaacgagcacattcaggttatcaccagcctgaccaatgcactggatgatgagtccgtcatcgagcgtctggcacacaccaccagcgtggatgaagtgctggaactgctggcaggtcgtaagtaatccaatcccaccctctccacatggagaaggtggggttaattgcctgatgcgctacgcttatcaggcctacaggatgcatcacaatttgttgaatttgcacgttcttgtaggccggataaggcgcttacgccgcatccggcgctgcccctctcctcacggagagggtttgggtgagggaaaagcctcaccccagccctctcgggtaaaaacattgatgaaggttaatactatgaaagcattacattttggcgcaggtaatatcggtcgtggctttatcggtaaactgctggcagacgcgggtatccaactgacgtttgccgatgtcaatcaggtggtacttgatgccctgaatgcccgtcatagctatcaggtacatgtggttggtgaaaccgagcaggtagataccgtttccggcgtcaatgctgtcagcagcattggtgatgatgtcgttgatctgattgctcaggttgatttagtcactaccgccgttggcccggttgtgctggaacgtattgctccggcaatcgccaaagggctggtgaaacgtaaagaacaaggtaatgaatccccgctgaacatcatcgcctgtgaaaacatggtacgcggtaccacgcagctgaaaggccatgtgatgaacgccctgccggaagacgccaaagcgtgggtagaagaacacgttggctttgtcgattccgccgttgaccgcatcgtaccgccttcggcttcggcaactaacgatccgctggaagtgacggtagaaaccttcagcgaatggattgtcgataaaacgcagttcaaaggcgcactgccgaacatcccaggcatggagttaaccgacaacctgatggcatttgtcgaacgtaaactcttcaccctgaacacgggtcatgctataaccgcgtacctcggaaaactggccggtcatcagaccattcgtgacgcgattctcgacgagaaaatccgcgcggtggtaaaaggtgcgatggaagaaagtggtgcagtattgatcaagcgctacggctttgacgctgacaagcatgcggcgtacatccagaaaattctcggccgttttgagaacccgtatctgaaagatgatgtagagcgcgtaggccgtcagccactgcgtaaactgagtgctggcgaccgtctgatcaagccactgctcggtacgctggaatatggtctgccacataaaaacctgattgaaggtattgccgctgcaatgcacttccgcagtgaagatgatccgcaggctcaggaactggcagcactgatcgctgacaaaggtccgcaggcggcgctggcacagatttccggtcttgatgccaacagcgaggttgtatccgaggcggtaaccgcttataaagcaatgcaataatggtggaccaggcgcaggaccccctgcgtccgaataacagattgtcagatatgcaggcaacaatggaacaaacccaggcctttgaaaaccgtgtgcttgagcgtctgaatgctggcaaaaccgtgcgaagctttctgatcaccgccgtcgagctcctgaccgaggcggtaaatcttctggtgcttcaggtattccgcaaagacgattacgcggtgaagtatgctgtagaaccgttactcgacggcgatggtccgctgggcgatctttctgtgcgtttaaaactcatttacgggttgggcgtcattaaccgccaggaatacgaagatgcggaactgctgatggcattgcgtgaagagctaaatcacgacggcaacgagtacgcctttaccgacgacgaaatccttggaccctttggtgaactgcactgcgtggcggcgttaccaccgccgccacagtttgaaccagcagactccagtttgtatgcaatgcaaattcagcgctatcaacaggctgtgcgatcaacaatggtcctttcactgactgagctgatttccaaaatcagcttaaaaaaagcctttcaaaagtaagcaacgtctgcttactgcccctctacctgcttcggccgataaagccgacgataatactccagacgttgtagatataacggcacgctttcatcgggtattccggacggaatcgcgttacggggaggaagttttttcagatactcccggaacgcctggcttgatgccatgaaatctacggctttatcgataagaagcggaacgttttcacctaatttgcccatgatgatatctccgtattaccccgcgccgggaatgcgcggccgccaattttagtttaggttcccggtaaagatgacattaaggaaaacgtgctgaatcctcaataatcatccgctgctgtttattatcttttttctatagatttcttaattaatcaacgaattgcgtagtttttgagcatgttaatgattacgttacagaactattacaatgtcattagttgtgaacaaagcacctggtcgcgcatactaggggctataaatttatctttatcagaagccatcacatgaaagaagtcgaaaaaaacgaaatcaaacgtctcagcgatcgcctggacgccatccgccaccagcaggccgatctttcgctggttgaagccgcagacaaatatgccgagctggaaaaagagaaagccacgctggaagcagaaattgctcgcctgcgtgaggttcatagccaaaaactgagtaaagaagcacaaaaactgatgaagatgccgtttcagcgcgcaattaccaaaaaagagcaggctgatatgggcaagctgaagaaaagtgttcgcggactggtcgttgtgcacccaatgaccgcactgggccgcgaaatgggcctgcaggagatgaccgggttttcaaagaccgcgttttaagaacacagtatctacagggtgattctgcacattcctataggccgagtaaggtgttcacgccgcatccggcaagataaggcgctctggatcaacaatctaagggcaattctctgatgaggattgcccttttctttaccagacatctcccttcaccaaaaaattggccctaccaattcttcgcttatctgacctctggttcacaattccccaattaaaactcacatcaaggttgccaatacataacatttagttaactattcattgtcattatccctacacaacacaattggcagtgccacttttacacaacgtgtgacaaggagatgagcaacagactcattacacgatgtgcgtggactccaggagacctgcaatgaatctctggcaacaaaactacgatcccgccgggaatatctggctttccagtctgatagcatcgcttcccatcctgtttttcttctttgcgctgattaagctcaaactgaaaggatacgtcgccgcctcatggacggtggcaatcgcccttgccgtggctttgctgttctataaaatgccggtcgctaacgcgctggcctcggtggtttatggcttcttctatggtttgtggcccatcgcgtggatcattattgcagcagtgttcgtctataagatctcggtgaaaaccgggcagtttgacatcattcgctcgtctattctttcgataaccccagaccagcgcctgcaaatgctgatcgtcggtttctgtttcggcgcgttcctcgaaggagctgcaggctttggcgcaccggtagcaattaccgccgcattgctggtcggtctgggctttaaaccgctgtacgccgccgggctgtgcctgattgttaacaccgcgccagtggcatttggtgcgatgggcattccaatcctggttgccggacaggtaacaggcatcgacagctttgagattggccagatggtggggcgtcagctaccgtttatgaccatcatcgtgctgttctggatcatggcgattatggacggctggcgcggtatcaaagaaacctggcctgcggtcgtggttgcgggcggctcgtttgccatcgctcagtaccttagctctaacttcattgggccggagctgccggacattatctcttcgctggtatcactgctctgcctgacgctgttcctcaaacgctggcagccagtgcgcgtattccgttttggtgatttgggggcgtcacaggttgatatgacgctggcccacaccggttacactgcgggtcaggtgttacgtgcctggacaccattcctgttcctgacagctaccgtaacactgtggagtatcccgccgtttaaagccctgttcgcatcgggtggcgcgctgtatgagtgggtgatcaacattccggtgccgtacctcgataaactggttgcccgtatgccgccagtggtcagcgaggctacagcctatgccgccgtgtttaagtttgactggttctctgccaccggcaccgccattctgtttgctgcactgctctcgattgtctggctgaagatgaaaccgtctgacgctatcagcaccttcggcagcacgctgaaagaactagctctgcccatctactccatcggtatggtgctggcattcgcctttatttcgaactattccggactgtcatcaaccctggcgctggcactggcgcacaccggtcatgcattcaccttcttctcgccgttcctcggctggctgggggtattcctgaccgggtcggatacctcatctaacgccctgttcgccgcgctgcaagccaccgcagcacaacaaattggcgtctctgatctgttgctggttgccgccaataccaccggtggcgtcaccggtaagatgatctccccgcaatctatcgctatcgcctgtgcggcggtaggcctggtgggcaaagagtctgatttgttccgctttactgtcaaacacagcctgatcttcacctgtatggtgggcgtgatcaccacgcttcaggcttatgtcttaacgtggatgattccttaatgattgttttacccagacgcctgtcagacgaggttgccgatcgtgtgcgggcgctgattgatgaaaaaaacctggaggcgggcatgaagttgcccgctgaacgtcaactggcgatgcaactcggcgtatcgcgtaattcactgcgcgaggcactggcaaaactggtgagcgaaggcgtgctgctcagtcgacgcggcggcgggacgtttattcgctggcgtcatgacacatggtcggagcaaaacatcgtccagccgctaaaaacgctgatggccgatgatccggattacagtttcgatattctggaagcccgctacgccattgaagccagcaccgcatggcatgcggcaatgcgcgccacacctggcgacaaagaaaagattcagctttgctttgaagcaacgctaagtgaagacccggatatcgcctcacaagcggacgttcgttttcatctggcgattgccgaagcctcacataacatcgtgctgctgcaaaccatgcgcggtttcttcgatgtcctgcaatcctcagtgaagcatagccgtcagcggatgtatctggtgccaccggttttttcacaactgaccgaacaacatcaggctgtcattgacgccatttttgccggtgatgctgacggggcgcgtaaagcaatgatggcgcaccttagttttgttcacaccaccatgaaacgattcgatgaagatcaggctcgccacgcacggattacccgcctgcccggtgagcataatgagcattcgagggagaaaaacgcatgattatttccgcagccagcgattatcgcgccgcagcgcaacgcattctgccgccgttcctgttccactatatggatggtggtgcatattctgaatacacgctgcgccgcaacgtggaagatttgtcagaagtggcgctgcgccagcgtattctgaaaaacatgtccgacttaagcctggaaacgacgctgtttaatgagaaattgtcgatgccggtggcactggctccggtgggtttgtgtggcatgtatgcgcgtcgtggcgaagttcaggcagccaaagcggcggacgcgcatggtattccgtttactctctcgacggtttccgtttgcccgattgaagaagtcgcgccagccatcaagcgcccaatgtggttccagctttatgtactgcgcgatcgcggctttatgcgtaacgcgctggagcgagcaaaagcagcgggttgttcgacgctggttttcaccgtggatatgccgacaccgggcgcacgctaccgtgatgcgcattcaggtatgagcggcccgaacgcggcaatgcgccgctacttgcaagcggtgacacatccgcaatgggcgtgggatgtgggcctgaacggtcgtccacatgatttaggtaatatctcagcttatctcggcaaaccgaccggactggaagattacatcggctggctggggaataacttcgatccgtccatctcatggaaagaccttgaatggatccgcgatttctgggatggcccgatggtgatcaaagggatcctcgatccggaagatgcgcgcgatgcagtacgttttggtgctgatggaattgtggtttctaaccacggtggccgccagctggacggtgtactctcttccgcccgtgcactgcctgctattgcagatgcggtgaaaggtgatatagccattctggcggatagcggaattcgtaacgggcttgatgtcgtgcgtatgattgcgctcggtgccgacaccgtactgctgggtcgtgctttcttgtatgcgctggcaacagcgggccaggcgggtgtagctaacctgctaaatctgatcgaaaaagagatgaaagtggcgatgacgctgactggcgcgaaatcgatcagcgaaattacgcaagattcgctggtgcaggggctgggtaaagagttgcctgcggcactggctcccatggcgaaagggaatgcggcatagtcgtttgcgccccctcaccctaaccctctccctcagggagaggggaccgttcggcgctgtatgtactccctcactctgaaacgacaccgcactctttttttctccctcgcccctccggggagagggccggggtgaggggaaaaggccgcactgctcaccaattttctgctatcctgcccccgcactaagggggcagtatgctaaacatcgtactttacgaaccagaaattccgccaaatactggcaacatcatccgtctttgcgctaataccggctttcgtctgcatatcatcgaaccgatgggatttgcctgggacgataagcgcctgcgccgcgcggggctggactatcacgagtttaccgccgttacgcgtcatcatgactatcgcgcgttcctcgaagcagaaaatccccagcgcctgttcgccctcaccacgaaaggtacacctgctcacagcgccgtaagctatcaggatggcgattatctgatgttcggcccggaaacacgcggcctgccagcgagcattcttgatgccctgcccgctgaacaaaaaattcgcattccgatggtgccggacagccgcagcatgaatctgtccaatgcggtgtcggtagtggtgtatgaagcctggcggcagttggggtatccgggagcggtattgagagattagttactgtaggccggatagatgattacatcgcatccggcacgatcacaggacattagatcccatccccatactcaaatgtatggttaataccgttgaaatgctggtccatatccattgatggcttatcgctgtctggtttaccgacaatacgagccggaacgccagcggcggtggtatgcggcggcaccggttgcagcaccacggaacctgcgccaatcttcgcgccgcgcccaacttcaatattgccgaggattttcgcgcccgcgccaatcatcacaccttcacgaattttcgggtgacggtcaccaccagatttacccgtaccgccaagcgtcacagattgcagaatcgatacgtcgttttcaatcaccgccgtttcaccaacgacgatgcctgtcgcgtggtcaagcatgataccgcgaccaatttttgctgccgggtgaatatcgacctggaacgtcacagaaacctggttttgcagaaagattgccagtgcgcgacgcccctgattccacaaccagtgaccgatgcgataggcctgcaaggcatgaaaacccttcaggtataacaacggggttgagtatttatcgactgccgggtcgcgggtacgcaccgcctgaatatcacaggccgcagaggcgatcatttccgggtcagcggcgtaggcttcttccaccacttcacggatagcaatagcaggcataattggcgatgacagcttgttcgccagcatgtagctcagtgcactgccaaggttttcgtgcttgagtagcgtcgcgtggtaaaaactggccagcattggctcacagtccgccagcgttctggcttcggctttaatattgttccagacaatttccagttcttcacacgacattgcttactccacacgatgagataatgaccggcccgttctgcgcgggccgggtcatagcggtaacaaaggttccctggggttagtggctgctgcgctcgtccttgcgtgcacgacctagtaaagtcaatgctgcctcgcgcgcgttttttccgcaatataatacttgataaatttcctcggttattggcatttcaacgccgaagcgatgcgccagttcgcggacttctttcgtattgcggtagccttccaccacctgaccaatcttctcctgcgcgctttgtacatccatgccctgaccgagcatcatgccaaaacggcggttacgcgactggttgtcggtacaggtaagcaccagatcgccaagccccgccatgcccataaaggtggcagggtcggcacccagcgccgcaccaagacgcgacatttcagccagcccacgggtgatcagcgccgtacgcgcattcgcaccaaaaccgataccgtcggacatccccgcaccaatggcaataacgtttttcaccgcgccgccaagctgcacgccaatgaaatccggattgctgtaaacgcggaaacttttgccgcagtgcagcagctgctggagatcatcggcaaaggtctgatcggtcgaggccagcgaaatagctgtcggtaaacctgccgccagttctttcgcaaacgttgggccagagataaccgccagcggaatttgatcgcctaaggcctcacgcgccacgtcctgtaacagacgtccggtttccgcttccagccctttggtcgcccacaccagacgcgcatcaggacgcatcagtggtttaatctggcgcagcacttcaccaaagacatggctgggtacgacgacgagaatattacggctggctgccagcgcagtggcgagatcgctttcaagatggagcgtatcgggaaaaggcacatcggggagaaacgcggcgttacagcggtcgcgttcaagcgttgcgatatgttcagggtcatggccccagaggacaacctcgtggccatttcttgccaaggtgatggcaagagcggtgccgtacgagccggcaccgatcacagtcattgaagcattacgttggttcatcaggcatcctgatgttcttcagtaccttcgccagcctgctgctgcaaatagttcatgaacagcgcatcgaagttaaccggcgcaaggttcagttgcgggaatgtaccgcgggataccatgctggtgatgcactcacgagcatacgggaacagaatgttcgggcagtatgctcccaggcaatgcgccatctgggtgccttcgatacccgcgatggagaaaataccgccctgctgaacttcacacaggaacgcggtttcttcgcccaaagaggccgttacggtaacacgcagtaccacttcgtatacgtcatctgccagttgggaagatgccgtatccagatcaagtttaacttctggttgccaatctttctggaaaacgtgcggcgcgttcggcgcttcgaaagagatatccttggtataaatacgttggatctggaaagtcatttcagtgttgttttgttctgacatgtgtagaaaacccttaagtgttgtccttaaatactgcgcaatgtaatgccaacgttcacacgttatttcagcaggggatccagtccaccacgtgcatccaatgcatacaagtcatcacagccgccaatgtgctgtgcgtcaataaaaatctggggaaccgtggtgcgaccgctgcgtttgatcatctcttcacgcttggcggcgttgccatcgatcggcagctcctggaaactcacgcccttgctgctcagcagtgcttttgcacgatggcaatacgggcaggtttctttggtatagatttcaacattggccataaattagctcctgtttttttaccctgaaatttcatgttgcagggcggcagcaaaatggagtgtccccagaagcttataacaataagtcgctgggggcctaattgcagctaacggcctgcatcatgaaagacgacaggtaaattatttgccgcgcaccaaaggcaagttttcgccagcccagccagcgacgccttctttcagcacgaatacttgcgcaaaaccagctttcgtcagtgcgtttgcaggctcctggcactgcatgccagaaccgtctaccacgataaccggtttgtctttgtgcttctcaagctcaccaacattgttggctttgatttcgctcggcaacagattaatagaacctgcgatatggcctttacggaagtcatcacgctgacgtaaatccacaaccacagcgtcttctttgttgatcagacgcgtagcttcaccacgagtaatcaccttcactttcgaggtcaggctcttaaacgtagtcacaagaaccgccaccagtaacgcgatccaggcgatactcagtatgggatgacggccaacaaattgcataatttcttgcatggggggtaacaactcccgacgtagtgattaaaaaaaccaggaaaggagtatacctgcgcggtgcggcaaatacagccagcgcgttaactggaatgcaattttgcggggcgcgacgaaaaaaaagcgtaaatctggcatcggcttgccgcgagcggtcgtatattttgatcttcagaggctattttatcgattcagctgtagtaaaattacgcaaattttgactcttgagtatgaggttgtcgcaatgttggtttctaaaaaacctatggtactggtgattctggatggctatggctatcgcgaagaacagcaggataacgccatttttagtgctaaaaccccggtaatggatgcactgtgggccaatcgtccgcataccctaatcgacgcttccggtctggaagtcggtctgcctgaccgtcagatgggtaactccgaagtaggccacgttaacctgggtgccggccgcatcgtgtatcaggacctgactcgtctggacgttgaaatcaaagatcgcgctttctttgctaatccggtgctgactggcgcggtagataaagcgaaaaacgcaggcaaagcggtacacattatgggtctgctctccgcaggcggcgtacacagccacgaagatcacatcatggcgatggtagaactggcagctgaacgcggcgcagaaaaaatctacctgcacgcattccttgacggtcgcgacaccccgccgcgcagtgctgaatcctcgctgaaaaaatttgaagagaaatttgctgcgctgggtaaaggccgcgtagcgtccatcattggtcgttactacgcgatggaccgcgataaccgttgggatcgcgttgaaaaagcctatgacctgctgactctggcgcagggtgagttccaggccgatactgccgttgctggtttgcaggcagcttatgctcgcgacgaaaacgacgagttcgtgaaagcgaccgttattcgtgcagaaggtcagccagatgcggcaatggaagacggcgatgcgctgattttcatgaacttccgtgctgaccgcgcgcgcgaaatcactcgtgcattcgtaaacgcagatttcgacggcttcgcgcgtaagaaagtggttaacgtcgatttcgtgatgctgaccgaatacgccgctgacatcaaaactgcggttgcttacccacccgcttccctggttaacaccttcggcgagtggatggcgaaaaacgacaaaactcagttgcgtatttccgaaaccgaaaaatatgcccacgttactttcttcttcaacggtggcgtagaagagtcgttcaaaggcgaagatcgcattctgatcaactcaccgaaagtggctacctacgatctgcaaccggaaatgagctccgcagagctgaccgaaaaactggttgcggcaatcaagagcggcaaatacgacaccattatctgtaactatccgaacggcgacatggtaggtcacaccggggtgatggaagcggcggttaaagcagttgaagcgctggatcactgcgtggaagaagtcgcgaaagcggttgagtccgtgggtggacaactgctgatcaccgctgaccacggtaacgctgagcagatgcgcgatccggcaacgggtcaggcacacacggcacacaccaacctgccagttccgctgatttacgttggtgataagaacgtgaaagcggttgaaggcggcaaactttctgacatcgcgccgaccatgttgtcgctgatgggtatggaaatcccgcaagagatgactggtaagccgctgttcatcgtggaataatccctccccatgaggggaaaggcgattaataccatgacacgggccgtgaaaccgcgcaggtttgcaatcaggcccatcatctacgccagcgttcttagcgctggcgtattgttgtgcgccttttccgcccacgcggatgagcgtgaccaactcaaatctattcaggctgacatcgccgcaaaagagcgcgcggtacgccaaaagcaacaacaacgcgcaagcctgctcgcacaattgaaaaagcaggaagaagcgatctctgaagccacccgtaagctgcgcgaaacgcaaaacacgctcaatcaactcaataaacagattgatgagatgaacgcgtcgattgccaaactggagcagcaaaaagccgcccaggagcgcagcctcgccgcacaactggatgccgcattccgtcagggcgagcataccggtattcagctgattctcagcggtgaagaaagccagcgtggacagcgtttacaggcttatttcggctatctcaaccaggcgcgacaagaaaccattgcccagttgaagcaaacgcgtgaagaagtcgccatgcagcgtgctgaactggaagagaaacagagcgagcaacaaacgctgttatatgagcagcgcgcccaacaggcgaaactgactcaggcgctgaacgagcgtaaaaagacgctggcagggctggagtcttccatccagcaaggtcagcaacagttgagcgagctgcgcgccaacgaatcccgtctgcgtaacagcattgcccgtgcggaagccgcggcgaaagcgcgtgcagaacgagaagcacgtgaggcccaggcggttcgcgaccgccagaaagaagcgacgcgcaaaggcaccacctacaaaccgaccgaaagcgaaaaatcgctgatgtcccgtaccggtggtctgggcgcgccgcgtggtcaggcattctggccggttcgcgggccgacgctgcatcgctatggcgaacagctacagggtgaattacgctggaaaggtatggttatcggtgcttctgaaggtactgaagttaaagcgattgccgacggtcgggtgattctggctgactggctgcaaggctacggtctggtggtggtggttgagcatggtaaaggcgacatgagtctttacggctataatcagagcgcactggtgagcgttggttcgcaggttcgcgcgggccagccgattgcactggtgggcagcagtggcggtcagggtcggccttcactctatttcgaaattcgccgccagggtcaggcggtcaatccacagccgtggttgggaagataagttttgtttccatttcgtcgtaacgttcttgcatttgccgctctgttggcgctctcctcccccgtacttgctggcaaacttgccatcgtcattgatgattttgggtatcgcccgcacaacgaaaaccaggtgctggcgatgccttccgctatctccgtcgctgtattacccgattcaccgcacgccagagagatggcgaccaaagcgcataacagcgggcacgaagtgttgattcatctcccgatggcaccgttgagtaaacagccgctggagaaaaatacgctacgcccggagatgagcagcgacgaaattgagcgcattattcgtagtgcggtcaataacgtgccctatgccgtggggatcaacaaccacatgggcagcaagatgacctctaacctgtttggtatgcagaaagtgatgcaggcgctggagcgttacaatctttacttcctcgacagcgtaaccatcggtaatacccaggcgatgcgcgccgcgcaaggcactggcgtgaaggtgatcaaacggaaggtattcctcgacgattcgcaaaatgaagcggacatccgtgtgcaatttaatcgcgcaattgacctggcgcgtcgcaacggttcgaccattgccattgggcatcctcaccctgcaacggtacgcgtgttgcaacagatggtttataacctgccgccagacattacgctggtgaaagccagcagcttgctgaatgaaccgcaggttgatacttctacaccgccgaaaaacgctgtgcctgatgcaccgcgtaatccgttccgtggcgtgaagctgtgcaaaccgaagaaaccgatagaacctgtttatgctaatcgcttctttgaagtattaagcgaaagcatcagccagagcacgctgatcgtttacttccagcatcagtggcaaggctggggcaagcagcccgaagcggcaaaacttaacgctagtgcaaattaaaggcgctacgcgtaatgcgatggtgcgaccgcgttttgtcgcgccattgccataagcggaaagaccacagtaacgcctggtaacccaccttcacgctgcgcacattggtaatcaggcgcttatacataccggaagtaaatatctcggcaatcatccgttggcgggtaagaatatccggctctttgcgcaccgcatggcaaacacgcaatgcttcgtaagttatttgctgatgaaattccggataaatcgtaattttgtcggcataatttcgatttaatttctccagcaggcgggtaatcttaatatagtgacgttgataattaaggtttttattcccttgtctatgcaaccgactcactgacgtattatgcagataatatttatataacgattgctcggtatatcgcgcacgcaaagcgttaaacatgaattctgttgtccagacaatatcctgatgatgtaatccggcaataaatttaatgttatttttaacaataacatcgcggcgataaacccccatccagacaacgtgagtccaacggcgcgaagaaagccccatccgcagccagtccgggccggttaatacgccggttgagcgaaggcgatcgctggggatggattgccaggtttctcccgtttcacgaaaacaccagtcagcgttgcactgcgctacatcgaggtcgtcctctaacgccatggtcatcagcgtttcgtacatggtgggatagacttcatcgtcagcatcgacaaaagcgacatatttgcccgttgccacctcgatcccacgattacgcgccaccgatgcgccagcattcgcctgatgcaacaaacgaacgtgcggatagttttctgcgtaatgctttgctatttcaacagaattatccgttgaaccatcgttaataataatgatttccagagcagtccaggtttgcgtaattaaagattccatacaagtgcggaaatcatcgcccgcattatataacggaataataacactaagtttattggtgctgttcatcataaattaccgacgacctctgaagttatcctgacgttttacaggctttgtattaagaaactattaagcctgtgagatattatttttacaggtgagagagtcacttcagggtagagagataatgagagcagctatataagagatcagcgcaattacgatatctttattacactgacaggattttacatatttaacggattatcctcaggcaaaagggctggaataccagccctttttcgtgttaatcccagctcagaataactttcccggactggcccgaacgcatggcgtcaaagcccttctggaaatcatcgatagagaaacgatgggtaatgatcggcgagagatcgaggccagactgaatcagcgccgccatcttgtaccaggtttcaaacatctcacgaccgtaaatgcctttaatgaacaagcctttaaagatcactttggtccagtcgatagacatgtcagacggtggaatacccagcatcgcaatacgaccgccgtggttcatggtatcgagcatggtacgaaacgctggcggcgcgccggacatttccagaccgacatcaaagccttcggtcatgcccagttcagccatcacatcattaaggttttctttcgcgacgttaaccgcacgggtgatacccattttgcgcgccagctcaaggcggtattcgttaacatcggtgatcaccacattgcgtgcaccaacgtgtttcgccaccgccgcagccataatacctatcggacctgcaccagaaaccagcacatcttcgcccaccagatcaaacgacagcgcggtatgcacggcgttaccgaagggatcaaaaattgcggctaagtcatcggaaatattgtcggggattttgaaggcgttgaatgccgggatcaccagatattcggcaaagcagcccgggcgattaacaccaacgcctatcgtgttgcggcacaaatgggtacgaccaccacgacagttgcggcaatgaccacaggtgatatggccttcgccagaaacgcgatcgccgatcttgaagcctttcacttcctgaccaatacctaccacttcaccgacatattcatggcccacgaccatcggcaccgggatggttttttgcgaccactcatcccagttatagatgtgaacgtcagtcccgcagatggctgttttacggattttaatcagcagatcgttatgcccgagttccggtacaggaacgtcggtcatccagatgccctcttccgctttcagtttggataacgctttcatctcacatcctcaggcgataacgcccagttgtttaccaatacgcgtaaatgcttctactgcacgcgtaatttgctcaggggtatgcgccgcagacatctgggtacgaatacgcgcctgacctttcggaacgaccggatagaagaaaccggtaacgtaaatgccctctttttgcagctcacgggcaaatttctgcgccactaccgcatcaccaagcatgaccggaataatggcgtgatcggctcccgccagggtaaagcccgccgccgacatttgctcacggaactgacgcgcgttcgcccacagacggtcacgcagttcgctgcccgcttcgaccatctccagtactttgatggatgcggcaacaatggccggtgccagcgagttggagaacagatacggacgagaacgctggcgcagccactcaaccacttctttgcgcgccgcagtataaccaccagaagccccgcccagcgctttaccaagcgtaccggtgataatatcgacccggcccatcacatcgcagtattcatgggaaccacgaccattttcaccgacaaaaccgaccgcgtgggagtcgtctaccataaccagggcatcatatttatctgccagatcgcaaacgcccttcaggttggcaatcacgccgtccattgagaacacaccatcggtggcaatcagcacatgacgcgcaccggcttcacgcgcttctttcagacgagcttcaagctcctgcatatcgttgttggcatagcgatagcgtttagctttacacagacgcacaccatcaataatagacgcgtggttcagtgcgtcggagataatggcgtcttccgcgcccagcagcgtttcaaacaggccaccgttagcatcaaagcaggaagagtagagaatcgcatcttccatccccaggaaggccgccagtttttgttcaagctctttatggctgtcctgagtgccgcaaataaaacgcaccgaagccatgccgaaaccgtgagaatccattcccgcctttgccgccgcaatcagatcaggatgattcgccagcccgagatagttgttggcacaaaagttaatgacgtggcttccatcagccacagtgatatctgcttgctgcgcagacgtaataatgcgctcttctttaaacaacccttccgcccgtgcggtttccagatcgttggttaactgctgataaaattctccacgcattgcgattctccagacagggcaaattccagcacatattacccaaacttataggtcgcgacgagatgacgcgttaacacttctgcaaaattcaggataaataacgtccatcaatctcacttttggcgaatggctgaagccaacgccgtgtagtgatatgatagaagcattcgtgtctgagattgtctctgactccataattcgaaggttacagttatgatcatcgttaccggcggcgcgggctttatcggcagcaacatcgttaaggccctgaatgataaaggcatcaccgatattctggtggtggacaacctgaaagacggcaccaagtttgtgaacctggtggatctggatatcgcggactatatggataaggaagacttcctgatccagattatagctggcgaagagttcggcgatgtcgaagcaattttccacgaaggcgcatgctcttccaccaccgagtgggacggcaagtatatgatggataacaactatcaatactccaaggagctgctgcactactgcctggagcgcgaaatcccgttcctgtacgcttcttccgcagccacctacggcggacgcacctccgactttattgaatcccgcgagtacgaaaaaccgttgaacgtctacggttactcaaaattcctgtttgatgaatatgttcgccaaatcctgcctgaagcgaactcgcagattgttggcttccgctatttcaacgtttatggaccgcgtgaaggccataaaggcagcatggcgagcgtcgctttccatctcaacactcagcttaacaaaggtgaatcaccgaagctgtttgaaggtagcgagaacttcaaacgtgacttcgtctatgtgggcgacgtggcagatgtaaacctgtggttcctggaaaatggcgtttccggtatcttcaacctcggtactggtcgtgcggaatccttccaggccgtagcagatgctactctggcttatcacaagaaaggccagatcgaatacattccgttcccggataagctgaaaggccgctaccaggcgttcactcaggcagatctgacaaatctgcgcgcggcgggttacgacaaaccgttcaaaaccgttgctgaaggtgtaatggaatacatggcctggctgaatcgcgacgcataagagctctgcatgaaaatactggtgatcggcccgtcttgggttggcgacatgatgatgtcgcaaagtctctatcgcacgctccaggcgcgctatccccaggcgataatcgatgtgatggcaccggcatggtgccgtccattattatcgcggatgccggaagttaacgaagctatccctatgcctctcggtcacggagcgctggaaatcggcgaacgccgcaaactgggtcatagcctgcgtgaaaagcgctacgaccgcgcctacgtcttacctaactccttcaaatccgcattagtgcctttcttcgcgggtattcctcatcgcaccggctggcgcggcgagatgcgctacggtttactcaacgatgtacgcgtgctcgataaagaagcctggccgctaatggtggaacgctatatagcgctggcctatgacaaaggcattatgcgcacagcacaagatctgccgcagccattgttatggccgcagttgcaggtgagcgaaggtgaaaaatcatatacctgtaatcaattttcgctttcatcagaacgtccgatgattggcttttgcccgggtgcggagtttggtccggcaaaacgctggccacactaccactatgcggaactggcaaagcagctgattgatgaaggttatcaggtggttctgtttggctctgcgaaagatcatgaagcgggcaatgagattcttgccgctttgaataccgagcagcaggcatggtgtcggaacctggcgggggaaacacagcttgatcaagcggttatcctgattgcagcctgtaaagccattgtcactaacgattctggcctgatgcacgttgcggcggcgctcaatcgtccgctggttgccctgtatggtccaagtagcccggacttcacaccgccgctatcccataaagcgcgcgtgatccgtctgattaccggctatcacaaagtgcgtaaaggtgacgctgcggagggttatcaccagagcttgatcgacattactccccagcgcgtactggaagaactcaacgcgctattgttacaagaggaagcctgacggatgcgggttttgatcgttaaaacatcgtcgatgggcgatgttctccatacgttgcccgcactcactgatgcccagcaggcaatcccagggattaagtttgactgggtggtggaagaagggttcgcacagattccttcctggcacgctgccgttgagcgagttattcctgtggcaatacgtcgctggcgtaaagcctggttctcggcccccataaaagctgaacgcaaagcgtttcgtgaagcgctacaagcagagaactatgacgcagttatcgacgctcaggggctggtaaaaagcgcggcactggtgacacgtctggcgcatggcgtaaagcatggattggactggcaaaccgctcgcgaacctttagccagcctgttttacaattgtaagcatcatattgcaaaacagcagcacgccgtagaacgcacccgcgaactgtttgccaaaagtttgggctatagcaaaccgcaaacccagggcgattatgctatcgcacagcattttctgacgaacctgcctacagatgctggcgaatatgccgtatttcttcatgcgacgacccgtgatgataaacactggccggaagaacactggcgagaattgattggtttactggctgattcaggaatacggattaaacttccgtggggcgcgccgcatgaggaagaacgggcgaaacgactggcggaaggatttgcttatgttgaagtattgccgaagatgagtctggaaggcgttgcccgcgtgctggccggggctaaatttgtagtgtcggtggatacggggttaagccatttaacggcggcactggatagacccaatatcacggtttatggacctaccgaccctggattaattggcgggtatgggaagaatcagatggtttgtagggctccgctaatgaatttaaataatttagaagcagcggctgtttataaaaaaatcacattgatttaataaatagtaagtgggtattatacccacttacttagtcaacgcttttattattgtggttcttttttactcaaaaacgatgtagacaggaagaggcacacaatccacgatgccggtattggtttagcatgtgtaatgacatcactaatgccaaataacataatagaagcagggaaaaccaagagtatatattttttctcccggatacagtaatagatcattgcaacatagaacataataagaacaagaagaccaatttttcctttcgtggaaagagattccacaatttcgttatgcatatgtacatccagaaaaggaagaacactattataaatattattatctaagcttaaagcttttatctttttggctcgctcttcaagggattgccatcctaaagtatcgggactacccttaatacctgcattaaccatagcaaaccgcgcacctactgatgaattgctattattttttgtagtataggaaatcacatctgtttgtaatgcgttgatccgtctttcaattcccttattgaatattaatccgcatactagaaataaaaaaaagaaaccactcaatcctttaaataaaaacactctctgattacgatattgtattaataaaataaccataatcattagtgggaatgtaaaaatcgccgccctagtgccagtcattgttactgcagcaaaacttaaagcaaagttagcataaaatagaaaccatttatatttcgattgcattttgatgaatacaattgaagaatataaagtggtgaatgtaatcacataagccgcaatagtcgctgcccccatttgaccaatattcccattcatggcggagaggggaatgcggtctgcatgcaaatatatcccttgataatatgctctacatagcatgattatttgaactaagatggctgaaataaaatgtagtttttcattttgcctgaatttatttttacttagtaataaaaatgtcaacgagctaaatactaatagttttccagactcaaggtagcctcgataagcatttctatatactacatcttctgttttataaaattcataccatatcaggttcattgcacccaaaagaagtaaaccaagaattaatataatgacatttttattataattatgctttttatttacaattaataagaaaagagaaaatgcacctgtcgcattaattattttagtggtgatattaagatcaattggcacaaacaacaaaccgattaaatacaataaaaaaataaaattacagctattatttcgaaattgctcaatttttacttccacgttaatatctcacaacaaattgaaattaacaatctcatttcaaaagagaaaaaaaagccacctttatccaggagcgtataaacttcattcttttctgaagccttgttctaggttgttttttttccgatgttaatagcctttcactttcaagatgactattaaactcatttaaaataggatgtaatattatttcgtctaaataaaactcttttataatattatgttgatgcattaacttccagctatcagctcgataggtgccataatcctttgtcaatttgagcaaattttgtgccatatctttattcatcaaatatgaacatgtacgccgaattttatttttattgaaattaacacgccgaaaagtacaagtacttaccttaactttactaaaaaggctttgccccaataccggataatcatgtaatcctttctgtcctccaagcaaatacaaattattatgttttaacttgtctttttcagaaagattaaaatattgcagaaattttttaaatttctcattgacgataacatcatcctcgagaatgactgcccattctatatttttatctatcatatcctgatatataagttgatgacttaatgtacaagcaatttctccatcagtcatttctgcgccgacaccacttaatctcattttatcaataatttctttattttgagggtctttagcatctatggcatcaaaaaaatcaaaattaatatttaatcgatgaaaaacatcatttattttatttcttcgctcaatatctcttttaagtgagacaatataaatgggcaagttcattaaaaaatctctggatgattaatcttaataattatttggaaaaatgcttacgcgctattttcttactataatagagcatgaaatagtaaaatgaagatgcaatattaccatttcttttcaaatgtctggatttcacttgatactgcttttcattcgtggctggaataaacgccacatcattccagcaagaagcctgataagcctcattaaaatagttctggcagggataattcgtccagtcgttccagggcttcgttacgccaacataatgaatcagcttagtatcatcggtaatggtctttttataatcttcatcgcttttattttttaactcataatcaatgccataaaagcaatcataatcgccgctaataaaaatacaatgaccaaagaacagaatatttaaaatatcctgatcaaggcatttatacttcgtgtgctgcgggtcacttgccagcatagcaatggctttattcataaaatcatttttcgcccatgcttcaagctgcagatatactacaccggcgttgaaataattccctggaagtccctctatagccagacgcttcgctggtttttcctgcataaaaggcacatctttaataacagctgcgaacttatccccatcaaaattaatatcaagcaatccaactaatgagcctttacagatgacatcagcatcgatatataacagattttcaatagtttcactcaaatactggaacgcaactaaacggaagaatgttgcataagaccactgtttcaggctggggaagatatcaataaaggcattggaaactttataaattattacttcaacgttagcatttttgctggtaaaagcattaacacgttgtagataatcttcatcaatgtagtcggtaaagagatgaaacttaaccgcaaggtccgggttatgcataacaactgattgcatagatactgccgcaccaaataaaaagttacggtcaataccgtaagcgatatttaacacacgatcggtgttagcaatttccccagagacagcgacttcagtaatactctcagctaataaatccatgttggttccgttttgactgtgtggtttacgctttgccttttaattttttaataaatttgcgtagtttggttctgtagattactgaatagtagccataatcttttatttcgttggcaatacccaggtgacgttccatggccagacgatcacgagctttacgctctgccgtacagcttttaccggataggtcaattatcctgacaccatctttactaacgataaagttaccccggtgtgggtcgcccgatagcatatttaaggcatgcaatttttccattgaagccttaatttctgctttaacattttctggaataatcggcatatcattgagctctacgccctcgacatactcgataagcatgataaaaacactggcatagttgaaaattttacgctcagccagaaaataaaaatcattaggaaaagtaagacctgcacttctgacacgatcggtttcaacgatcaaattctgatagtagtcaccttttacaaaagatttaaaaaaacgttcattccttttcgttttcggagcaaagactttaaaaacatagcgaccatatttcgtatcaatcaacgatactttggtatcatcaatattacgtaatacttttactgttttaaaattataggccagtatttcatcaaagatttctttatatttattatcattatctttgtaataaaatgagaagccgcgataacgtatacttgtaatcataagagtaatttatttcttaagcttgtacttaattaatgaagttatgccttttatatactcaccatgggcaaacagatgcttatattgtttctgcatttctgcaacagtccgcgcctctttaagaggatatttcttccagggagattgttcacgcgcgatattaaagtatgatgcagacggatatccagcccagctatgccatggtttagttatccctgtatagtgaatcaacactgttttatcggtaatggtttgctgatactttcggtgactacgatcataaagttcgtttttcagggtataaatagtatcaaaatccttcgcaaggtagatattattcatattaaatgcgatattcaacgcatcctgatctaaatatttaagagagccatatttagtttcccctcgtaaaagtttgagtaaatacggtgtcaaatttgcttcatgccattttttaagattgacatagataacgcctgcattgaaataacatccattcatttcgggaatgttgaggcgttttgcacatgccgcctgagtactatcattgtcaggaatgaccgcagcaaactcatctttaaatataatttctgtgagaggtttcaggcttcctttacaaacaacatcggcatccagatacagcagtgtggaaatactttcactcagatattcaaaagacaataccctgaagtatgtcgcgtacgaccaaaactgtgacgtcggcagatcagcaaagtatttggggtcaattaaatatacaataattgaggtattaaattgttttgctgtttcattaaatgactttaaataatcatcatccacataatcagtgaaaacatgaaagacaaaattaatatctgaattattaatcaaaacggaagaaattgaaacgccagcaccatacaaaaaattcttatcgataccgtaggaaacatttagctctggggcgttttcttttttattatctgctaaatacgaaaaccgttcttttataaattcattcatttaacttttctcaatttcattttattatctttaaataaaaataataaatataattcattatcccgttaattggtttattttgtttaaaattatgcttggcgctataacgagcatagtttgagttaactggccgcattaacggttcatttttccagggcgatgcttctttggcattgataaaaggttgcgcacttggataaccggcccagtaatgccatggttttgtcgggccgacataatgaattaatacggtttcatcattaattggacaaacaaatgatttttttaattcataatttaaactaaattgcgtattgtatttagcatcaatgaatttaactttccctaacaggataagattaaggatatcttgatccatataggttaaacgggaaacgatggctttatcatcaagcatcgacatcgctttagcagaaacggactcctgcgcccacgctagtgtattaattaacaggacacctgaattaaagtaacccttttcaagttcattacactgcagactttgaccccgtaacgaccaccagttagcatcgcgttcagtaacaacagcagcaacgttattggcaagatccattgttatcagcggctttaagtttccctgacaggcgatatcagcatctaggtaaaggatcttatcttgttgatcaataaagtaatctgcaattacaaaacggaaatacatggcaatagaccaatttttggtcgtcggtaatgccttaagccgttcacaatttactagatggatctggatacaggtacgatagcttttcgccaattgggctaaacgctggatatcggcttcagggatatcatcaataaaaacgtggaaaacaaaactcacgtcgttgttatgtaacaaaactgacgtgattgaaacgccacaaccaaaaagaaagtttttatcaatgccataagcaacatggaatgatgatgccactgacgccgctggcctttcatcgaagatgattgtcttattgatcatctcttgtggattaaaatagtgggcactcatatttctctccggaaattacaacgattttcgaatcgttctttccctgatttttgtggcttttgcttctgcttgcgacagcagtccttgttcctgcttgagaatgtctttaagcggggcggcaaaatacactttcataaaccgccagatatcccgctgagtcaggccgatattcatcgaagaaaaataaagcccaataagatctttatcgcgccaacgacgtggaacgcgcgtgcgaagctgcgcccggtgcaggtcaattaccgaaatttttaactcctcttccttaccggaaaaaggcaagtgcagcaggaaatgacagatataacagtcacggtggttaatgcccgcagcatgcatatcgcgcaccatcgtcgcgacacgcttaataagcatacgctttacgcgaacatctggagggttagtcgcccagtcagcacagtaatcttccagacttatggttggtgtcagatcttcggtaataataaatgaagttctggtcagcggattcatgcctttttcgccaaatgccaccccatacatagtatcaacgccgacatcccgcagtcgatgaatcgcattccattcgcggtctgcgcctaatactggcatccgcaatgagagtaaatttttgattatctctttcagggtcgtgccgcgatgccatttgagaaaatagcttttgcccgccatttcaaagcgcagagtacggcgagtttccagttcacgaaatacctcaccctgcaaggttttaacttcctcaaaaggatctttaccgcgccataacgtggcaaacggctctttaagttcaaccatccagaccacccgttatgatatccgccgctttctctggcagactgtataaatcttgtgtatcagcataatgtcgcgcattttccgcccaggcctggcgcaatgaagattgcgttaacgctttgcgtaaaatctcattcaatgtttcctggcggaatggctcaacaatagcctcgccgcaattggcctcgacaatataatgcgcatagccacaaacggctgttgttagtaccggtaatcctgcagtaatcgcttccagcagcacaattcccgccgcttcctggtaggcaggatgcagtaataaatccgccgccgccattaattccgagacatcgttgcgccccgagaagaagtgaacattactgcgcacgccgcgtttttctgccagcgcctcaaattttcgcggtttatcctgcccaacaatatatagcaatgtgttgtggcgcagcgaatccggtaacgaagcaagtgcttcaatggaacgatcgacacctttacgcgtgaagtctgaaccgacctgcaacaataaatattgttgttcggttattccattcttcttacggaagatttcacggctattagctggctgctggctatatttacgatcaggataaatccccggtggcagaatatgaaaacgctccgcttcagtctgataatgtttctggaaatcggcgatttgcttatctgtcagcatcagcagctgtgtcggcttgccctgttcgaaggttgcccgctcaaaggcggcataatggcgataacgtgacgtcaggcgatagaaaaagcctttttcctgcgctactttctcggcataacaaacatcagcggcataataaacgtccagccccggcattttgttgaatccaacgactttatcgacgggatgttcgcgtaaatgtttttgcacccaggcaaaatactccgcattgcgcccgtgattggtatgcgatttaaccggcactttgatcagttcaaatacatcagggcattcgccttcccacgactgggtataaacccgaacatgatgacctcgggcggcgactgtctgagcaatacgcataaaatcgcgctgcaaaccgccaaagggaaaatatttatataaacaaaaagcaacgatcataacgacgtacctgtcgtggaggagggcagtaatttatcgacagcagcaatgacatctgccgccggaataaccgaaagatacatctcatttcggtcacgctgatcgcgcgttggcatttcccggtaatctcccgcccagaattgaatcatgttatttgaccagggacgccagaaaatatggtctgtcgcaccaaacagcgatatcagcggcgtattaactgcagcggcaatatgcgccggtgcggaatcaacgccaataaacagctgcgcatgatcgattaacgcaccaagttccgggaaggtcacctttccagccagcgccgttactggtggcgtctggcatccctgcgcaatttcattgacgcaggccagatcgtctttatctgggccggacgtcagaacgacttcataaccacgagcatgtaaggcatcaatcacagcggaaaacttggcgttgtcccagcatttgaagatttgccgcgccgtaggttggataaccacataattttgtccaacaccagcgtgatcaagttcgcgacgcatacgtttccagcttgcaggcgggtaactcatggttgtctgcttcaccaacgaatcaagtcccaatggtatcagcacggataagttactttccaccacatttccaccctgcaacggcaccaaatgggtgaaacttttacgccaaaaagcagactgccgatgatgataatcctgggaaattttcacacgggcatttaataagcgaaccagtatagcaaccatccattgatcggtaagattgacgataaggtcatacttattggcacgtaataccttgatgagatgaaaaaagttggcaattttttctgaggcttttgcttttttattttttatgccgtagagcgcgttaatctctggattttcagacaggatcgggatggtgtcctgataaagcagcacatcgatttttgcgtcagggtaattttttttcagcgaactaatgacgggagtagttaataacatatccccatgaaaacgcatcttaatgagcaaaattcttcgaaatggcttatccacaagtaactctttttgttgagattatccgattaaggtgaagcagaaaaagcacgctaccgccccaggctcaacagctacctgaatactgataccgcactgatattgacgcgctagtgtatcacttctttcgcggcaatccgacccgaatgatttttaagcacattgttgattttcaataaagaaatcaatcaaatataatcattagcaaccatattctttcactgttgctctgcgattccttcctgcacgtacagcagaaatcaatgaatcgcataaaaatacaaaaaaagtatagatgttcagcaagaattggcgggtaaattgctatttaagtcaaaaacgggaaaagtaatggtaaagccacagctaaatacatagaatccccagcacatccataagtcagctatttactatgctcgaattgctttacaccgcccttctctaccttattcagccgctgatctggatacggctctgggtgcgcggacgtaaggctccggcctatcgaaaacgctggggtgaacgttacggtttttaccgccatccgctaaaaccaggcggcattatgctgcactccgtctccgtcggtgaaactctggcggcgatcccgttggtgcgcgcgctgcgccatcgttatcctgatttaccgattaccgttacaaccatgacgccaaccggttcggagcgcgtacaatcggctttcgggaaggatgttcagcacgtttatctgccgtatgatctgcccgatgcactcaaccgtttcctgaataaagtcgaccctaaactggtgttgattatggaaaccgaactatggcctaacctgattgcggcgctacataaacgtaaaattccgctggtgatcgctaacgcgcgactctctgcccgctcggccgcaggttatgccaaactgggtaaattcgtccgtcgcttgctgcgtcgtattacgctgattgccgcccaaaatgaagaagatggtgcacgttttgtggcgctgggcgcaaaaaataaccaggtaaccgttaccggtagcctgaaattcgatatttctgtaacgccgcagttggctgctaaagccgtgacgctgcgccgccaatgggcaccacaccgcccggtatggattgccaccagcactcacgaaggcgaagagagtgtggtgatcgccgcacatcaggcattgttacagcaattcccgaatttattgctcatcctggtaccccgtcatccagaacgcttcccggatgcgattaaccttgtccgccaggctggactaagctatatcacacgctcttcaggggaagtcccctccaccagcacgcaggttgtggttggcgatacgatgggcgagttgatgttactgtacggcattgccgatctcgcctttgttggcggttcactggttgaacgtggtgggcataatccgctggaagctgccgcacacgcaattccggtattgatggggccgcatacttttaactttaaagacatttgcgcgcggctggagcaggcaagcgggctgattaccgttaccgatgccactacgcttgcaaaagaggtttcctctttactcaccgacgccgattaccgtagtttctatggccgtcatgccgttgaagtactgtatcaaaaccagggcgcgctacagcgtctgcttcaactgctggaaccttacctgccaccgaaaacgcattgaggttgttatgcaaaaacgggcgatttatccgggtactttcgatcccattaccaatggtcatatcgatatcgtgacgcgcgccacgcagatgttcgatcacgttattctggcgattgccgccagccccagtaaaaaaccgatgtttaccctggaagagcgtgttgagctggcacagcaggcaaccgcgcatctggggaacgtggaagtggtcgggtttagtgatttgatggcgaacttcgcccgtaatcaacacgctacggtgctgattcgtggtctgcgtgcggtggcggattttgaatatgaaatgcagctggcgcatatgaatcgccacttaatgccggaactggaaagtgtgtttctgatgccgtcgaaagagtggtcgtttatctcttcatcgttggtgaaagaggtggcgcgccatcagggcgatgtcacccatttcctgccggagaatgtccatcaggcgctgatggcgaagttagcgtagcgtttatgccggatggtatgccatccggcgcgcatgaattacttctggcactgccgacaataaaacgttgcccgctgcgcatgtttagtcgccacaatcggcgtaccgcacacccgacagggctcgccttttcgcccgtaaacctgcaattcctgcgcgaaatagcccggtttaccatcactttgcagaaaatctttcagcgttgtaccaccctgctcaatcgaacgcagcaacaccgctttaatcacccgagccagcaattcacactctgccagcgacagtgatgacgccagccgatccggatggatccccgccgcaaacagtgattcgctggcatagatattccctacgcctaccaccagcttgttatccatcagccacggtttgatcgccgtttttttcttcgcgcacttctgatgcaggtactcaccgttgaaatcgtcgctaagcggctccggtccaagatgggccagcacgttgtgcccttccagctctttggtccacagccaggcaccaaagcggcgcggatcggtgtagcgcagcactttgccgttgctcatcaccaaatcaacatggtcatgcttctcagggggaagttcttctggaaggatgcgcaggctgccagacatccccaaatgaatgataatccagccctcaggcagctccagcagcagatatttagcccgccgctgcacgctaagcactggttgatcgcttaatcggtagatctcttctgaaaccggccagcgcaagcgtccgttgcgcaccacagcatgaagaatggttgcaccaacgagatgcggttctatgccgcggcggctggtttcaacttcgggtaattcaggcatagcatctccaggaatgaacagatgcaatcaatatgggggtaagcagataacaaaaaaccccgccggagcgaggtttttcgttacatcaaagcgagaattatttgattttcgcttctttgtagatcacgtgctggcgaacaactggatcgaattttttcagttccagtttttccggcttagtacgtttgttcttcgtagtggtatagaagtgaccagtaccagcagaagaaaccagcttgattttctcacgaatacctttagccatgatttatttcctctaagtacttagtacttttcgccacgggcacgcagttcagccagaactgtatcgatgccttttttatcgattacacgcatacctttagcagatacgcgcagggtgacaaaacgcttctcgctctcaacccagaaacggtgagagtgcaggttcggcaggaaacggcgtttagtcgcgttcagtgcgtgggaacggttgttaccggtcaccggacgcttgccagtaacttggcagactcgggacatgtctattctccaaaaatcaaattagctcgagcttcgtatggggtattggcgcctcgtcaggctttacagcccggtcatcgcagttctatgtgaactctcgattgccaggcccaaatgccaaacccgagattctcaaaggtggcgtagtatacgctgactcagcgatgtgctcaagtcccgaacagacaaagatcccgaaggatcgcgcatagcgggttaaatccagccgcgttcggcaaaagaaacatactctccacgcccaatcacgatatggtcgagcacgcgtaaatccatgaactgacaactctttattatccgttcagtaatgagtttatccgctttactgggttcagcacaacccgaaggatgattatgtgcaaggatcagcgccgaggcgtttatttttatcgcttcgcggataatttcccgaggatggacttcaacatggtttagcgtgccggaaaaaagacggctatgcgttataacccggtgttgggagtcgagaaagatcaccataaagatctcccgctcctcacccgtgagctggctttgtaaaaattcccgcgtcatctccgggctgagtaaagggctttcttcacgcatccgcacgttgtagtaacgtcgcgccagttcagcaatcccctttaactgggcaaatttcgctacgccaattccatgaacaccactaaattgttcatattcagaggttaacaagccataaagagagccgaaattctccagcatctcttttgccagggttaatacatctttaccgcgcgttccggtacgcagaaatagcgccagcagctcgacatccgttaaggcgctaataccaaacttcagcattttttcgcgcggcatcaacagctgtgaattgtttttcaccttcacctcctttgtggtgctcgcatcctgtcatagccgtttcgttaaatcgacggccagttttcaatcctggaaagcgcctcgcaaagtgaatctcaggtgaaggcacgacaacaaaagtattgtgataaaatcgccaacttctggtgtcaccctacaggaaaaatcatcatgagcctggccggtaaaaaaatcgttctcggcgttagcggcggtattgctgcctataaaacccctgaactggtgcgtcgtttgcgcgatcgcggggccgacgtccgcgtagccatgaccgaagcggcaaaagcctttatcaccccacttagcttgcaggcggtttctggttatcccgtttccgacagtctgctggacccggcagccgaagccgctatgggccatattgagctgggtaaatgggctgatttagtgattctcgcccctgccacggcagatttgattgcccgtgttgctgccggaatggcgaatgacctggtatcgacgatttgtctggctacacctgcgcctgtagccgtgctccccgccatgaaccagcagatgtaccgtgccgctgccacgcagcataatttagaggtgcttgcttcccgtggtttgctcatctgggggccagacagtggcagtcaggcttgtggtgatatcggcccagggcgaatgctcgatccgttaaccattgtggatatggcggtagcgcatttttcgcccgtcaacgacctgaaacatctgaacattatgattaccgccggtccgacgcgtgaaccgctcgatcccgtgcgttatatctctaatcacagctccggcaagatgggttttgcaatcgccgccgccgctgcccgtcgtggcgcgaacgtcacgctggtatcaggtccggtttcactaccgacgccaccgtttgttaaacgtgttgatgtgatgaccgcgctggaaatggaagccgccgtgaatgcttctgtacagcagcaaaatatttttatcggctgcgccgccgtggcggattatcgcgcagctaccgtggccccagaaaaaatcaaaaagcaggccacgcagggtgatgaattaacaataaaaatggttaaaaaccccgatatcgtcgcaggcgttgccgcactaaaagaccatcgaccctacgtcgttggatttgccgccgaaacaaataatgtggaagaatacgcccggcaaaaacgtatccgtaaaaaccttgatctgatctgcgcgaacgatgtttcccagccaactcaaggatttaacagcgacaacaacgcattacaccttttctggcaggacggagataaagtcttaccgcttgagcgcaaagagctccttggccaattattactcgacgagatcgtgacccgttatgatgaaaaaaatcgacgttaagattctggacccgcgcgttgggaaggaatttccgctcccgacttatgccacctctggctctgccggacttgacctgcgtgcctgtctcgacgacgccgtagaactggctccgggtgacactacgctggttccgaccgggctggcgattcatattgccgatccttcactggcggcaatgatgctgccgcgctccggattgggacataagcacggtatcgtgcttggtaacctggtaggattgatcgattccgactatcagggccagttgatgatttccgtgtggaaccgtggtcaggacagcttcaccattcaacctggcgaacgcatcgcccagatgatttttgttccggtagtacaggctgaatttaatctggtggaagatttcgacgccaccgaccgcggtgaaggcggctttggtcactctggtcgtcagtaacacatacgcatccgaataacgtcataacatagccgcaaacatttcgtttgcggtcatagcgtgggtgccgcctggcaagtgcttattttcaggggtattttgtaacatggcagaaaaacaaactgcgaaaaggaaccgtcgcgaggaaatacttcagtctctggcgctgatgctggaatccagcgatggaagccaacgtatcacgacggcaaaactggccgcctctgtcggcgtttccgaagcggcactgtatcgccacttccccagtaagacccgcatgttcgatagcctgattgagtttatcgaagatagcctgattactcgcatcaatctgattctgaaagatgagaaagacaccacagcgcgcctgcgtctgattgtgttgctgcttctcggttttggtgagcgtaatcctggcctgacccgcatcctcactggtcatgcgctaatgtttgaacaggatcgcctgcaagggcgcatcaaccagctgttcgagcgtattgaagcgcagctgcgccaggtattgcgtgaaaagagaatgcgtgagggtgaaggttacaccaccgatgaaaccctgctggcaagccagatcctggccttctgtgaaggtatgctgtcacgttttgtccgcagcgaatttaaataccgcccgacggatgattttgacgcccgctggccgctaattgccgcgcagttgcagtaatatgacgccggatgaattttcatccggcgagtttctttaaacgccaaactcttcgcgataggccttaaccgccgccagatgttccgccatttccggcttctcttccaggtaagcaatcagatctttcagggtgatgatagagatcactttgcagttgtaatcacgctcaacttcctgaatcgccgaaatctcgccgcgcccccgttcctgacgatcgagcgaaatcaacacgccagcaagcgtcgcgccattggcctgaataatttccatcgactcacgaatcgccgttccggcggtgatcacatcatctaccagcattacgcgtccttgtaacgcgctaccaaccagattgccgccttcaccgtggtcttttgcctctttgcggttaaagcagtacggcaggtccaggtcatgatgctccgccaacgccacggcggttgtggtggcaatcgggatccctttgtaagcagggccaaacagcagatcgaactcaatgccggaatccaccaacgcttcagcgtaaaaacggcctaacagtgccagatcgcgcccggtattaaacagcccggcgttgaagaaataggggcttttgcgcccggatttcagcgtaaactcgccaaactttaacacctgcttgctaagcgcaaattcaataaactggcgctgatatggtttcatgccttcgctcctcatcttacttttctacagacaaaaaaaaggcgactcatcagtcgccttaaaaatcagtttgccagcgccgccttctgcgtcgctacaatggattcgattccccctcgggccagagccaacaaggtgagtagctcttcatgggtgaacggctcgccttctgccgtcccctgcacttcaatgatgcgcccgtcttcggtcatcactacgttcatgtcggtctctgcggcagagtcttcaacgtattccagatcgcaaaccgcttcgccgttcacaattccgacagaaactgcggctaccatccctttcatcggattggttttcagcttgccgttttccaccagcttctgtagcgcatctaccagcgccacgcaggcacccgtaatcgacgcggtacgcgtgccaccatcagcctgaagcacgtcgcagtccagcgtaatggtgaactcacccagcgctttcaaatctactgccgcgcgaagagcacgggcgatcagacgctggatttccattgtgcgtccaccctgcttacctttcgccgcttcacgagcgttacgggtgtgggtagaacgtggcagcatgccgtactctgcggtgatccagccctggccctgacctttcaggaagcgcggcacgccttcttcaatagaggcggtacacaacactttggtatcgccaaattcgaccagcaccgagccttctgcatgttttgtatagttacgagtcagggtaacgggacgcacctgattattgctacggcctgctggacgcatattgaaatctccggcttgaaacaaatgtggctgcgcattatacggacttccggcgattattcctatcctgacaaggcatcgatggctataatccttccacctctccttttataaacaggaacgtctatgatccgcagtatgaccgcctacgcccggcgtgaaatcaagggtgaatgggggagcgcaacctgggaaatgcgctcggtaaaccagcgttatctggaaacttactttcgtctgccggagcagttccgtagccttgaacctgtcgttcgcgagcgtattcgttctcgcctgacgcgcggtaaagtggaatgtaccctgcactatgagccagatgttagcgcgcaaggtgagctgatcctcaacgaaaaactggctaaacagctggtaactgccgcgaactgggtaaaaatgcagagtgacgaaggggaaatcaacccggttgatattctacgctggccgggcgtgatggcagcccaggagcaggatcttgacgccattgccgctgaaattctcgcggcgctggatggtacgctggacgactttattgtcgcgcgcgaaaccgaaggtcaggcactgaaagcattgatcgagcagcgtctggaaggcgtcaccgccgaagtggtcaaagtccgctcccatatgccggaaatcctgcaatggcagcgtgagcgtctggtcgcgaagctggaagatgctcaggtgcaactggaaaacaaccgtctggagcaggaactggttctgctggcacaacgaattgacgttgccgaagaactggatcgcctcgaagcgcatgtcaaagagacctacaacattctgaagaaaaaagaagcggttggtcgtcgtctggattttatgatgcaggagttcaaccgcgagtcgaacactcttgcgtcgaagtctatcaatgccgaagtgacaaactccgccatcgagctgaaagtgttgattgagcagatgcgcgagcagattcagaatatcgaataagccatcagtaaaaatcaccaagcagcaaaaaaacacaaagcccgcgaaatgtcgggcttttttgttatcatgagctatcataacgacgcaacaaagcgcacaatatgcgtgtacatagaggtgtacataatgactttcatgtacattgctttatgtacacacccatattcgatattcaggtattcgcaatgccaaaactcacagatatgcagatccgcgcatggataaaggcgggagacagatttgatggcaaggcagacggcaacggcctttatatttgctaccccaaaaactacacagtcccgttctggcgattccgctataagctcgcaggaaagcagcgggctatggttataggctcttactccgaactgtcactatcaaaagccagagaaacagcaaaagagctgtcagccagagttgctcttggctatgacgtagcagcagagaaacaggaacgaaaagctgaagcactggcaaaaatggaggctgagaaaaacgccatgcgtgtttcagatctggcctccgaatacttcgagcgccagatacttccgagatggaaacatcccgatatccttcgccggagaattgataaggatattaacccctgcattgggcatatgaaggtagaggacgttaagccacgccacattgacgacatgttgaaaggtatcgttgaccgaggagcaccaacgatagcaacagatgtattacgctggacacgccgtatctttgactatgggataaaacgccacgctctggagataaacccttgttcagcgtttgaagtatctgatgctggtggtaaagaggtttcccgcgaccgttggctaactcgcgatgagcttatcaggctattcgaggctatgcgcaccgcaaaaggattcagccgccagaacgaactgacatttaagctattgctggcactatgcgttcgtaagatggagttatgcgccgcacgatgggaagagtttgatttagatggtgcggtatggcatttgccggaagaacgcagcaaaaacggagaccctattgatatacctctaccttccccagccgttgaatggttgagagagctacacaccttttcatgtaatagcgcatgggtgcttccggccaggaagatgcaaaacagaatgatcccacatattcaggaaagcactttacccgtagcactggctaaggttcgcgccgaaatgccggatgtgcctaatttcacgattcacgacttccgacgcaccgcacgtactcatttagcagcgttgggtgttgatcctgttgtggcggaacgatgcctcaatcatcgcattaagggcgtagaggggatttataaccgccatcagtattttgatgagcgtaaagcagcactggcacagtgggctgatctgctggtggcactggaaagcggaaaagactacaacgtaacgcctctcagaagggcgaactaactgaatagattgagcctagctcgacggggcgaaaagcgggaagccttaccgcctggctcaatcacaaaataaggcgcagcgtaaaaggtgacgcaatgaacgactctcatgaaacaactgcggtgcatagaaatttatggcaggaatcaggtattccacctttggactactgcacgatagagcgagcatcaaaattattaaattgtgaaattgatgatatatggcattggaaagatagactacatatagacttttatgtctatgctgactttcttgatttcattgaagctgatgccgccatccacttcaaaaaagatgctgattttataactgatttattacttatgtacccagaagaagtaaggtttacatttccttttcttattaccagcgcaagcaacgaagtttatatcccagcatctgaaagcggtgcttatgagctattttatgcacataaaccactgacagttgaagacagagacaataaaaatgtttttgaacaaattggcaaaaactcttttattgtaagaaaatcaattgcatgcagattgttgcgtgtacgcggtagtacaacacgacattatcattcacaagaatgtggagagccatatgtgcgacttgaagcaacatttgattgtgatctatataaattcaaaatgcaaagttcccagattcacctgagtagcctgtcagataaaaacatttatataacaaaggctgatttagaatatcttcacgacgcaaaggttaatggaagttttgacgcagctaagagcaaaaaacgatacgaaatggcggtagaacaggaactaatacctgaaataaaaaatagcaaccataatgccgagagacatgctgaaaacagggaaaaacttttcaaatcagcaatatatcttttgtcaaagtatcctgatgaatgccgtggcaaaaagaaagaaataagccctgagaagtggcgggattgcatagtggctcataaagacgaaattccaccgttagcaatcacaaatgaagatgtgattttgagacacttacgtgctgccgccaacggtaaggggtagagtagctaactattcaggcacagtatcattactgtgcctttttattgttcatatatgtacagatacttcctcccgtaacgaagcaacaactatcgctaagaggttacgggaagcatgaacaccgacactattcctacaaaaggctatatcagacgcttccgcctggctgaattgctgggcgttagtgtatccaccatcgaccgtaaagtaagaaacggttcactaccacgtccggtaaagctgggagaaaaaataactgcgtttgatgcggttgagattcacaactggctggcagaacgccgcgggaaggtggcctgatggaaaagaaaaaccgcccattacaggcggctaattcagatattcgcgtatctgatgttacgccccttacaaaatcccttcaagaaccaaagcgcacaccgaaaaagcatcgtgccagagtctatatgctgcgtactggtatagagggatggacagaaaatgacattcttcgctactgccgtctgtcttctggtcgtaactatgcaacagagttagaacgccagcttggaatcactctggagcgtatcgacgaaaagaatcctgatggtatcggaacacaccttcgctaccgtttctcctgccgtggtgatgttctgaaagtgatcactcatgttaaccatcttgcgaacataaatgatcacaacggactttctcagcaggaaattgccgacattctgaaactctacccgaacgcgtttaacgccgcctaacggagactgaaaatgaacatcgaaaaaagcagattaatttctgaggccgcccctcatctgaacgcctctctgggcacaattaacggtaatgaatttgccgcaattgtcccggttattcctggtcatatcggtgggcgtgaaaccaatattgttagcgcaaaagcgttacacaaagcgttgggcgtgggaaaagacttctctacatggatcactgatcgcatctctgaatatgacttcaccattgggcacgattactcagtccataaaacaatttccccaaatttggggaaaagcccgaatggcacggcttacagcaagattaagcactctggcagacccggcaaagactatctgttaagtgtcggaatggcgaaagaactggcaatgatcgaacgcaatgatcaggggcgcgctatccgccgttatttcatccagtgcgaggaagaattacagcgtagcgttcctgaaatcgccgcccgctatcgtcgccagctaaaagcccgtatcagtgccgcaaacaactttaagccaatgtgcgatgcgctgaatatggcccgtgccgagcaggggaaaacgacgcagcaacaccactacacaaacgagagcaatatgatttctcgtatcgttcttggtgggctaactgctaagcagtgggcgcggataaatggctattctggcgaacctcgcgaccatatgaacgcagaacaacttgagcacctctcatatctcgaaagcaccaatatcacgttaattgatatgggcatggaatatgagcagcgcaaaggagaactcacccgcctgtcgcaacgctggctcgctaagcgtctggaggcggtccatgtttaagcctacaggaacaccacaacctcaaaaacgctacaaagatgcccacggagcactcgttactgtcgaaagcgtgtctcacaaccgagtgacgttctatcgcgacgggtatcaatcgccatgcgtacaaccgctggcgcgtttcatgaaggagttcgcggaggttaacaaatgctaaccgtccagaagaagacattttcactggctggtatgtcgccaaaatccagcaatatgacagcaaagtcaggcattaatacagcagatacaagcaaagtttatcatttgctggtggtaggagcggatgccttaactatgtcagaaattacggtcgatggtgttagcgttgagaaggtcagcggctgcgccagagaatttctggtcgtagatcacctgttctgctcgtgtagtgactccacaaaaacattcgtccacgtgcgtgacgttaacgaaatgagcgcgatgtattgtgcatctggtgcttccaatagtgagttttcggagtccataaaaaagagcttgccgttatgcggcaacacggtttatggttataaggcacctcataaaacgggtgccgggattaggaccccgcaggcaatcgaggcgatacatgacgcgccagcgtctttttttgtatcggcgcacacgcacaccttatcaatggtgggctgtatggggctgacttcggtcaggctggtttccttgattgccagtagtcctaaccctgtacagtccaccgccagcgagcttaggacctccggcggtggctataaaccatcaatcaaggaggctgccacatgctggctactacccctacccaaaaaccgcaatttatctggattatcgccgcagttcgccgcgattgcccgacaattaccgccaaaattcatcatattgctgccgagtctgaacgcgatgctcgccgttctctggtgcgcgatcacgtctgcttttttgctggtcgtatccgcatggaggtggcacatgattaaaacctacgatgtgcatatggatcccctcgaacgcacaagccagatcatcacactgacagaagtgattaacgacattctggtgagcaactctccctcacgagacgaaagactgaaggcgttactcgcgatattggatctcgccgttcgtgacgttcatttcctgctggaaggtggcgaaatgccagtaaaaacgggggaaaccaatgaataactcaattaatacccctcgccttacgtccgcacttcaattaatcgagcaagcagcggctgtcctggttgctgtcagtctttcggctgaagaaatggacgctactgatgtcgtggatgcgattaaagcgtgctcatctttggttaacgatgcccgtgcagagctggtaattcttgggggtgaaaaatgaatatcaacttaatttatcgtcatccgtgtgagctggaaattgaatcattgctgagccgtgaagagccatatccagacacattcactcttgcagatcgcacgactgaacggcttaccagagcgcgcacaggtctggttcatgtgatgaatgagattcttccatcggtgggaggggaacaggcgacagtaatcactagctggctacaaaaagttacctctctgatagatatcagtttaatcgatgcggagagtgcgaaatgaccaacatccagctcattgaagcgcaatgtcgtatcgaacaggttcagactgttttagggttctggcttgaaggggccagccccagcaacagagacaagttaatgattggcgcggttatgtcactgctcaatggcgtaccagaagctattcaggaagcagacgaattgttgggcaaatatgagttacagaatcattcaggcgaggcgaaacatgaataatttcttaactttccatgcagaagcaacgcctgacggcgtaaacatcatgtaccgcagcaacgatggcatgacagaacgcgttgagaccgtctcatatattgatgccgtaaatcgtctggatgccggggattatgacgataaaccagatgaaggcatgtttatacatctcgctattgccagtggcggcaaccagggatatttcgattacacatcacagcatcacgtgattatgtggcgctggctgatagcaacagcattcatcaatgaaatgagaaaggaaaacggcaccgtcagcattattgatgacagtggcaatcattccgtggtttctgtttattccaatggcatcgtcgccatgccgctgtatccagtagcagagcgcctcgctatggcaaacaacattgagggcgcaatgatcgagaaatatggtgttgatgtcggaacaaagaatgccatcattttttacagcaacatgttcgatgtcgaacagggaacactcacttcgtttgggcgagaagtgcttgccgatcttcacaacagctttattgccgaactaaacgaaaacggcatcccagaagcaccagtgacgcactaaacgggggccagaatgcgaaacattgatcttatccgtcaggttatcagtgcgtctgaaaacaactggcctcatgtgctgggctgcctgaacataaatgtccctgactctccgcgccgtcatgctccctgccctgcatgtgggggcaaagatcgattccggttcgatgacaacgggcgcggtagcttcatctgtaatcagtgcggcgctggtgatgggctggatttaattaaacgcgtaaataactgcgacacaacagaggcggcgcttcttgtcgctgatgttctgggtattgattaccgggcagcgcaatccgacccggtggcagcgagccatagaagggagcaactggaagctgaccgccagcagcgtgagcaggagcgccagaaacaggcagcagaggacgcagagcagcgaagggctacgtttgcccatctgtatgccggaatgcgccagagtgccacacagggcgaatctgattacctgcaatcaaaagggctgaccgggtttaactatccggttatgccggatggttcgttattgctggagctggtggacgaatccggcgcagtggcagcagcgcaaaccattacaccgcagggagagaagcgactcctgacaggttcagcaaagcgcggggcatatcacgccgtaaacgcgccagaatcgccgcagagcgttttaattgccgaggggctggcaaccgctttatcagtccacctgatgcgccctgacgcgctgacagtgtgcgccattgatgcgggcaacctgctacccgttgccgaagtgatgcgccggatatatccagccacgcagattatcattgccgcagataacgaccaccagcaggacgaacaggcgaacacgggcaaagatgccgcagagaaagccgccttatccgtggctggctgggtggcactgccgccgacagactacaaagccgactgggacgactaccgccagcaaaacgggctggaagtcgctacggctgcgtttaacgattcgatgtaccagattcaaggggaagccgtgaaaccgcgattgcaagccattgagggcggtaaaactgaccatccagagaaagatccactaaaaccccacattgagagccgcaaagatggcgttttctgggtaacgccgaaggtggacaaggaaagcggggagatcgtcaacgctgaaagctggttatgttccccgttggaggttatcggcacgggacgcgacgacaaagatcagtatcttattatctcatggctggcattcggtgcaggcataccgacaacagcggctatcccgctggctgatattggcgagcgtgaaggctggcgcaccctgaaagctggtggggtaaatgtcacgaccaaaagcagcctcagagcaatactggcagactggctacaacgcagtggctctcgtgaattgtggcgtgttgctcatgccactggctggcaatgcggagcgtacatcatgcctgatggggaaatcatcggaacacctgaaaatcctgtgctgttcagcgggagaagctcagccgcagccggatataccgtctcagggagcgcgaaaagctggcgtgataacgtggcgcgtctggcctttggtaactattcaatgatgaccgggatcggcgcagcactggcagcgccattgattgggctggtgggcgctgacgggttcggcattcatttctatgagcagtcgagcgcaggtaagaccaccacggcaaacgtggcgagcagcttatacggcaaccctgatttactgcggctgacgtggtacggaaccgcgctggggctggcaaatgaagctgccgcccacaatgacggactaatgccgcttgatgaagttggtcagggcgctgatcctgtcagtgtttcacagtctgcctatgcgttatttaacggtgtagggaaactgcaaggcgctaaagatggtggaaaccgggatctaaaacgctggcgcacagtggcaatcagcaccggagaaatggatttagaaacatttatcgctacttccgggcgaaaaaccaaagccgggcaactggtgcgactgctgaatattccgttgagtaaagcagtacgctttcacgattaccagaacggaaaacagcacgcagacgcactgaaagacgcttaccagcatcaccatggcgcagccgggcgtgagtggattaaatggctggcagaccaccagcaacaggctattaaaactgttcgtgattgcgaaagcagatggagaagcctgatcccatccgattatggtgagcaggttcaccgtgtagccgcgcgatttgccattctggaggccgcattgttgttaggcgaggttgtaacaggctgggatgctcagacatgccgtgatgcgatacagcacagctataacgcatggttgcgcgagttcggcacaggtaacaaagagcatcagcagattattgaacaaacggaggcatttcttaatgcctatgggcttagccgttttgcaccatttccatacagcccggcagatttgcccatcaaagatttagccggataccgtcagcgtggagaacatgacgaaagcccaatgattttctacacattcccggccacatttgaaaaggagatcgcatgtggtttcaacgcaaaacagtttgctgaagtgttgaaaaaagccgggatgctaaccccaccaaacagcggtcgtggataccaaagaaaatcaccacgtattcagggacgacaaataaacgtttatgtactcaattaccagccaggagattataactcatctgaagaatgagcttcttcatgtgcgtagaaaaggtgttggttcagttggttcagttggttcaatttgtaaagagtattgttttataaggattttattctttttattgaaccaacactgaaccaacaacacggcattttgaaccaacacaacgtgactgaattgatgagcacaacatctggctggcatcagagagtgctttacgagactttcgtaaaatcctgtgtacaagggcgtgacgtttttgaaagtgagcactacgaaattttcgtagttcaaaaaaacagcctctgagaagttgttatgcctgttcagcaaaccatccgcatagctgatttcgaatcaaattaccaatggagccagaagcaagggcagaactggaaagcgcctgccgtgaagagtaatgcgacaccataaatatagtttttagagtccataaaaaacctgtcaaaacctgacatacagaacgatgccaccagctaatgagcggtggcatttttttgtgctatttgtttcatattttgcaatcacaatgatgaatgttgcgttttatgaaattataataactgttgttttatacagttctaagggggcgttatggctatttcagtaaagccagtattgataagtgagaaacaaatggaagcgataaagaaaattcaggaggagcagcgtaaaaaatcagaggtaggagttgcgccaacgatccacgaaattgctcggggattaatggataaggcgctgacttacactttaactggacgtgggtaaatcaatggctacgtggcaacagggtattaattctggtggttttctggctggcatcggtacgcaaaatgagaatgcgccaaaggcaagcgacattaacgcaacgcttggtctgatccgcgaaaacaatgaactggctcgatcaggtgcaaataacgttgctctgacaggtcttcgtggtctggctggagttgctgatatttataagcagcagcaacagcaggagcgtaaagcggcattccagaaaggttatgcagatgcttatgcgtccggcgacagggagaagatgcgtaatcttattacagcattcccagaagagtttgaggaagtccgtaaaggcatggggtatgtcgatgacgcccagcgggatgattttggcaatctggcgcttaaagcacaggtagcttcgtcgcttggtccgggcgcatttggcaggttcatgatggataacgaaaaggagatgcgtcgtttaggtatccctccagaaactattgctgaaatgcaggttaatgacccgcagggcttccagcacttcgcaggtaatctggcactgttttctctcggccatgagaagtacttcgatatcaaagatcaaatggaaggtcgggatattgagcgtgacaagttggcagagacaatccgcagcaatcaggctggcgaggcgctaacagcacgaggacagaacatcacgatgcgcggtcaggatttagcgatgcagagaacatcaatgaaaggggcggttgggaataatgagcgcacagttcaactagcagacggaagaactgtaaccgtaggcgggaaacttcatggtgctggtgctaacgcgttctacgaaggtatagacaatgaggggaacatagttcgcgttccagctggctctattgctgctccggccacgtcggcagctaatgcgcagaattacgaaatgaagaaagatcttgaggcaatttctggcgcatcaattgacgatattggcttcatgacaggtattactggttcttcaggttcttttgctcttggtgcagatattcgtagccgggcatctggtgctgaggagaggaggctatacaacgctgcacagcgaatcctgggcaaaatgcaaaatcaggggattgcggcagcccgagatatgggggcatctggcatcaacaccgaagcagaggccaataggtattttcaaggtatgccaaagcctgatttctcaagccctgaagcactacaacaatcaatgcgcgacattcagcaatataccgacaattacaaccagcaatataacgttaatgtcggtaatggcgggaagaaatcatcaaggcaacagccagctactcagcaatcagcaggaggtagctacacgtcaaaatcaggcattcaatttacggtggaatgatgaaagtaactgcaaacggtaagacatttaccttccctgatggtacgagcaccgaagatattggcaccgccattgatgagtattttgctggtcagtcagcaccaacacaacaaggtgttcagcaatcgccagcagacaactctcttgcgtcagggtatgcaaagttagctactcagcaaagagaggggcttgagcgttcagcagaacagggagccagccttggggctgcgatgcgcgatgctataacaggcgaaagccgaatgactccagagatggagagactgcaaaatgtcgaccttgccccagagttaacctcactcagcatggatgctctaaaagctcgatggtctcaacttttcggctctgacgcatctcaggaaaagattcttcagagcatgggagcgaaattaaggcaggatgagaagggtaacactatcgtttccctaccatccggtgattatgctctgaacaagccgggtttatcgccgcaagacgtggcatcgtttctggctaatgcgctggcgtttacaccagcgggcagggccggaacggtgctgggggccatagggaaatcagcagctacagatttagcactacagggagccaccagccttgctggtggagaagatattgatccgttacaaacggtaatctctgctggcattggcggcattggtaagggtctggagaatacagtgagtgccgtttcgagggccgttcgcggtgatatggcaccggaagcgaaagccgctgttgattttgcatcggaaagaaacctaccgttaatgaccagtgacatgctgaaagataaaacctttatgcagagtcaggctcagacattaggcgaaagagttcctttttttggaaccggtaagaatcggctgaatcaacaacaagcacgagaaaatttagtcagaacatttagcgatggtctgggtggcatttctgataaacagctttatgaatctgcgactaaagggcaacaaaaattcattgaggcagcaggaaagcgatataaccgcataattgacgctatgggggatacccctgtcgatctctcaaacacggtaaaagctatcgacaatcagattgccgtgttaagccgcccgggcaaatctcaggatagagccgcggtaaaagtcttgcagcaatttaaagacgatatcaccagcggaccaaatgacctgcgtctggcgagggaaaacagaaccgatcttcgaaagcgatttatggcgtcatctgacactgttgataaagatacgctccagaaagccagcgatattatctacaaggcatatacggcggatatgaaaaaagccgtagccaaaaatcttggagcagacgaagccattaatatggcaagggttgatcgctcatggtctaaattcaatgacatgatgggaagaacgcgcgttcaaaaggcaatagccagcggcaaggccacgcctgaggatgtaacaaaactcgtttttagccaaagcccatcagaacgttctcagctttacaggcttctggatgacaatggtaggcaaaacgcacgagcagccatagttcagaatgctgtagataaggcgactgatccgtctggaaatatcagtgttgagaagtttattaatgcgttacaccggaacaggaagcaatcagcaactttctttaaaggcgtacatggaaaggaactggacggcgttattaaatacctcaacgatacaagacacgcggcaaaagcgaacgttcaaaacttaaatggtcagcagctttatggattgttagttggtggtggcatcataaacgcagcagtattagcggggatgctaaaaacggctgcgtttgttgttcctgctgctggtgccgtaggcggagcagcgaaggcatacgaaagccctgttatacgaaatgccttgttacgtctggcaaatacgccaaaaggtagcacagcatatgacagagcgatcagtacggtcacacaatcactgaccacagcagcacaagcatcgcaaaaggaagctcaataacagatggccatggatggcttagatatctctgctgtctccattaggaaataaaagataatatggatttgcctttcttgctctccttgcttcacccggatacctgttagtcagtagcttgcataatgagcagagaacaacactcaagaaaattccgaatgagaagatcaatatctcaccaaaaatcaatggcgatattaaattttcaggatttaatgataagtcaatgttaaaaacatattgagcaataccagtaagtatcaataatataatccctatagaatacattgctgtttcccaaacatcagacagtctatttttgaatcgttcgctggagtagtagtttgttataaagtctgaaaaatcactctcatatgcatcatctttaggtgatgttagaaatcctctgtctctccataccttctcccaattagtcgattctttttttaaggaaaaataaatatgtattgccaaaaggatagccaaaattggtgttagctctaaaaaatagaatgttatggaataaataatactgccatgttcaaactcatctgggactatcatgtatgcacaaaaataaattgaaaagtacaccatgcagatagttagcaattctttagtatcttttctgctcacaccaaccctccctttagcgttgtttagaatggcaatcatcatatatccaagacatggcatttggtacatagcttgggtcgggatttcaaatccgcccccgttgatggggtcgttacagtacgcgcatatccgctttatgtgaaacaggaagatttttctgatatcactgccacagcaaaacaccaatttcgagacaagtacgcgcgcgaggggtatcagttgcaaaaagttttgcaactgcgtccgactagtacgcgcacgatggcgggggataccataaaagtgttctctacatgagacagagtggtggtgatgtgttgattatcggcgtatatgcgcacaggacgcgctatgacgatgttttatgcgggtacaccaatcacatgtatctggtgtgataaatcgcgttacatgacctctctgttgtgctggtggttatcacgacgttctgaatctggcttttgtctgatattttgcgacaagtacgtgcgcgtagcatcgacagcatacacattggatattcattttgtgaccaatgcgataagtagcgggataagcattgataaaatcaacaggccgatgatccacttttgattttcactggccttatctctattttcatcaatcttatcaataattcgacgctccaagccgtgcatatcaccgcgaatggcaatcatctcattgcgaacatccgagaagtggttggcttgatgttcaatgtgtggcgttctgcctttcattcctgatcctcacctatcgtcaccacctgctggtgtataaaggtattggcccaagcagctttccaatgggcactcatgtttatacgctgaccttacaatcaatcaccgcttttaacttttcagcattgcttccctgacgcttccacgcgctgtaaatatctttatcccacgctttaccagcttttgtttgatagcctgcttcattgatccgttcagctatcacacgcccattatcaaatccctgtcggatggtatcggcaatgatctttataactgccgtttcgttatatggctttggtgggatgttcggctttccggcaataagcgacgcagcagctttttccatgcgctccaccagcccaagcattcgtgaatcaatagacttttccggctgtcccagcttcatgcgaatcgcatcaacaagccaggaggttttatcccctccagaagcgagaacagaccgattaaactcatcctgcaattcagatgggatgcggaacgcgaccagattagatttgctcattgcaaagaccatatcagtgagtaatatccatacagtataccactgtataacactgttatacgctcaaatatcagccagaaaataacgggccaatcacaaagctatcgctgtgttgttggttcagagctgggctgtgttggttcaaaatgagttgatgttggttcaatatttcagaaaaaacacaataaaaacaacgatctttacaaattgaaccaactgaaccaactgaaccaacacctttttgcttatctatataatctgagaggcagaaatgataagggacaggaaagctgaagagctggagtcaaaagggctataccggagagctgccgcacgatgggcagaagtcatgatgctggcagatggcgataaagaacgtgaacatgcagcaaacagacgctctgaatgtatccgtaaggcggcacgcccaccagcaactacagacagattcggagatttaagacaggcagttaagcggactcattcggctcttggtatggatgaggaagcgagagggtacttcaggcgttatcgcgataaagattgccagagacagtaatgctctctctgttttggcaaattacccctcactttgaagggatcggagctataaaaatggttttaggtacattcctcaaattgaggattgtgggaaaaccaatgagttaggcttttcccccaatgggggttttcgaaagaatcaatgggttagtccatcgtgcaaatttgcaccctgccagccaacgcaatttctcgttggcgaaaatatcaggtatttactgaacgaacggtctaccagtctgttcagttaccagttgcatatggctgtttcatgtgagaacggaggttttttcggacatcactattgggtacagcaatttcacgagcaatacgcgcgcgcaggacaacaagcctgaacatggttacacacctcgatcgtgagggatgtaggcaatggcttctgaccaaagcacccgaaaaaaccgtgtacataagggtgtacataatcaaaaatcgcattaggaagaaaccagctaaaatgcggcattgaagccaatactctacaaacagattcaagaataactcgtaacgccaattcttacttttccgccttcacaaatgccgccactcaaacagagcggcatttttcttccccgcaacattcaattctgttttgcgtgcctgctccagattttgcgatgtttttttgcccagcacactgagaacgtgagatactcacaactgtatataaatacagttacagatttactttctttgcaattgatatcacatggagtgggcaatgaacgaacatcatcaaccttttgaagagataaaactgattaatgcaaacggagcagaacaatggtcagcaagacaacttgggaaactactgggttattcagagtatcgtcactttatacctgtattaacgcgcgccaaagaagcctgtgagaacagtggtcacacaattgatgaccatttcgaggagatcctcgatatggtcaaaattggctcaaatgccaaaagagcattaaaagacatcgtactctcccgctatgcctgttacctggtagtacaaaacggcgaccctgcgaaaccggtcattgcggcagggcagacttattttgctatccagacccgacggcaggagcttgctgacgatgaagcatttaagcaacttcgtgaagacgaaaagcgtctgtttctgagaaatgagttgaaagaacataacaaacaattggttgaggcagcacagcaagctggggtagcgacagctattgatttcgccatatttcagaatcatggttaccaggggctgtatggtggattagatcagaaagctattcatcagcggaaggggctgaaaaagaatcagaagatcctggatcatatgggttcaacagaactggcggctaatctctttcgagctacccaaacagaagaaaaactcaagcgggatggcgtgaattcaaaacagcaagctaataccacacactttgacgtgggtagcaaggtgatgcaaaccattcaggaacttggcggaaccatgcctgaggagttgccgaccccgcaggtcagcatcaagcagttggaaaacagtgtaaaaattacagagaagaaatagcagaaactaaaaactctttttgttgattgagatacccgatgcgtaagccaaagtccaggtgcggtgaacacaatggctaaacattgcacctttcttttccacccctcaattttaacctattttttcttatgcattttctcagacaagaagtcagaagaatgcatctacgctacagaaaatagcgatttcacataactacaagttatcaatttcctctcaccttaaaaaatctcaatcgtgacaatacgcacaaatcgctaccctgccagacagatttttagggagagaaccatgctgttacacattttgtatttggttggcattactgccgaagccatgacgggggctctggcggccgggcgacgccgcatggatacatttggcgtaattattattgcgaccgccaccgcaattggcggagggtcagtgcgcgatattctgctgggccactatccgctcggctgggtcaaacacccggaatatgtgattatcgtcgctaccgccgcagtactcaccactatcgttgctcctgtaatgccttacctgcgcaaagtgtttctggtgctcgatgcgcttggactggtggtcttttctatcatcggcgcacaggttgcactggatatggggcacggcccaattattgccgttgtcgcggcggtaaccaccggcgtgtttggcggcgttttgcgcgatatgttctgtaaacgtatcccactggtattccagaaagagttgtatgccggtgtctcatttgcctccgccgtgctgtacatcgcgctgcaacactatgtttctaaccatgatgtggtaattatctccaccctggtattcggcttttttgcccgcttactggcgctacgccttaagctgggattaccggtcttttactacagccacgaaggacactaaggttcaaaacctgtgatctgctgggcagccagccaactgcccagcttcttgatttgcgcattttccttccattcaataacctgtctggcgcgtcccgatccagtccccggcagctgctgccagaactgctccgtgctaaataaaagttgcgaccaggaccgttcatcactggcattaagcgccgcccgggttagcggtattcccattgccatcacccagcgagtaaaaggctgcttacgagccagattaaactgatgccatagctgcgcacttttacttttcgcgatccccggcgtgttctgtaattgctctggcgttaataaaagccaggaaaagatatgttcaaagcgatgagtctgatgcagcgcgcgccaaccggcctcaccaatgccatccagcccaagaacctgttttgcccccagccagactaagcgtgaaatgaactgttcctgacaaacatcagaagcaaagtagcaggtcaacgagttaaagcggttttctggcggtgtcggttttgtacgttctgcaccgcgccacaccacatcatcaatgcgaggaataccctgaccggcaaggctgacgagaatctgatcaccaggcgcaatatcccactcctgccagcgcctgacggaaccaatattcacccgctggacttttttatcatccagcatgacaggtgcgagtgacgcaaccaccgatattttaccgctcttacccaccgcaaactgaattgccttcacttcggcaacctgagctacaggttgatatttccaggccaccagccactctgcctggcccggtagccaatggcgggattctggctctttcgccgctcgtacaactacgccatcggtgacgaagggtaattccgctttccaccactcattgcgtacgcgcgcaacttcatcagcatttttcaccgcacgggtatacgtctgcgttagagtaaaacctgcggtagccagctcttttaaacgatcagacattaactgcggtccatccggccatgcccagacaaaaacgcccagagaattcagcgtgtcgctatcgtcctggcgcatcatcaagccagcaacttttgcgcgggcatttattccccccatttgttgttggatatgcccctcgcgctggagaaatatttccccctgaagcgtactgttggctaaaggcccgctaacggtttgcggcacagcggaaattaagctaactttctgcgtccagtcctcgcctttcaggccattaccgcgactgattgctttgttcagtttcccgtcccgataaaccagggttaccgcaacgccatcaacttttggctgcacccaaagatcgctacgttctcgcatccacagacttaatgcgtttttatccaccattttgcgtacacccgtatgggcaaccggatgcataaccgcaccatttaaaggcggcatcatcacgtcgcggggctcgctcccaaagcagcgttgccactgcgtaagacgggcgcttaactgatcgtaaacaccgtcttccacctcactttttccttccttccagtagtcatcgtcccactgttttatttgctgttgcaggcgggaaatttcttcctgtgctctggctggcgaccaggccggacagaccgcccacacagatgattgccagcacaagatacctattaatatcgccatccatactttcatcatcacctccgctgtagatagtcaggcagatatacaacgtgatgaaagcaaagccgagtggcaaaaacggagtctgcgaggacgcttcctgaaaatcgtctttattgcagtgaatgacaggcaaatgcggaagcagctacgcaaaacgcaacaactttgcgcaaaaagtgtgagcaagggctacgtcacatggccgcgccgtgtataataagctcgtatgtaggctttatttcgctaatcacatacgaaagatactcatggctcaaggcacgctttatattgtttctgcccccagtggcgcgggtaaatccagcctgattcaggctttattaaaaacccaaccgttgtatgacacccaggtttctgtttcacacaccacacgccaaccgcgtcctggtgaagtccacggtgaacattatttctttgttaatcatgatgaatttaaagaaatgattagcagagatgcgttcctcgaacacgcagaagtttttggtaattactatggcacttcgcgtgaggccattgagcaagtactggcgaccggtgtcgatgtttttctcgatatcgactggcagggcgcgcagcaaattcgccagaagatgccgcacgcgcggagtatctttattttaccgccgtccaaaattgaactggaccgccgtctacgcggtcgcggtcaggacagcgaagaggtcattgcaaagcgtatggcgcaagctgttgcagaaatgagccattacgccgaatatgattatctgattgtgaatgatgacttcgataccgcgttgaccgatttgaagaccattattcgcgccgaacgtctgcgcatgagccgccaaaagcagcgtcatgacgctttaatcagcaaattgttggcagactgaacctgatttcagtatcatgcccagtcatttcttcacctgtggagctttttaagtatggcacgcgtaactgttcaggacgctgtagagaaaattggtaaccgttttgacctggtactggtcgccgcgcgtcgcgctcgtcagatgcaggtaggcggaaaggatccgctggtaccggaagaaaacgataaaaccactgtaatcgcgctgcgcgaaatcgaagaaggtctgatcaacaaccagatcctcgacgttcgcgaacgccaggaacagcaagagcaggaagccgctgaattacaagccgttaccgctattgctgaaggtcgtcgttaatcacaaagcgggtcgcccttgtatctgtttgaaagcctgaatcaactgattcaaacctacctgccggaagaccaaatcaagcgtctgcggcaggcgtatctcgttgcacgtgatgctcacgaggggcaaacacgttcaagcggtgaaccctatatcacgcacccggtagcggttgcctgcattctggccgagatgaaactcgactatgaaacgctgatggcggcgctgctgcatgacgtgattgaagatactcccgccacctaccaggatatggaacagctttttggtaaaagcgtcgccgagctggtagagggggtgtcgaaacttgataaactcaagttccgcgataagaaagaggcgcaggccgaaaactttcgcaagatgattatggcgatggtgcaggatatccgcgtcatcctcatcaaacttgccgaccgtacccacaacatgcgcacgctgggctcacttcgcccggacaaacgtcgccgcatcgcccgtgaaactctcgaaatttatagcccgctggcgcaccgtttaggtatccaccacattaaaaccgaactcgaagagctgggttttgaggcgctgtatcccaaccgttatcgcgtaatcaaagaagtggtgaaagccgcgcgcggcaaccgtaaagagatgatccagaagattctttctgaaatcgaagggcgtttgcaggaagcgggaataccgtgccgcgtcagtggtcgcgagaagcatctttattcgatttactgcaaaatggtgctcaaagagcagcgttttcactcgatcatggacatctacgctttccgcgtgatcgtcaatgattctgacacctgttatcgcgtgctgggccagatgcacagcctgtacaagccgcgtccgggccgcgtgaaagactatatcgccattccaaaagcgaacggctatcagtctttgcacacctcgatgatcggcccgcacggtgtgccggttgaggtccagatccgtaccgaagatatggaccagatggcggagatgggtgttgccgcgcactgggcttataaagagcacggcgaaaccagtactaccgcacaaatccgcgcccagcgctggatgcaaagcctgctggagctgcaacagagcgccggtagttcgtttgaatttatcgagagcgttaaatccgatctcttcccggatgagatttacgttttcacaccggaagggcgcattgtcgagctgcctgccggtgcaacgcccgtcgacttcgcttatgcagtgcataccgatatcggtcatgcctgcgtgggcgcacgcgttgaccgccagccttacccgctgtcgcagccgcttaccagcggtcaaaccgttgaaatcattaccgctccgggcgctcgcccgaatgccgcttggctgaactttgtcgttagctcgaaagcgcgcgccaaaattcgtcagttgctgaaaaacctcaagcgtgatgattctgtaagcctgggccgtcgtctgctcaaccatgctttgggtggtagccgtaagctgaatgaaatcccgcaggaaaatattcagcgcgagctggatcgcatgaagctggcaacgcttgacgatctgctggcagaaatcggacttggtaacgcaatgagcgtggtggtcgcgaaaaatctgcaacatggggacgcctccattccaccggcaacccaaagccacggacatctgcccattaaaggtgccgatggcgtgctgatcacctttgcgaaatgctgccgccctattcctggcgacccgattatcgcccacgtcagccccggtaaaggtctggtgatccaccatgaatcctgccgtaatatccgtggctaccagaaagagccagagaagtttatggctgtggaatgggataaagagacggcgcaggagttcatcaccgaaatcaaggtggagatgttcaatcatcagggtgcgctggcaaacctgacggcggcaattaacaccacgacttcgaatattcaaagtttgaatacggaagagaaagatggtcgcgtctacagcgcctttattcgtctgaccgctcgtgaccgtgtgcatctggcgaatatcatgcgcaaaatccgcgtgatgccagacgtgattaaagtcacccgaaaccgaaattaatgttttatgaacccaacacgttatgcacgcatctgcgaaatgctcgccaggcggcagcctgatctgaccgtctgcatggagcaggtccacaaacctcataacgtttctgcgattattcgtaccgcagatgccgttggcgtacatgaagttcacgccgtctggcctggtagccgcatgcgcaccatggcttcggcagcggcgggtagtaacagctgggtacaggtgaaaacacaccgcaccattggcgatgccgtcgctcatctcaaaggccagggcatgcagattctggcaacccatctttctgataacgctgtcgatttccgcgaaattgattacactcgcccgacctgcattttgatgggacaggagaaaacgggcatcacgcaggaagcattggccctggcggatcaggacatcatcattccgatgatcggcatggtgcagtcgctgaatgtttccgttgcctcagccctcattctttacgaagcccagcgtcagcggcaaaatgcaggcatgtacctgcgtgaaaacagcatgttgccggaagcagagcaacaacgcctgttgtttgaaggcggctatccggtgctggcgaaagtcgcaaaacgcaaaggcctgccttatccccacgtcaatcagcaaggcgagatcgaagctgatgccgactggtgggctactatgcaggctgcagggtaagtgccatgaaaggtcgcctgttagatgctgtcccactcagttccctaacgggcgttggcgcagcacttagtaacaaactggcgaaaatcaacctgcataccgtgcaggatctactcttacaccttcccctgcgctacgaagatcgcacccatctctaccccatcggagaactactgccgggcgtttatgccacggtggaaggcgaagtgctgaactgcaatatctccttcggcggtcggcggatgatgacctgccagatcagcgacggttccggcatcctcaccatgcgctttttcaatttcagcgcggcaatgaaaaatagcctggcggcgggccgccgtgtactggcttatggcgaagcaaagcgcggtaaatatggtgcggagatgatccacccggaataccgcgtgcagggcgatctcagcacgccagaattacaggaaacgctcacgccggtttatccaacaacggaaggcgtaaagcaggccacgctgcgtaaattaaccgaccaggcgctggatctgctcgacacctgcgccattgaagaactcctgccgccggaactgtcacaaggaatgatgacgctaccggaagcgttgcgcactttgcaccgcccgccaccgacgctacagcttagcgatctggaaaccgggcagcatccggcgcaacgtcgtctgattctggaagaactgctggcgcacaacctcagcatgttagccttacgtgccggagcacagcgttttcatgcccagccgctgagcgccaatgacacgctgaaaaataaactcctcgccgccttaccgttcaagccaacgggcgcacaggcacgcgtagtggcggagatcgagcgcgatatggcgctggatgtgccgatgatgcgtctggtgcagggcgatgtaggttccggtaaaacgctggtcgccgccctcgccgcgttgcgtgcgattgcccacggcaaacaggtagcattgatggcaccaaccgaattactcgccgagcagcacgccaataacttccgcaactggtttgcaccgctcggtatcgaagtgggctggctcgccggtaagcagaaaggtaaagcacggctggcacagcaggaagccatcgccagcggtcaggtgcagatgattgtcggtacacacgccatcttccaggaacaggtgcagtttaacggcctggcgctggtgattatcgacgaacagcatcgttttggcgtgcatcagcgtctggcattgtgggagaaaggccagcagcagggcttccatccgcatcagttgatcatgaccgccacgccgatcccccgcacgctggcaatgactgcgtatgccgatctcgatacctcggtgatagatgagctgccgccaggccgcacgccagtgactacggtcgctattcctgatacccgccgtaccgacatcattgaccgcgtgcaccacgcctgcataactgaaggtcgtcaggcatactgggtttgtacgttgattgaagagtcggaattgctggaagcgcaggcggcggaagctacctgggaagagttgaaactggcgctaccagagttgaacgttggcctggtacacgggcggatgaaacctgccgagaaacaggcggtgatggcgtcgtttaaacaaggtgagctacacctgctggttgccacaaccgttattgaagtcggcgttgatgtgcctaacgccagtctgatgattatcgaaaacccggagcgtctgggtctggcgcagttacaccagctgcgcgggcgcgtaggtcgtggcgcggtggcttctcactgcgtgctgctctacaaaacgccgctttctaaaacggcgcaaattcgcctgcaagtgctgcgcgacagtaacgacggttttgtgattgcgcaaaaagatctggagattcgcggccctggcgaattgttaggcacgcgtcagacgggtaatgctgaatttaaagtggcggatttactgcgcgatcaggcgatgatcccggaagttcagcgcctggcacgccatattcacgaacgttacccacaacaggcaaaagccctgatagaacgctggatgccggagacggaacgttactcgaatgcgtaaaaggcggcagtgagaagaccgccatttcaggttaccctaccttcctgccggatgcgattcatcaccctacaaattcaataaattatgaatcaatacgcaggcttgataagcgaagcgtatcaggcatttgtctttgttgcggcggcacttctaccgccgcttcatcggttaaccggcaaaaatcggcaacatcaaatacaacttaattaccagcgcattgacgatatcgataaagaacgcaccgaccatcggcaccaccaaaaacgccatgtgcgacgggccaaagcgttcagtgatcgcctgcatgttggcgattgccgttggcgttgcaccgaggccaaaaccacagtgacccgcagccagcactgccgcatcgtagtttttgcccatcatgcgccaggtaacgaagatggcatacaacgccatgaagatggtctgtaccaccagaatcgccagcatcggcagcgccagcgaagccagctcccacagtttcagccccatcaacgccatcgccaggaacaacgacaagcttacgttacccagcacggataccgcacgctcaaagacgcggtaaaagcccattattgacagaccgttgctcagaatcacgccaacaaacagtacacagacgaaggtcggcagttcaaaagcagtgccagccaaaagttgcgcaacaattttccccaccgtcaggcagatagcaatcagcgcgatagtttcaatcagcaccaacgaggtgatcatgcgtcccacatccggcttttcaaacgccgtcgggacttcctggtcatccggaataccgttcggcgtggtggagtgtttcaccagatagcgcgccaccggaccgccaatcaagccgcccagcaccagaccgaacgttgcacaggccatcgccacttccgtcgcattggtgaagccataacgttcaatgaacaatttactccacgcagcgcccgtaccgtgaccgccggaaagcgtaatagaaccggccaacagccccatcagcggatcaagccctaacaagctagccataccaatgccaatggcattttgcatcaccaacagaccaacaaccacaatcaagaagatgccaaccacacgcccaccggcacgcaaactggcaatgttggcgttcaggccaatggtggcgaagaaagccagcattaacggatcgcgcagggacatatcaaagttgacttcccagcccatgctttttttcagtactagtagcgccagcgccaccaacaaaccacccgcaacaggttccggtatggtgtatttcttcaaaaaggagacggaatggaccaacttacgcccgagcagcaacgtcagcgttgcggcaacaagcgttgctaaagtatcgagatgaaacatagttactcctttgtatccgcatcactctttcatactcgtcatacttcatcgcgcagtggcaacttcatgaactatgacgggtatcgagttatgctttcctgggtcaaattctcagctgttaatgaacaaatggcatggattttaagcagaaaaataccaaaagttatataaaaaagtgcatttatctcatttaaatatttagatgaggatgtggcaaacgtttgcttttctctttcggtcagctaaaatgcccgctttgctaccacgggattgttttcgatgtctgtttccaccctcgagtcagaaaatgcgcaaccggttgcgcagactcaaaacagcgaactgatttaccgtcttgaagatcgtccgccgcttcctcaaaccctgtttgccgcctgtcagcatctgctggcgatgttcgttgcggtgatcacgccagcgctattaatctgccaggcgctgggtttaccggcacaagacacgcaacacattattagtatgtcgctgtttgcctccggtgtggcatcgattattcaaattaaggcctggggtccggttggctccgggctgttgtctattcagggcaccagcttcaactttgttgccccgctgattatgggcggtaccgcgctgaaaaccggtggtgctgatgttcctaccatgatggcggctttgttcggcacgttgatgctggcaagttgcaccgagatggtgatctcccgcgttctgcatctggcgcgccgcattattacgccgctggtttctggcgttgtggtgatgattatcggcctgtcgctaattcaggttgggttaacgtccattggcggcggttacgcagccatgagcgataacaccttcggcgcaccgaaaaatctgctgctggcaggcgtggtcttagccttaattatcctgcttaaccgtcaacgtaacccttacttacgcgtggcctcactggtaattgcgatggcggccggatatgcgctggcgtggtttatgggcatgttgccagaaagcaacgaacctatgacgcaagaactgattatggtgccaacgccgctctattacggtcttggcattgaatggagtctgctgctgccgctgatgctggtctttatgatcacttcgctggaaaccattggcgatatcacggcgacctctgacgtttccgaacagccagtgtccggtccgctgtacatgaaacgcctgaaaggcggcgtgctggcaaacggcctgaactcgtttgtttcggcggtgtttaacaccttcccgaactcctgcttcgggcaaaacaacggagtgatccagttgactggtgttgccagccgctatgtcggttttgtcgtcgcgctgatgttgatcgtgctgggtctgttcccggcagtgagcggttttgtacaacacattccagaaccggttctgggcggcgcaacgcttgtaatgtttggcaccatcgccgcctccggtgtgcgtatcgtttctcgtgagccgctgaaccgtcgggcgattctgattatcgcgctgtcgctggcggttggtctgggcgtgtctcagcagccgctgattttgcagtttgcccctgaatggctgaaaaacctgctctcctccgggatcgccgcgggcggtattactgccatcgtgctgaatctgattttcccaccagaaaaacagtaattcactggcggcggtaagataattaccgccgcagtctcacctctttaaccattcccgccttgaggattgcgcgtaaatcgtgcataactcccttatgtgcatttcacgggatggaagaccatgaaatttattgggaagctgcttctctacattctcatcgctctgttagtggcgatcgctggcctctattttcttctgcaaacccgctggggagcagaacatatcagcgcatgggtttccgagaatagcgactatcatctggccttcggggcgatggatcaccgtttttccgcgccatctcatatcgtgctggagaacgtcacgtttggtcgtgatggccagcccgcgaccctggtggccaaaagtgtcgacattgcgctaagcagtcggcaactgaccgaaccacgccatgtcgataccatcctgctggaaaacgggacgctgaatctcaccgaccagaccgcgccgctaccgttcaaagccgatcgtctgcaactgcgtgatatggcgtttaatagcccgaatagcgaatggaaactgagcgcgcagcgggtaaatggcggcgtagttccgtggtcaccaaaagccggtaaagtgctgggtacgaaggcgcagattcagtttagtgccggatcgctttcgctcaatgatgttcctgccaccaatgtactgattgaaggcagtattgataacgatcgcgttacgctgactaacctgggtgccgacatcgcccgcgggacattaaccggaaacgcgcagcgtaacgccgacggcagctggcaagtggaaaacctgcgcatggcggatatacgtctacaaagcgaaaaatcgctaaccgacttctttgcgccattacgctctgtcccgtcgttgcagattggtcgcctggaagtgatcgatgctcgtttgcaaggtccggactgggcggtgaccgacctcgatctcagcttgcgcaacatgaccttcagtaaagatgactggcagacacaggaaggcaaactgtcgatgaacgctagcgagttcatttatggttcgctgcatttatttgacccgattataaacacggaattttccccgcagggcgtagcgctgcgccagttcaccagccgctgggaagggggtatggtcagaacgtcagggaattggctgcgtgacgggaaaacgttgatccttgatgatgcggcaattgccgggctggaatataccttgccgaaaaactggcaacagttgtggatggaaacgacacccggttggttaaacagcctgcaactgaagagatttagcgccagccgcaatctgatcattgatatcgaccctgacttcccgtggcagctcaccgcgctcgatggttacggtgccaacctgacgctggttaccgatcataaatggggcgtctggagtggctcggcgaatctgaatgccgccgccgcgacattcaatcgtgttgatgttcgtcgcccgtcgctggcgctgaccgccaacagcagcacggtgaatatcagcgaactgagtgcatttactgaaaaaggcattctggaagccaccgccagtgtttcacaaacgccacaacgtcagacacatatcagcctgaatggacgcggtgtgccggtgaatattttgcaacagtggggatggcctgaattaccgttgactggcgacggcaatattcagcttaccgccagtggcgatattcaggccaatgtcccgttgaaacctacggttagcgggcaattgcatgccgtgaacgccgcaaagcagcaagtgactcaaaccatgaatgctggcatcgtttccagcggtgaagttacatcgacggagccggtgcggtaaacatcaatctcgccgggtacgactcagacgtacccggcattccatcaatagattacaacgtaattgtcagcgcattcccttgaggcttcaccaccagcccctgctcactttcagcctgcgaaccgtcttgcagaccatttactttcacaacattgcgcaggcacagtgtccagttcttcgcctcgcccgcaccagtcacagtaatcgtgttgccagtacgtgctgcttttaaagtaaagatcaccgatccgtcagcagcgggcacttcacagacggcttcatgcccgtcttgcagattaaagaggtggaatgccgtgccttcgtgccacacgtaatcgggacgttgatcgttgttgcccagcgccagtagagtgttatcacgcacataaacgggcagactcaggaagccgtgctgctgtttatgccagcgactaccgtcgagttcatcgttgtgccacaggtgtgtccagcgaccttccggcaggtagaactgcacatcgcccgcttcagtgaacaccggcgcaaccatcacgttgtcgcctaacatgtattgacggtcaaggtaatcacaagccggatcgtccgggaactccatcatcatggcccgcatcatcggcgtaccccgcgcgttcgcacgcgcagcttcacgatacagatacggcatcatgcggcatttcagttgcgtgaagaagcgcaccacatcacaggactcatcatcgtaggcccacggcacacgataagatttgctaccgtgtaaacggctatggctggagagcaaaccaaacgcgcaccagcgtttgtaaacgtgcgccggagcggtattttcaaagccgccgatatcgtggctccagaagccaaaacctgaaaggccaatagacaaaccaccgcgcaggctttccgccattgattcgtagttagcgtaacaatcgccaccccagtgtaccgggaatttctgcgcaccgacggaggccgagcgggcaaacaagacagcttcttcctcaccaacggtgtccttgagcacgttccacaccagttcgttgtagatgtacgcataatggttatgcattttctgcggatcggaaccgtcaaaccactgaacatcagttgggatacgttcgccaaagtcggtcttaaagcaatcaacgcccatcgcgaccagacctttcagtttgtcggcgtaccatttgcaggcatccggattggtaaagtcataaatcgccagacctggctgccatttatcccactgccatagcgaaccgtccgggcgtttgagtaaatagcctttctcttgtaactctttaaagacgggggatttttgaccgatataggggttaatccagacgcagattttcagtcctttcgctttcaggcggcggatcatcccttccgggtcagggaaagtcagcgggtcccactcaaaatcgcaccactggaaggctttcatccagaaacagtcaaagtggaaaacatgcagcggcagattgcgttccgccataccatcgataaagctgtttaccgtcgcttcgtcgtagttggtggtaaatgaagtggttagccacaggccgaaggaccacgcgggcggcagcgccggacgaccagtaaagcgggtataacgatcaagtaccgctttcggcgtcgggccgtcgataacaaagtattcgagatattcactctcaacgctgaactgcactttggagactttctccgatcccacttcaaaagagacacactggggatgattgaccagtaccccataaccacggttagtcatgtagaacgggatatttttatacgcctgttcagtacttgtgccgccgtcccggttccaggtctctaccgtctggccattgcgcaccagggcagtaaagcgctctcccagaccgtaaactgtttcgccaacgccaagatcaagccgctcaaacatataattgcgttgattattcgtgtcctgcacgtagccattatttttcacctgactaccggtaatacgttcgccgttgcgcagaaaatccagtgaccagaactcacctttgctgacacgcgcgcttaagttgccacttttaaactcagcataacgttctgtgttttcgattgtgaccttcacgtcctgcaaaatattgagcggataatgaggaccgttattcagcgccccctgaaaatgctcaatccgcacaccgacaataccttcctgtggggagaaaaagcgcaacgtaaataaaggcgtatcaagctgccaggtacgttcacgcacatcacggggggcagcatagaccaccatttcattatcctgctgttcaacctcgaacacctgaagcgggtgaatcaaattgaggccaggttgaatcaaccagtttccatcgctaattttcattgccgttccttagttctgcacttcttgagaggtgaattgttgctggcaacggcgtttaccctgagccagctgttccataacggttttcagattgtgcgtcgtgagtgagtagtagcgtttagcgataatcgcgctcagcaaataacagatcgccggaacaatcgtgaatagcgcaataatgatgctaatcgtggcgctgttctgcgctttttctgccgcatcatatccgccataagccagcatccagccgataagagcgccgccgaaggccaaccccagtttgagcacaaacagcgtgccagcaaaactgatcccggtcaggcgtttaccattgcaccactcgccgtagtcgacggtatcggacatcattacccactggataggtgtcaccagttgatgcaacacaccaatcacgaagatgaagacaaacatagtgatgctggcctgcatgggaacaaagaacatcgcgaggctaatcactgccagcagggcgttcgtccaccagaagatagtgactttacatttccagtcggtcagaggttttgccagtgcggaaccaatcaggttacccacgcaataagtggtgagaaaagcgacaaacacttccggcgtgcccaaaatccatgtgacgtaatacatcatcgccccaccgcgtacgcacaccgccaggatattgaaaatggttagtaaaccgacaatccgccactggtcgttttgccagatatcacgtaaatcttcccgcatagacgttgttgtaggtggtgcttcaacgcgttctttagtggtgaagaaacaaaatgccagcatcatgaatgccaccacggaaaggaccgcgataccgccctggaaaccgagtggtttattatcaccgccaattaaattaaccagtggcatcatcagaacagtagaaagcatgcctcccgcggtcgccagcacaaaacgccaggattgcagcgagatagctgagtcgggtcattggtgattacaccacccaatgcgcagtaagggatattgacgacggtataaagtaaggtaagtaggatgtaagtaattgctgcatagatcattttgccgttcatactgagatctggcgtgctataggccagtacacagacgatcccgaatggcagtgcgccaaacagtacccacggacgaaatttaccccagcgagagcgcgttcgatcggccaacaaccccatgcaaggatcggaaatcgcatccagtgcacgagcgaccaaaaacatggttccgacaaaaccggcaggaatgccaaaaatatcggtataaaagaacatcatatataacattacgttatcgaaaataatgtggctggcggcgtctcccatgccataaccaattttctctttaacggacaacacttcactcttcatctgcttttccttgatgctataggggtgctgagaccgataacgcattttgtaaaccatccctgtgagagcgaatattccgatatctggttattaatttatgattcttgttttatgtgatcgtggtagcgttaattccgctcatatatcattgtaaaatatgggttttatatgaactataatgctttcgtgataatacgctgcgtgtattaggcggaaaaaactgatctgggggatgtagaaactcaaggaagtagctataatgcgccccgcctccatgtagcaatcgaggcgcggaagatcgtcgtctccggtgaggcggctggacttcaaatccagttggggccgccagcggtcccgggcaggttcgactcctgtgatcttccgccaaaatgcctctcctgacgttctccaaccccttgtaatactgtcaatccagatattttctactgctcaatattcaatcggcttcaggaatacctggtctaaggttttgtgatggacgatgagcggctgaagaatccgcctgtcggttcttctgtcctcgaacgcatccgcgatattcacgccagtatgcgccgtgtttatttgcaggtgatttgcccccctgctgactctcagccaactgtatcgccattaaggtgaagatgttgttttactcgccccagaacacccttttttatacgactattctatttctttaaccgctggcgaaaaaaactgactataaacttcaccaataatcagactgccatcaagattaatttgttcatttaatatatcaaatcaacttgttttatttttactataaaaaatagctcattgccttactataattaatatataaattcggtaattaattcttaacatgcttttactaataatctcaattgctggccctataatattgcgctagcattgctttctggttgtatcagcgatactcaaaaattcttaatacaatactcattcgactggtacttatttgtaactcagttatattttttcgcccggtgattcagaagaatgcaaaaaacggctaccactccatcaaaaatacttgatctcactgccgcggcatttttacttgtcgcctttctgacgggtattgcgggcgctcttcagactcctaccctaagtatattcctcgcagatgaactgaaagcccgtcctataatggtaggttttttcttcaccggtagcgctattatgggaattctggtcagtcaatttctggcaaggcactccgataaacaaggcgaccgtaaattactgattctgctatgttgcttatttggagtgctggcctgcacgctttttgcgtggaatcgcaactacttcattctcctctcaacgggcgtacttctgagtagttttgcttccaccgcaaacccgcaaatgttcgccctcgcccgtgaacacgccgacagaacaggccgtgagacggtcatgttcagtacatttttacgtgctcagatctcgcttgcctgggttatcgggccaccgctcgcttatgaactggcaatgggatttagttttaaagtgatgtatctcaccgctgccatcgcatttgttgtttgcggactgatagtctggttgtttttgccatcaatacaaagaaatattcctgtcgttacccaacccgtagaaattttaccctccacccacaggaagcgggatacgcggctactttttgtggtctgttcaatgatgtgggcggcgaataatctctacatgataaatatgccgctatttattattgatgaactgcatctaaccgataaactggctggagaaatgattggtatcgctgccggtctggaaattccgatgatgttaatcgcaggctattacatgaaacgtattggcaagcgactattaatgctcattgctatcgtgagtggaatgtgtttttacgccagcgtactcatggcgacgactccggcggttgagctggaattgcaaattcttaatgccatcttccttggtattctctgtggtatcggcatgctttattttcaggacttgatgcctgaaaaaataggctctgcgacaacgttatatgcaaatacttcacgcgtcggctggattatcgccggctctgttgacggaattatggttgaaatctggagctaccatgcgttgttctggctggcgatagggatgttgggtattgcgatgatttgcctgctgtttattaaagatatttagctcaccagtctgggctaagaaaaatcggcgtggcgcaaacagagccatcctcgccatttttgctatcatgcctgcatacataaacgacaaaacagtatgcagagggaaaaatgggttccaccagaaaggggatgctgaacgttctgattgccgccgtgttgtggggaagttcaggggtctgcgcgcaatacatcatggagcaaagccagatgtcgtcgcagtttttgactatgacgcgtttgatattcgccggtttgattctactgacgctgtcatttgttcatggcgataaaatcttttctattattaacaatcataaagatgccattagcctgctgattttttccgtggttggcgcgctaactgtacagctcacttttttgctaaccatcgaaaaatcgaacgcagccacggcaacggtgctgcaattcctctcaccgacgattatcgtcgcctggttctcactggtgcgtaaatcgcgcccgggcattctggttttctgcgctattttgacatcgctggtcgggacttttttattggtgacacacggtaatccgacgtcattatcgatctctcctgccgcgttgttctggggcattgcctcggcatttgctgctgcattctataccacctatccctcaacgctaattgcccgctatggcacgttaccagtcgtcggctggagtatgctgattggcggtctgattctgttgcctttttatgccagacaaggaacaaactttgtcgttaacggcagtttgattctggcgtttttttatttggtggtcattggtacgtccctgacatttagtctgtacctgaaaggagcacaattaattggcggtccaaaagccagcattttgagctgtgcagaaccattaagtagcgcgctactctctttgctgttgctggggatcacgttcacattaccggactggctgggaacgctgctgattctgtcatcggtgattttgatttcaatggattcccgtcgccgcgccagaaaaataaatcgtccggcgcggcataagtgagaattaccagccaggcaccgcgccaccgttaaaaatggtttctgccgctttagcgacttcgggtgattgataagattgcagaaattccttcacgttttctgcattcttattatcttcccgtgccaccaaaatattcacatacggcgaattcttatcttcaataaatacgctgtcgtgcaccggagaaagcccggtctgctgaatgtaagtggtgctgataatcgctacatcaactttgggatcatccagtacgcgcgggagctgcgccccctcgagttccataatctgcaaatgacgaggattatcggttatatccagcgcggtaggtaataacccttttccctctttcagagtaattagcttctctttttgcaacagtaaaagtgcgcgaccaaggttggtcgggtcgttggggatcgccactgtcgcgccttcttttatttgcgccacggttttgatttttttggaataacccgccatagggaagacaaacgtatttcccaccgctaccagtttataaccatgcgcctgattatcttgttcaagaaagggtcgatgctggaagacattcgcatcaagttcgccatgatttgtcgcatcgttcggtagcaacgaaccgctaaatcctaccagttcaacatcgaggccatatttctcttttgccacctttttagcgacttccgcgacatcttgttctgcgccatttataacgccaactttaatgtgttttgcatcgctgctactctggtcgcaacctgccagcagaattccggccagcaataatgcggcccctgtccgtagatgatgtgttgtcagtttcatttttttatccttttattaatgattacctgactatagcggtaaggtcgctgcggtttaaaaaacgaaacgctatcgataagaataaaaaggaataaaagtggaatataaagtctggcacttcttactgaccacgcaagcgcgtttcgtacagcatgatgagagcgatgaaagcaaactacacttatgcttcattcgatacacatttgtaaaaggttgaatccatgaaaccaacgacactactgcttattttcacttttttcgctatgccaggcatcgtatacgccgagtcgccttttagctcactgcagtccgcaaaagagaaaaccacggtattacaagatttacgtaaaatttgcacgccacaggcgtcattatcagatgaagcgtgggaaaagttaatgttgtcagatgaaaacaataaacaacatatacgcgaggccatcgtggcgatggaacgtaataatcagagcaattattgggaagcgttgggtaaggtagaatgcccggatatgtaagaacagcaacaactactgaccaacgcttctttacctgatatcaggatttcttcattttcacctttgcagtaaccaacaatgcagtcagcaacatcaatgtgccggacaacatcaacggcgaagtcagaccaatattatccagcgcataaccgccgattgccgcgccacaggtattagcaagctgaataaccgccacctgaatagacccggctttttctgcctgatcggccagcgagcgggtgatccacgttgaccagccgacgggaaccaatgcaaaagttagcccccagataatcgccacgccggtagcaacgattttatcgcttccccacaacgtcagtaccaacgcactcacagccagtattaacggcgcgcctgctaaggccagttttaccgaacgtttaagaatgaacgacgaaagcgacgtaccaataaagctggcgataccaaaactcaacagcaccagcgttaagccatccacgccgaatcccgccaggttcatatacaccgggcgaatatacgtgaagaaagcaaactgcccggcgaaagacatgaagatggcgatcatccctgccatcacacccggacgttgtaataagcggaaagtattttgtttctgatgcgagggttcgcctggcagtgaaggcaatgatttgataatccagaaaatacacagcacgcccatcaccgccgccgcattaaagacattgcaccaaccgataagctcgcctaaaaaactgcccaacggcgcggcaatcaccagcgcaatagaaaccgcgccgaagatcaccgacagcgccttcggcaccgtacgcggcggcaccagacgcatggtcagcgacgccgacatcgcccagaacccgcccagcgccagccccagacaggcacgaccgattaaaagcaaactgaatgagttagcaaaggaaaccagcaagcaggagagcgtcagcaaaacggcaaacaaaataacaacgtagcggcggtcagtagcctgaattgtctgggtaataaacaaactggcaaacattgccacaaaggcggtcacggtcaccgattgcccggcaaccccttccgaaatgcctaaatcctgggccattggcgtcaacaaactgacgggcaaaaactcaacgataatcagacaggcgacacaaaacgccaccgagaaaacggctgaccagttcggtcgggtgatggcatccgcgccgcggttttcggcaataaattcactcatggtgttacccgtggcatgtttcaggggaaaagccgaccactttaacattgaaatgtgtgacgcatttaacgtttttgcaacttttacggtgttgcttgagctggagttaagatcgaaacggaacagggcaaagattaccggatgcggcgtgaacgtcttatccacccgacaggtcaggcgcggtctgtaggctgataagacgaaacggtttcaatgcaaccagtgaacgccctcggcaggctgaaagaacgcgttatagcgcatctgaaaagcattaatatcctgcatttcaggttcggtttcgcgcagaaaacctagcgccagcctgacctgagcgtcggtaatcggcgcggcgaggcgagctttttgtaaaatccgatgccattgcagcaggttctgttcgctaccatcgacaatgacaatttgccagatgagcaacacctgcgcggcgttttgcaggtgcgactcatccggacgatgcaaataacgtaaaaattcgtcaccagctgactttcccatttgatcgaccatcgactccacgggtacgacatcgatgttcagccgatcgctgagacggcgaatcgcttttctggccccggatgtcagcacccgaaaaccaaccacaaacactaccgccagcgtggcgagcattatccagatcatgagttctcctgcgtaatcagaactcatgatatctggaaaccctcgccagttactaatccaccagaataatcttcagtgcaaacagagctgcgaccaccaccacacacaggttcagatcgcgccagcgcccggtgcatactttcatgatgcagtacgacataaagccgagtgcaatcccttcggtgatcgagaaagtaaagggcatcatcaccgtggtaataaacgcaggcaccgattcggtaaaatcatcccagttaacgcgcgccaggctcgaagtcatcagcacgccaacaaagattaacgctccggcggttgcgtaaggaggaactatcgccaccagcggtgagaagaacataaccaacaggaacataacgccaaccacaaccgcagtcagccccgtgcggccaccgactgccacaccagaagtactttcaatataggcagtaacagacgaggtgccgataaacgcacccgccaccgaactgacgctatcaacatacagcgccttattcatattggggaatttaccgttaccatctattaagcccgctttatcagttacaccaattaatgttcctgatgaatcaaataggttgatcagcataaaggagaaaatgataccggcgagttcaagtgttaacgcgccgctcaaatctacttcaccaatgacgccgctaatatcaggcggaatggaatagacgccgctaaaatgaacatcaccgaaaaataatccacagcaagacgtcaccacaatagaaaccagcaccgcggcatgaaaatgacgtgatgacaacacggttataataaaaaaccctaaaatacctaacaacacgccgtgagaacttaaatcgccaatcatcaccagcgtgtctttattggcgacaataacgccagtattttttaatcccattaaggcgataaataatccaattccgctggtgataccaatacgtaaacttaagggaatgttggagatcatccagtaccggatacgaaacagcgtgagcaaaaatagtccaactgcgccccagaatattgcgcccatcccggtctgccaggagatgcccatcgcccccacgaccacgaaggcaaagaaggcgttcagccccattgccggagccagcgccacgggtaagttagcaaatatccccatcgcaatactgccgatactggcaatcaaacaggtggtaacaaacaccactttcgggtccatttgtgccgcgccgaggatttgcgggttcacaaaaacgatgtacaccatggttaaaaaagtggtcatccccgcaatcaattctgtgcggacggtggtcccatgctgaggtagtttaaataatcgcgaaagcgtccctgattcattactcacgtaatcggtattgtcattattcatttttttgtccattggaggagatttaatcccttgcttttgtaaaacaaatgacaacaacggttcagtgataattatcacatttcaattgcacattaatggatattctttaataatctcgcgacgtttctttatgataaataataatcaaattgataaaatcaaaatgagaaaaatatgaataattctattaaccataaatttcatcacattagccgggctgaataccaggaattgttagccgtttcccgtggcgacgctgttgccgattatattattgataatgtctctattctcgacctgatcaatggcggagaaatttccggcccaattgtgattaaaggacgttacattgccggtgttggcgcagaatacactgatgctccggctttgcagcggattgatgctcgcggcgcaacggcggtgccagggtttattgatgctcacctgcatattgaatccagcatgatgacgccggtcacttttgaaaccgctaccctgccgcgcggcctgacgactgttatttgcgaccctcatgaaatcgtcaacgtgatgggcgaagccggattcgcctggtttgcccgctgtgccgaacaggcaaggcaaaaccagtacttacaggtcagctcttgcgtacccgccctggaaggctgcgatgttaacggtgccagttttacccttgaacagatgctcgcctggcgggaccatccgcaggttaccggccttgcagaaatgatggactaccctggcgtaattagcgggcagaatgcgctgctcgataaactggatgcatttcgccacctgacgctggacggtcactgcccgggtttgggtggtaaagaacttaacgcctatattactgcgggtattgaaaactgccacgaaagttatcagctggaagaaggacgccggaaattacaactcggcatgtcgttgatgatccgcgaagggtccgctgcccgcaatctcaacgcgctggcaccgttgatcaacgaatttaacagcccgcaatgcatgctctgtaccgatgaccgtaacccgtgggagatcgcccatgaaggacacatcgatgccttaattcgccgcctgatcgaacaacacaatgtgccgctgcatgtggcatatcgcgtcgccagctggtcgacggcgcgccactttggtctgaatcacctcggcttactggcacccggcaagcaggccgatatcgtcctgttgagcgatgcgcgtaaggtcacggtgcagcaggtactggtgaaaggcgagccgattgatgcgcaaaccttacaggcggaagagtcggcgagactggcacaatccgctccgccatatggcaacaccattgcccgccagccagtttccgccagcgactttgccctgcaatttacgcccggaaaacgctatcgggtcattgacgtcatccataacgaattgattacgcactcccactccagcgtctacagcgaaaatggttttgatcgcgatgatgtgagctttattgccgtacttgagcgttacgggcaacggctggctccggcttgtggtttgcttggcggctttggactgaatgaaggtgcgctggctgcgacggtcagccatgacagccataatattgtggtgatcggtcgcagtgccgaagagatggcgctggcggtcaatcaggtgattcaggatggcggcgggctgtgcgtggtacgtaacggccaggtacaaagtcatctgccgttacccattgccgggctgatgagcaccgacacggcgcagtcgctggcggaacaaattgacgccttgaaagccgccgcccgtgaatgcggtccgttacccgatgagccgtttattcagatggcgtttctttctctgccagtgatccccgcgctaaaactaaccagtcaggggctatttgatggcgagaagtttgccttcactacgctggaagtcacggaataataaaaaaagcccggcgtcatgccgggcaaaagtcaccagttacgtttatgccactgtcaactgctgaatttttttctcgcggcggattttgcgttcttccattaccgccactatcgccatcaggcagatacaaccaatcgcggcgatatccagcgcggcgaaggtgcctgcccagccggtaaggccgaataccggcgtcccatcggcaatcattcccagacctaacttggcaaagctgtcaccaatcaggtaagcaaaggtgcctttaataccatcggcagcgccaatcgcttttttaggtacaaagccaacagcagccacaccaatcaacaattgcgggccaaagaccaggaaacccaacgcaaagagagaagccagatagatatattcgttactggcatgttgatacacaccgagcgtggcgataatcagcgccagcgcgatgcaggccaccaggccacggcgaccgttcgccaggtcagagagccagccccacagcagcgtaccgaccagcgcaccagcttcaaacagcgtaaagccctgaatcgccaccgctttagagagtttcagttcctggaacgcgtatacggttgaccactggtcgataccaatacgtaccacatagaggaaaatgttggcgaagcacagcagccagatcactttgtttttcagcacatactcaacaaagatctgccacttggtcatatcggtagattctgtctctttgtcctcttcgctgatctcctcgccgaacagttcttcagctttgccgaggccataagattccggggagtcgctgccgtaacgcaggccgataaaaccgacaatcagcgcgataatcgacgggaagataaacatgccgatgacatggccatcgaacaggtaatttgccccgaacagcgccacacctgctgcgcctgcaccgccaaggttgtgagaaatattccagaaaccgaggaatgtcccgcgtttacgacgcggcgtccatttggtgatggtggagtaactgcacgaaccgccggtactctggaaaaagccgcttaaggcgtagaaggcaatcatcaggaacaggctaaccgagccgctgcccatactggcactgaagcccagcatacaaatagcagagaggatcagcatgaacggcaggaattgtttggtgtttttgccgtcggcgtagtaggaaaccagcgttttacccacgccataagtgatggagaaacccaggccgatcatccccagctgcgtcatgctcaacccgtaggtcgaaatcatatcgttctgcgcgatgttaaagttcttgcgaatcaggtacatcgtcaggtagccgataaagaccaccaggtaggattgcatgaacggtttgaaccacattttgcgccgcacttcgagcggaaggtccagggtcggcttgcgaacctggtttaagaaagccagcatgggttactcctgaaatgaatacctgcgtgaggcatgcattgtaaaaatcagcagcaaatcaggcctgagatagcgtccaggcaaaacctggaaaatttcttagttttgccggatatgaagtgaaaaggtgagatgcatcacgcttcgcgcggtgtctgggcgttcaaaaagggcagtaacagcagtgcggaaatcccggcggcgatagagataaccacaaaaaatccgctccagtgccaggtatcgagtactttcgccagcggccaaccagcaagcgacgcccccagataagcaaacaagccgacaaaccccgtcgccgcccctgccgcctctttgtgggaacactctgccgccgccataccgattaacatctgtgggccaaagacaaaaaaaccaatggtgaagaagcaggttgcctgcatcacgtagctggcaaatggcatcagccacagggagccgactgaaagcaaaattccggcggcgaaaatcaaattcatcggccctcggttgccgttaaacaatttgtccgagccccaacccgctaccagcgcaccgataaatccacccagttcaaacatcgtcactgccgtattcgccgtgaccagatcgacgcccagcgtctcggacatatacaaattgccccagtcgttgatcgccgcccggaccacatagaccagcacatagcaaaacgaaagcagccagatatacggattcagcaacacatatttggtgaggatctctttacgcgtcaaccctgccccttcttgttgttgagcaatttccagcgcgtcgtgtcgccattcaccgaccgccggtaaacctaacgcctgcgggcgatcgcgtagccgccagcagagaaaaatccccacgactatcgccatacaaccagcaatcatcatcccggcacgccagccgtaatgcagcgcagccgctgccatcacaatgggaatgagtgcgccgccgacgttatgcgccgtgttccataatgcccaccaaccgccgcgctcggtacgtgaataccaggccgttaacagacgcgcacacaccggtgaaccccagccctggaaaaaggcgttcagcacccagagcacggcaaacgcccatagcgacgtcgagaagccaaacagaatgttgataatgcccgtggcgataagccctatccccataaaataacgggcatttgagcgatcgctgacaatgccggagacaaacttcgacacgccataggtaatgtaaaacagggtcgctaacaggccgatatcgctacggctgagcacgccgttagcaaggatttctggtacggcggcgttaaaacttttccgcgtgaagtaaaacagcgcgtaacccagccagatggtcagcagaatatgccgacgccagtagcgatagcgggcatcaatttcatatttatcagtcattaatggcgcatcggcaggcgctttcagaaacggcaacatcatcaaaccttagacatagcgttgaggtagagaaacgctgacacgcgtgccgtgcagacaggaaatgtgtaatgtgccacccagcgccgttacgcgctcgcgcattccggtgaggccaaaaccttgttgcccggaacccggcggcaaaccgctgccatcgtcttcaataaccagcatcaaccgttcatcctgctgccagccttgcagggtgaccgcgctggcatcagcatgtttcacaatgttgttcagcccttcctggcagacacgaaacagcgtcacgcgctggttttcgcttaacgctgattcatcgattcgccattcgagatggctgacaataccgcgcccttccagctccatttcccgcatcagtgagcggatggcctgctccagggtgagatcatccaactggcgcggacgtaaccgacccaacaaacggcgcaccgcgtcgtaaacgcccagcgatagttgttcgatgagctgcccgctctgcttcacgctggcgttatctgccgccagccgctgaacaatgcccgcctgagtacgaatagcagtgatggtctgaccgatatcatcatgcagctcacgcgccacatcacggcgcacgctctcttcggtttccagcaaccgttcagccagatgctgattgcgcgccagttccttttgcagcgactggttaagttcacgcaaccgctggatgccagcgccaagcaacaaccctgtcagactttgcaccagcagcgagagcaataaatccaccggatgatcgcgccaggtttgactggcgatcagcgcgatggcgttcatcaacgtcgcaatcagcgccccttgccaaccatagtgccaggccagcgcgataatcggcagcgccagacagaatggcgtaaagcgcgacagttcgtccggcaatcccaactggagccagagactgataacaaacagcagcaagtaccagaccagatgtcgcccgcgccagttgattggctgagaaaccagtgacggaccgagcggcagccaggtgttattggcgagatagtgccagaacaccagacatatcggggccagcgtcaggccgccagttaaagtcagcaacagcgcattccacgactctttgccgtgccaaagccagggcagcgactgcaacaacgccgccgccgttaacgccgccccctgtaacagcaaggtgcgccagtcacgctgatggcgatagcgcgagatcagcgctacgggcagtaacgtcagtaaactaccgatcatcaataacggaaaatgggttaaaccgaccgcctgcgttagccagtaaatcagcagccactccgcgcccagcaatacgggccagtatccgcgcgggcattgcagcattagccccagacgcagaccaaacggaaataacagcaccgccatatcagggcgctcaaccagatgcaggctgatactccacaggcaaaaccatgcggcagagaagataaaaaagcaggcaataacggtaattaagcgggagaacaacgtcttcatcaccagccatcaaacatgcggcgcgccagctctacgtcgttactgacgcccagtttttccatcagattggcgcgatggacgtgtaccgttttcggtgacaagcccagttcggcggcaatctctttcaccgccattccttgcgccagtttttccgccacctggcgttcacgtttggttagcgggtcctgacgaccggatgccagtttaatggcaatatccggcgtcagataacagccgcccgtggcaaccgtatgcaccgcagcaatgagttcatccgggctacagcgtttggaaagaaagccgcgtgcccccgcgttaagcgcctgctcaaccagcgcaggactgtcgtgaacggagagcataatcgtcgccatacctttcggcagctggcttagcagctccagaccggagatatcgggcatggagatatcgcaaatacacacctgcacaccgcgccccggcagccccgccagcgcctcgcgccccgaaccaaactcggcaactacctgcaaatcaggttccagccccagcagctgcgcaaagccggagcggacgatgaggtgatcgtctataagggcaacggtgatcatggtcttgtcctggcgggtaaaaaaaatacgcgcttaccttaacgataagcgcgatgttgttcaagccttgagcggttactgaaaaaacaccgcgatcttgttaaacatcgtcggatcggactgattacgctgcactttcacgacatcttccagcttatcgatttggcttatcatctgctccagacgctggtcgtcattgaccagtagccagatatggcttttgtcgctgtcctgaatcggcagacaaagaatgccttcaacgttaaaagcgcggcgggcaaaaaggccacaaacgtgggtcattacgcccggatggttgcgaacggtgagctccagaattacgttgtcatgagttgtgttttgcatggcttattcccccaccatttcagtattcgccgcacctggcggcaccatcgggtaaactttttcttcggcatcaatgcgcacatggatcagcgccgggccagggcgattgatgatttcctgcaatgaagcctgcggatcggcttcgttattcaaatcacaggtttcgaggccgaatccggcggcaatctgcataaagttgattttgcccggataggtggcggcaaaaacgccttgctcgtagaacagactctgttgctgatgcaccagccccagcgcttcgttgttcatcagaatgattttgacatccagctgattttcactggcggtcgccatctcctgaatattcatcatcaggctgccgtcgccggagaaacacaacactttgcgatccgggttcgccagcgcagcgccaatcgccgcaggcaggccaaaacccatcgtgcccagcccaccggaggtcagccactggcgtgggcgattgagcggataagcttgcgcggtccacatctgatgctgaccaacgtcggtggtgataattgcattgtcatcgacacaggcggcaacggcgttgatcaggccgtaatggcttaacggatcgcacgctttcgggattggacacggaaactcacgctgcaaatccgctaccaactggtgccactctgcacgcggttgcgcttccaccagcgggatcaactgcgccagcacgtcatcaacatccgcctgaatcgccacgtgcggctgcttgattttacccagctctgcacggtcgatatcgacatgaatgattttggcattcggacagaactgctcggttttgccaatcgcccggtcatcaaaacgcgcaccgagcactatcaacaaatccgcctcctgcaaaatatagttggtgctgcgcacgccgtgcatccccagcatacccagcgacaacggatgcgcttttggcaacatgcccagcgccattaaagtcatggtggtaggcagttgcgctttctccgccagttcacgcacccgtgcgggcgcattgatcacaccgccgcccagataaagcaccgggcgtttggcagcgttaatcatcgccgctgcgtcacgaatgctttcttcgctaaaggcgggggcggcggctttttctgccatagcgggctgtgtttcaatctcaaaaactgccgtttgcacatccttaggaatgtctatccacaccgggcctgggcggcctgattgcgcaatgcggaaggcatcgctcatgacctgcgggagttcttcgatatgtctgaccagatagttgtgtttggtgatggggatagagatgccgtaggtgtccacttcctggaaggcgtcggtgccgatcatcgaggcgggaacctgaccagtgatgcaaatcagcgggatggagtccagccgcgcatcggcaatggcggtcaccaggttagtcgcacccggtccgctacaggccatacagaccgccggtttaccgtcggtgcgcgccatcccctgagcgataaatcccgcgccctgttcatgacgggccagaatatggcggatttgcgtgctttggcttaaggcatcgtaaacaggcaggatagaaccgcccggaatgcccgtcacaatcttaatgccctgctgttccaggaaatgaacgataaattctgcgccggtaaagcgcttacgcgtcgatgttgtgcccgaacttgccatgctccagtccttttcttctgggccgactttccgggaggtgcttaaacgaaaaaccccgcccggtttgcgccggcggggttttggaatcgtgtgttgttccagtccctacggcgcattgccgacgaccaccaccacacgcacgacgaccactgcggcggatagcgcagttggtagtagttttgcgttgaacatggaagtagtcattggggaccttgttggttttgtgtttaacaatatttatacaagcacagctttacaggggagacaatggaaaatttttcagcaagggaaaattgaggggctgatcacgttttgtactgaattgcagataacaaaaaaccccgccggagcgaggtttcgtcagtcgcctgcggctggtaaccgcaaagcacactgtattatgtcaacactgaaagtatacgtgttccgcgcagaacgcgcaatttcggcacgaattttgacgtatttagtgcatagttgagtatcgatcacagtttgcgttttgtccaaatattactgtttatttatacagtaaacttctataatatcactgtacgcaatgtgttatgcgggggccgcatcgttacccggcgcactaagtcctggctgaaacgggtggtgccgtcagcgccttaaccccgcgtgagcacactgtgttatgtcaacaagcacaacgtttctccttgagataccgcgtgcacaacagctggcaacaggcagcggaaaggtacgtcagctggcagtgctcctgaaccacaggagacgcgtatgagcctggtggatatcgccattcttatcctcaaactcattgttgcagcactgcaactgcttgatgctgttctgaaatacctgaagtaattcagattcaagtcgcaccaaaggggagcgggaaaccgctccccttttatatttagcgtgcgggttggtgtcggatgcgatgctgacgcatcttatccgccctaccatctctcccggcaacatttattgccgcttttgtttacatattctgccgctaaacaattccccattcctggcgtatatctggctaacattcatcaatgtgatagattcctctcccgcatttatgggaatgcgtagtgacttattctaattatttttataaaagcatccgtgataatgaaaaggcaaagaaacgtcaatttgttattgatgttggtattactcgtggccgtcggtcagatggcgcaaaccatttatattccagctattgccgatatggcgcgcgatctcaacgtccgtgaaggggcggtgcagagcgtaatgggcgcttatctgctgacttacggtgtctcacagctgttttatggcccgatttccgaccgcgtgggccgccgaccggtgatcctcgtcggaatgtccatttttatgctggcaacgctggtcgcggtcacgacctccagtttgacggtgttgattgccgccagcgcgatgcaggggatgggcaccggcgttggcggcgtaatggcgcgtactttaccgcgagatttatatgaacggacacagttgcgccatgctaacagcctgttaaacatggggattctcgtcagtccgttgctcgcaccgctaatcggcggtctgctggatacgatgtggaactggcgcgcctgttatctctttttgttggttctttgtgctggtgtgaccttcagtatggcccgctggatgccggaaacgcgtccggtcgatgcaccgcgcacgcgcctgcttaccagttataaaacgcttttcggtaacagcggttttaactgttatttgctgatgctgattggcggtctggccgggattgccgcctttgaagcctgctccggcgtgctgatgggcgcggtgttagggctgagcagtatgacggtcagtattttgtttattctgccgattccggcagcgttttttggcgcatggtttgccggacgtcccaataaacgcttctccacgttaatgtggcagtcggttatctgctgcctactggctggcttgctgatgtggatccccgactggtttggcgtgatgaatgtctggacgctgctcgttcccgccgcgctgttctttttcggtgccgggatgctgtttccgctggcgaccagcggcgcgatggagccgttccccttcctggcgggcacggctggcgcgctggtcggcggtctgcaaaacattggttccggcgtgctggcgtcgctctctgcgatgttgccgcaaaccggtcagggcagcctggggttgttgatgaccttaatgggattgttgatcgtgctgtgctggctgccgctggcgacgcggatgtcgcatcaggggcagcccgtttaagcgcacgtcaccgcagcatcgtcatcagctccatgggagaacgatgctgctttatcagatcacgcatcacccgcatatgcggtgcggagtaagaataaaacgcctgatagcccgcacaaagcacgctgtctggcgtctcctgccgagcgtgcgggcacaggcgatgccagtcgcacgcctggcagtcacagcgcggttgcgggttttcgctgccacaccatttttgtaaggtggcgtcaaaaagctcaatcgagatacgactgatatctgcccgcacccaacactcgaacagggcaattaaaaatttcccccacagctctgctgtcaccgaagcggccgtcagatcgccccggtcatcaaattcaagatagggaatgagctgtacggagcggatgccccgctgtttgaaattgtgataaaaatcggcaggttgcagagcatccttgtactctacaaccagtttatgcctgtcctcttcagcatcaatgacctgacttcctgtcatgcgactctctcaataaatacgataagttgatgtatatgcgttacagcaaacagtattgcgagagataacaccgcgagggagatcaaaaatttgtcacggactacgtgaaattgggaaaaatcgctattcgtgacatccattaaattgcgattacgggtgtagtgccagaggatcagcgccacgatggcgagaatgccaatcgaaatccagaataacatgcccgcctggtgccagttgtgtttgatagccaacgccatcaacgcgccgtagcccagcatggtacgaaaccacgccagtgatgtgcgctccggctgcagtcctgggtcggcaatgcgtctggctttgcggctatccggcatacaacaccagtcccataacgatcaccgccacgaccatcaatattaagctaatgattaataagctgttggtgtagggcaggtcctctttcagacgcatcgctttttcattgcgtaaccagcgcaagtagccatacattgctaacccgccggaaaacagacacaacaacaacgccagcagttcacgaatgacgggcgtggcgaaatctggcgcaagttgatcaagcccaacccccgccgccagaaatcctagtgcagtacggatccacgccagaaaagtacgctcattagccagcgagaagcggtaatcaggcgcttctccgaggcgggaaattttcattgttgctcctttgcaatttcactaacgctctacctttagcggtttttttaagaatttcgtccgcccgtttcctgatatgcttttgccatccgctacaaggaggtcagatgggtatcatagctcaaaataaaatcagttcattgggcatgctgttcggtgccatcgctttaatgatggggattatccacttttcattcggccctttctccgcaccaccgccaacgtttgaaagcatcgtggcggacaaaacggctgaaattaaaagaggtcttctcgccggaataaaaggcgaaaaaattaccaccgtggagaaaaaagaggacgtagatgtcgataaaatcctcaatcaaagcggtatcgcactggccattgctgcgctactttgcgcatttattggcggtatgcgtaaggaaaatcgctggggcattcgcggcgcgctggtttttggcggcgggacgctggctttccataccttgctttttggtatcggcatcgtgtgcagcattttgctgatattccttatcttttccttcctgaccggcggttcactggtttaagcagcctgaataatgcccgccgggtgatcatcagcgggcattatcgtcagaacttctgttttttctcctccaccttcaccccttgtgtcggtaggccggtgtcatagtcgcgtacaactggcgaatagccatcttgtggacgtggacgaaacgcccccatccagcgcggccgtgcatctttacgccacggacgcagactccattggtaactgcggaacggatcgcgaattttgtccatgtaatccaataaggcgtcatgcattttgctgcgaacgtctgcaaaacggatatcatcgatcaggttatgcatttcatttgggtcattacggcgatcgtaaagttcatcactggtgaagaggttgagtaccagtttaaagtcatccgtcacccagcaacgcaccggaataaaaccgccaaagctgtcatgctcaatctcgtagcggttaaattccaccatcacgccgcgtggctctttcacggcaaggatattttcccccggcagaatctctggtttttcaatatctgccagcgccatcattgtcggcagtaaatcgatatgactgactggcgtatcgacctgtcgccgctccccttgcggcgaacggatgatcagcggaatgcgggtgatgtcgtcatacatcgccgcccctttactgatcagcttatgtgcgcccatcatttcgccgtgatcggaggtataaataacccacgtattttcacgttgctctggcgttaaggcattgatgacccgtccgatttggtcatcaacaaagtcattacaggcaaaatagagcggatggtgataaagcccgtcatcaccgactggcgatggcatcgcctgcgcccataagcggtgatgttccggtttgttagccaggtcatcctgtgctttctcgcccagctcgtagtaaaaatcagcgtatttctctaaatactccaccggacaggtgaacgggtgatgcggctcatcatacgaaaccaccatcaggaaaggctcgtctgcgcgcgcaggctgttgcagaaaatccaccgcccgattgctgatacgatgcgcccaggtgaaggtttcgtcgatatggttcgcctgtaaatcttcgacgctgtttaggccattgcgccacaggctaatctctttttccgtcagttcgctaagatagttcgccccatcgaaccagtaatcagcgtcccactccggcggacactcgccagtgccgaaatagtcatgaccgtcgagatgccatttgccgatgtaacaggtgtgatagccggcatccttaaagtagcgccccatagtggagatgtttttgcctggcgcgacgttgttggtccacgggccggactggttagcgtagataccggtaaatagtccggcccgtgcaggcgtacaaaccggtgaacaggtgtaggcggaattaaagcgaataccttccgccgccagactatcaatattttgcgtattcagcggtttaccgctatagcaaccgaccatattggtggcctgggtatcggtcatgacgaacagaaaattggggcgtttcataggctatccttcccgtcgggagtaaaggttacggctgggtcgtgacgatgccgccagctgtcaaaaatcaggtagacaatcactacggcggcaatgaaataactgatcatcgctaaccagcgcgtaccgtagccgccgaattcagccagcccggcatagacgccaatcatcgcgaacaggatgccaattgacgcgatcttgacgtttttccacggtttcatgtccaccgcaaacgcatctttgaaggtgaacggcgtggcgcgcggtttgataaaaccgatcaccagcatcacgaccacgttgatgcagaacgtacaggccagcacatagaggaaatggaagtcgaacttcaccagatagttgatggtgatgtagctgattatgccaatccccatcgctacttttgccgccagcgccgggatgcgcgggaagaaaaagcccataatgatgatggtaaccagcggcacgttgtaaatgccgttgagctgtttcatccagctatacagcccctgcggcgcgttggcgatccacggcgcgaccagcaccgaaacgatagcgataaagaaaccaaatttgcgcccgacggtgaccagctgctgcggctcggcattctggttaatgatgcgacggtaaatacccatactgaataacgtactggcgctattcagaaagccgttgaaggtactgatcaccgcaccaaataacaccgcgccgaagaaacccaccattggcactggcagaacgttattgaccagcgtcgggtaggccatgtcggctttcggtaaatcctgatacagatgaaacgcaatcaaccctggcagcaccagtaccagcgggtcgagcattttcagcaccgccgttaacagcgcccccttttgcccttccgccaggctttttgacgccagcgtgcgttgcacgatgccctgatttgtacaccagtaaaaggtgttcaccagaatcaaaccggtaaatgccgcgccaatcggcaagggatcggtcgggccaccgattgagtttaatttctcggcgtgaacggtggtgagttgctcaatgccctgcataaagctgcccttgcccatcgcgatcaggccaaataccggcaccatcaacccgccgataaccagcccaataccgttgatggagtccgccactgccattgcgcgcagtccgccgatcaccgcatacaaaattcccgccagaccaagcaaaattaccagtagccagatagccgcaccgtgagaaatctgtagcgattccccgacgtgaaacaggctgttgagcgccaacgagccggagtagagaacaatcggcagaaagcagacgccggtggcaatgaggaagcagaagtcgatgataatacgcgtcgttttatcataacgttcctccagaaaatcggggatggtggcaatgccgcgcttcagatagcgcggtaaaaagattagcgcgaggaagatcagcgtcaccgctgaagtcacttcccagcccatcaccgacatgccgcttttgtaggcctgcccggaaaggccgaccagttgttccgtggaaaggttggttagcattaacgaagcggcaataaccggcgcttttagtgaacgtccggcaagaaaatagccttgttgcgatccggtatctgttttgcggaccttccaccaggtgatcaccgccaccagcagcgtaaaaccgacaaaactcaagatttgtaacgaattcatctcatagcccttatttatgtttatgtcccggacgcatgaatatagggagaggtaaaatgcgtcgggtcaggcagtcagattcttaaaatacaaacgtcgtatccctgaacggattgttttctgttaagttcaggttgtgagcataattcgccggagggatattaaaatgaatggaaaattgcaaagttcagatgtaaaaaacgaaactccgtacaatattcccttattgattaacgaaaatgtgatctccagcggaatttctctgatctcgctctggcatacctacgccgacgagcattaccgggtgatctggccgcgggacaagaagaaaccgcttatcgccaactcatgggttgcggtgtataccgtacaaggatgtgggaaaattcttttaaagaatggcgaacaaataacactgcatggcaactgtattatattcttaaagccaatggatattcactcttatcactgtgaaggtttagtctgggaacagtactggatggaatttacccccaccagtatgatggatattcccgttggtcagcaaagcgttatttataatggcgaaatttataatcaggaactcaccgaagttgctgagttaataacttcaccagaagcaataaaaaataatctggcagtcgcttttctgacgaaaattatttatcagtggatttgtcttatgtacgcagatggtaaaaaagatccacaacggcggcaaattgaaaaattaattgccactttacatgccagtctgcaacaacgctggagcgtagctgatatggctgccacgatcccctgtagcgaagcctggttgcgtcgtctgtttttacgctataccggcaagacgccgaaagaatattacctcgatgcgcgtctggatctggcgctatcgctattaaagcaacaaggaaactcggttggcgaagtcgctgatacgctcaacttcttcgactcctttcatttcagcaaagcctttaaacataaatttggttatgcgccgtcagccgtgctaaagaatacggaccagcacccaacggatgccagtccacacaattaacgtaactctggccagtacgctttgttggcctccagcaactcatccagaatagctttggcgaccgaggcgctcggtaccgttttcgacaacgtaatcgcctgccacaggtgctgatatgaacgctgttcccaggcgtccacgaccagtttttccaccgccacttgctgactcattaaccctttctgaaactgcgggatatcgccgaccaccagtggttcaggccgtagtagcgcacgcgcatctgtttgcgatcttgcagcccaacaatttgcgccatccggctttcaataccgattggcatgtcacagatgttgaggattttcgcattcgggcgcagacgacgcgtggcttctgcgacaattgctgccgggttggagtagttgagcatccaggcgtttggtgaatatttttccatataatccaccagttccaggacgccgccaatggaacgcatgccgtacgctattccgccgggtccgcaagtttcctgaccaacaacaccgtggcgcagtgggattttttcatccagttcgcgcatcgggtacttgccgacgcggatgtgcgccatgacaaaatcaacgtcgctgaatgccacttcaggatcggtggtgtaactaaactcaatgtccggcgctttctctttaaggatgactttacaggcttcggcaatcacttcctgccgcgcaccatcgttatcataaaatttcagtgcacgaagcgggaaacggtcctgattcgccaggagcatcaacacgatgcctggcgtaaaggtgcttccaccgcctgcgacaaccactgagaatttggtcattatactgcctccgtaatggcaacattttctgctgattgatgagaattaattaagctatcgagctgttcacgcaattgggatacatgcagaccaatgatcacctgaatggcatcgccactacggaagacgccgtgcgctcccagctttttaaagacttcgtcatccagcgtttgtgacatgtcatgcagtgcaatgcgtagacgcgtcgcgcaattgttaatgctggagatattgccgaccccgcccagggcttgcaggataccggcagcctgatccagctctttttttggctctgcagcggtggtttggcctcgcgaggctttgtattcggcttttgagtagagtttcacttccgcatcttcacgtcccggcgtgcacatgttgaattgcagaatcagggtgcggaaaaccacgaagtacagcagggtaaagcacaacccaatggcgatttgggtcagcatcatatccgcgtggttgctgaacatcgggatccagttttgcggtaaaacctggtcaatcagacctccgcccatgttgcccaccacaccaaagagatacatcacggtcgacattgaggccgccagcacggcgtgtaccgcaaacagcaacggtgaaatgaacaggaaggtaaattccagcggttcggtaattcccaccagcatggcggttaaggttgcgggaatcagcaagcccgccacttttacccgattttccggtgcggcagtgaagtacatcgctaaagaaatgcccacggcaccaaagatttttgagttaccgtgcagggcaaaaccgccttccgggaacaacgatttcagcggctcggcgctcaaactgaactcttgcagatgctgcgcccagtacatctgaatgccgccttcaacagctgccggaccaaagataaacggtccgtagatgaagtggtgtaaaccggttgggatcagaatacgttcgaggaaggtgtaaacccacaccccaagcgcacccgccgaacgcaggaacgcttgcagagattcaatccccgtttgtacttttggccagccgagcaatgtcagccaggcacaggggatcatcaccaggaaggcgataatcaccacataagacgtcccctggaaaatgccgagaaacaccggcagttttttatcgaacagacggttatgcagcgccgtcacgatgccggaaatgataattgcgccgataatgctggtatcgagggttttaatccccgccatcattgtcagaccgctacctgccaccgcgtcctgagtgaaatcgacgccgaagtagcttccccaggtcattcccatcgcgttgatgaaatagttcctggtcaggaaactcaccatcaccgccagacaagcacgcccttgcgcttgcttagcaaggccaatgggtaaaccgacagcaaaaatcagcggcatattacggaataccgtccaaccgccctcttcaataatgtgtacgatttgcgcgaataaactgttcggatcggtcagtgattccccgacaaacatcgggttttgcagcaagatggcaagacccaccacaatcccggcgaagggaaacagcagcactggcgtgaacatcgcgccgccaaagcgttgaatttgactgagcatttccacatcctcttttctcaattctgtaagtaggaagcctgattggttatgcggcaggcctggagcgaggataggaagatgcgatcgacagaacatgacgacccaatgggattcgtgatcgctttcatgcttttcgttgggcggtagagatctacgttttcgcgaaaaagtagacatctgtgagcactggtacacagcatcgaacacatctttaaaaaaaagatgttttttcaatcgattaagcagaacttgtgggcgcattacccgggcttgcaggcaaaaaagagatctagagatgatctacaaaagcattgcggagcggttaagaattcgacttaattccgcagatttcacgctaaacagccttcttcccggtgaaaaaaagttggcggaagaatttgcagtatcccggatgaccatccgtaaagcgattgacctgctggtagcgtgggggctggtggtccgccgccacggcagcggcacttacctggtgcgcaaagatgtgctgcatcaaaccgccagcctgaccggactggtggaggtgttaaaacggcagggaaaaacggtcaccagccaggtgctgatttttgaaatcatgcctgcgcctccggccattgccagccagttacggattcaaatcaacgagcagatctacttctcccgtcgcgttcgttttgtggaagggaaaccgctgatgctggaagacagctatatgccggtaaaactgttccgtaatctttcgctgcaacatctggaagggtcgaagtttgaatatattgaacaagagtgcggaattttgattggcggtaattatgaaagcctgacgccagtgctcgccgatagactgctggcgcggcaaatgaaggtagcggaacacacgccactgctgcggatcacctcgttgtcatatagcgagagcggggagtttttgaattattcagtgatgttcagaaatgccagcgaataccaggtggagtaccatttacggcgactccacccggaaaagagttaaccgatactccagaagagcaccgccagtaattggggggtgataattcgcagaaacatcactaacggatagacagtggcgtaagagagcgccgccgcaccactggttggatgaagattattagcaaacgccagcgccggaggatcggtcatggaacctgccagcatcccgcacatggtcaggtaattcattttggctaacatccgcgccagaatgccaacagtaatcagcggaacggcggtgatcagggcaccataaccaatccagcttagcccttcgccattgaccagggtattcacaaaatccccaccagatttcagaccaacgaccgagaggaacagcacgatccccagttcccgcagcgcgaggttggcgcttggcggcataaaccagtacagcttgccgatactgccgatacgcccgaggatcaacgccataatcagcggaccgcccgccagccccagtttcaacgcggccgggaacccaggcacaaagacgggaatagaacctaacaatacgccaagcccgatgccaataaacactggcagcatctgaacctgttgcagtttttgctgcgcattccccagcacattggcaacggcatcaattgcggacggacgccccaccagattgaggatatcgccgaactgcaggctgatatcgccactggcgaccagttcgaccccggcacggttcaggcgcgagataacaacgtcatagcgttctttaaagtgcaggtcgcgaatacgttttccgagcacgttttcattggtgaccaccacacgctcgacgcgcaaatcagtgcctttcgtagacagcgaggtatcgacctcctgaccaatcaccagttgcgcattatgtaaatccgctggctgacccaccagatgcagcaaatcgcccagttggataatggtatctggcgaaggaacttttagggtttcttcgcgtttcagacgcgagcagataattttgtcgccgttgagaatcggtacatctttaatggctaaatcatgcaggttagggttctcaacgcgaatattgatagtcttgatcagcgcgccgccattggtgcgtgaagactcgtgctgctgagcttctgtctcgacattgacgcggaaaataacccgcaacatccacatggtgaacaaaatcccgcaaatgccgaatggatacgccatcgcgtaactcatccccatctgatcgaccatttccattggtgtacccaggtcgcgcaaaatctgctgccctgcccccagcgctggcgtattggtaaccgcaccggagaaaatccccagcactaccggcagtggaatatcaaacagtttatgcaggatggcggtaaccagaccaccgatgatgacgatcagaacagcaaacaggttgaggcgtaatccggagacgcgcaatgaggcaaagaagcccggccctacctgaatcccgatggtataaacgaacaggatcaggccaaattcctgaataacatgcagcatatcgctacttaatgtcatccccgcctgagaaacaaaatggccgacgatgatcccaccaaacagcacgccgccaatacctaatcctatgccgcgaaatttgacgttgccgataaacaaaccgacgactgccaccaaagccagaatactgaccgttaatgctatatcactcatcgtccatttctcttgagataacattttaattgctacggattatggctgaatcggtgaagcagatttgccttatagcgcacattatcacgggaaagaacgtgccgaaatatcttaaacagtcgaaatttaacgcattgttgagtaagtaagacaaaaaaagccccaccagaatggcggggcaaagagaatagctagttagctatttaacgcgggacgttcgctgatagcgatacgctgcgctgcgatgggttcaggctcattacgaattaaatcaatatgcagtaaaccgtttacgaaggttgcgccagagacttccatattttcagccagcgtaaagctcaggctaaatggctgattcataagcccttgatgcagccattttttctcttcttttggctgctccggcgtgccttttacgctcaggcgcgtaccttccagttgaatctctaaatcttcctgacggaaacctgccagcgcaagggtaatgcggtagtggttatcgtcgcttttctcaatgttgtacggcgggaagctctggctttcaccggcgttttgcagtgcgttggccagtttgtcaaaaccgatccattgacgcatcagtggggataaatcgaagttacgcatagtcatttctccttctaagaagcgagtaagtacctgcaaatccgaagattcgcatatgctccctgacggcgagcatggagatgtcaggccgcgccaggcggccttagggaattagttgatttcgatacggcgcggttttttcgcttccggaatcacgcgttcgagatcgatatacagcaaaccatttaccaggttagccccacgaacatgaatgttctcagctaactggaatttgcgttcaaagttgcgttcagcgatgccctggtacagataggtgcgctctttttgttcgtcggcgtgagcacctttcaccaccagcagattatcctgggcggtaatttccagttcgctctcagcaaaaccagccacagcgatagcaatgcggtaatggttttcgtctaccagttcaacgttatacggagggtagccgccattactctggctctggttgttttctaagtggttaaacaaacggtcaaatccaatagcagaacggtaaagcggggataaatcaaagttacgcataatcaatagctcctgaaatcagcgagaatgtaagaccttccacaatggacaggtcaggtagccagaacacccatcaggcgcgtcctcatcggctacgatgtaaaaatgggtctggaaatgaacttttcaagccttatcagcggacttttttttgcagtttatggtctattgcatagactgagggggcagcacgaaacgttaaagtgcgattgccgccacagagcgacgtaatgatgatgttattttcagcaagggatcgctataactcatcaggccaacacccacgatcaacagatgaatttattatgataagaaatgtgttgttagcgttcatgatatgcagcggaatgacattactcggaggatgctccagcgtgatgtcccataccggggggaaagaaggaacgtatcccggcacccgcgccagcgccaccatgattggcgacgatgaaaccaactggggcactaagtcgctggcgattctcgatatgccgtttaccgctgtgatggacacgcttttactgccgtgggatgtgttccgcaaagacagctcggtgcgctcacgcgttgaaaaaagcgaagccaacgcgcaagccaccaatgcggttattccaccggccagaatgcctgataactgatttagcgatcagtttcggtgatccacagctggccaccttccatccacgccagccattgaccatccggtgagaagaccacggcatccgcagaaggcggattggcgtggttttcggttaaatactcaacctcgccgctttgcgcatgggcacaagcaattcgattatccagcacaaagcccaaccattctcctgatggatgccagttaaatgcagactgaatatccgttttgttatgggttaactggcgcggctcgccgccctgtggcgagataagccatagttgcacaatgccgttatcatcacgcattaaaaacgcgatttgcgtaccctgcggattacagcgcacccagtggcgcgggacgttgactaaccccggataagcccgatggtgggtaaaggttaaacgtcgctgcacgacgccgcgcggtggcgcgggcagggtggtttccgttccacttaacggcgcatcacctgccgctttccagccagcttcatcttgcggtaactcaacgataaacagctccggcactttctcgccctttggcgaaagtgtgtcgccaataaacgccagcgtgtgatttcctacccatccttcttcataagcacgattgatttcatcactgcctggctgcggcgtgggcgtggttttactcaccagcacgcaccagtggctaccgctgtactcacgcggatgctgcttttgtacattgaccgggccaaacggtgcagcaacaccgacgtttcgcaaatccagcgccggatcgagttgatgcattacatggtcgttataggtaaagctcaccctttcaccgttcgggctaaagacatgcacatggctgccgccgcgcagcgctccaggcgtatacggcgcggtaatatccatcgcatcaaggttactcatcttgccgccttcaacaatcactccgcgccgatgatggaagtcgtaatgccatgtttcatcaggattttccgggccgtggatgaagacatacttctctgacttcggatgaacggtcaccacgccgacgtgtgcgccctgtgacgcgcgatagataacctcgacctcgccggtatggatattcacacgctcaatgctctctccggtaaacgacgcgccagaaggacgcacgtcaaataccagccactggctgtcgggcgtccaggtattggtattggtgagcaggtgattacggggagcaaaggttatctgtttcatggcgcggtcctgatacaaaacgggtcccgccatcatacttcacaaggacttcactttcagacaatagtcttttgccatcgtgatgaatgtgagtgaaaagatggaacatttcgacgtggcgattattggcatcggcccggcaggatcggcgttggcgcgaaaattagcaggcaaaatgcaggtgatcgcgctggataaaaagcaccagtgtggtactgaaggtttcagcaaaccttgcggcggtctgctggcaccggacgcgcagcgatcttttattcgcgatggactgacgcttcctgtcgatgtgatcgccaacccgcagattttcagcgtcaaaactgtcgacgtcgccgcatcgctcacgcgtaactaccagcgaagctatatcaatattaatcgccatgctttcgacttgtggatgaaatcgctgatccccaccagcgttgaggtttatcacgatagcctgtgccgaaaaatctggcgtgaggatgataaatggcatgtcatttttcgtgcagacggctgggagcaacatattaccgcccgctatctggtcggtgccgatggcgcaaactcgatggtgcggcgacatctctacccggatcatcaaatccgtaaatatgtcgctatccagcagtggttcgcggagaaacatccggtgccgttctactcctgcatctttgataattcgataactaactgttattcatggagtatcagcaaagacggttattttatctttggcggtgcttatccaatgaaagacggtcagacgcgtttcacgacgctgaaagagaaaatgagcgcctttcagttccagtttggtaaggcggtgaaaagcgaaaaatgcacggtgctgtttccctcacgctggcaggattttgtctgcggtaaggacaacgcctttctgattggcgaagcggcaggatttatcagcgccagttcgctggaggggattagctatgcgctggatagcgcagacattctgcgtgcggtgttactgaagcagccagagaagctcaataccgcttactggcgcgccacccgcaaactgcgtttaaaactcttcggcaagatagtaaaaagccgatgcctgaccgcaccggctttaagaaagtggattatgcgcagtggtatggcgcatattccacagttgaaagattagccaacgcgcttcacatcgcccaccagcaggatgtaagagagcgcgccaatcaacgcgacggcggagatataaaccagtgcaggtgcgaaaccgtaaccctgcgccaggtaccccaccaccagcggaacggtgatgccgcccagaccaccggcgaagttaaacacgccgccggttaaaccaatcaggcgcatcggtgccagagaagagaccagcgaccaggtaatcgaagcaaaaccgttaccgaagaatgccagcgccatcaggcacataatcatcatcggatcgttagtgtagttagcgcccataatgcaggtggagatcagcaagccgcagataatcggcgttttacgcgcaaagcccagtgaaaagcccttacgtaccagcagatccgcgacccagccagagagcaggacgccgacaaacgccgcgaggaatggcaccgtggtcataaagcctgctttcagcgccgtgattcctttttcctgggttaaatagttcgggaaccaggttaagaaaaaccacagtgtagaagccaccgcaaattgcccaagataaacgccgatcagtttacgatggaacaccagtttccagtctttggctgttaacggctgacgcgcctctttcttcaccggcgcatcaccatccaccagaccgccgccatcacgaatgtaatccagttcagctttgctgatacctttggtcaggcgcggcggctgataaaccttaaaccaaatcagcgaccagataatgccgataccaccagtgacaatgaacacccagtgccagctcaacatctcctgaatccagatcagcagcggagtcaaaaacgccagaccgacaaactgaccagacgtataaaaaccaacggcggaagcgcgttcatgttccgggaaccagctggtcaccatccggttattggtcgggaaagcgggcgcttcgaaaataccggttatcgcacgcagaccaattaatgacattaatcccgtggcaaagccctggaataaagtcgccactgaccaaccaaatatcgcaataaaataagtcacgcgagaacctacgcgatctaaaaaccaaccgccggggatctggcatagcgtataaagccaggcgaaggccgaaaatacatagcccatttccgctttcgtaatgccgaactcttcctgaatatgggcggaagccacggccaggttagcgcggtcaacataacaaatgaccaccgtaataaagatcatcaccagcgtcagataacgccgacgccccggctttgctgcattaacgggaatatccatagcgagctttctccagattttgggcatagcgaagccgctcaccatgccctgtaatttacagagggttatatttttgtattgctgttttagtgcccgatgaggggcttacgtggcaggaattaccactctgctacgctgttatcttcatgacgccagagcggattacgccagtccggggcatttttactgaactcaataactttagcttcgtcgatttccacgcctaagcccggtttcgttaacggtttaaagaagccgccaaccatgctgaagtcttctttgtttttcacaaagtcgagtaactccgcgcctttgttgtaatgaatgcccatactttgttcctgaagtaccgcgttataggaaacaaagtcgatatgcagacaagccgccagtgcaatcggtccgagcggacagtgcggcgcaagggtcacatcataggcttctgccattccggcaattttgtagcattcggtaataccgcccgcgtgggagagatccggttgcagaatcgaaataccgcccgcctccagcacgcgtttaaaatcgaagcgtgagaacatgcgctcacccgccgccagcggaatatgcgtttgtgccgccagtttcgggtagtattcggcttgttctgccagcaccggctcttcaataaacagtgggcgatacggctccagttctttaatcagcactttcgccatcggcgcgctgacgcgaccgtggaaatcaagaccaaactcaatctgattgccaaaagcttcacgaatttgtgccacggtgttgactgccgcatctaccgcgcgggagttatcaattagccccagttcttcacaaccgttcagtttaaaggtatcgaagccgatttcgcgtagcgttttaatgccgtcgataacatccgccggacgatcgccgccgacccaactgtaggctttaattttgtcgcgaaccaggccgcccatcagttgccagaccggcgcattcagcactttgcctttgatatcccataacgcctggtcgatcccggcgatggcgctcatcaggattggaccgccacgataaaatccggcgcgatacatcacttgccataagtcgttgatgcgcgatggatcctgaccaatcaaatagtcgctcagctcgtgaactgccgcttccaccgtgcgggcgcggccttcaatcactggctcgccccagccgaccacgccttcatcggtttcaattttcaggaacatccagcggggaggtaaacgatacgtggtaattttggtgattttcattgcactgcctctcgatacgccttaacaaatgctgctgcctgctgcgcggtgcgttctacggactgcccggcgcgatagagatcgctgcctaagcccgccccagcacaacctgcgtctatccactgcgccaggttttctggcgtcacgccgccaacggcaaagactgcgatgtccgatggcaataccgcttttaacgctttgatgtattgcggaccaaaagccgatgacggaaatattttcagcgcctgcgcgcccgcttcgagcgcggtaaaggcttcggtcgccgtcgcgcagccggggcagacggtcatgccgtagcccaccgcacggcggatcacttcactatggatattgggcgtaacgatgagctgacagcccatcctggcgagcgcatcgacctgttcaggtttcagtaccgtacctgcgccaatcaacgccttgtcgccatacgcatcaacgatggcgggaatgctttgctcccattgtggggaattcagcgggatttcaaccgcgtcgaacccggcgtcaatcaccgcgccaacatgcgccagcgcctcgtcgggcttaatgccgcgcaaaatggcgatcagcggaagtttagtttgccactgcatgagcgatgctccttataccagcctgaaatgccgtgtcgcccgccaccgccgtcacgtcgcaacccatcgcctgaaaggcttgctggtagcgcgcggtcagcgatgttccggcgacaagggtgatggcgtgttgatgggtcacatagtcgcgcatactggcaacctctgcgccaatcaacaaaccagagagaaattcgctgacctgttcgcggggaagtgttcccagcacatgcgaggcgcgaacttcaaaaagctgcggcaatatggcgggcgcattaaggccgcgctcaaggccagccgcgaaggcatcggcagagttttcctgcggcggcaaacctgcgccaatcaatgagtgatttaacagtaaatgatgtaattcaccggtcatcacggtgcgaaaatcgttgatttgctggctatcggcctgcacccatttgcaatgcgtaccgggcataacataaagagaggaaggagccagagttcgcgcgccgatcaattgtgtttcttcgccgcgcatcacattgtggttatcgtcatgagagacgcataatccgggaataatccagatattgtcgccaactgacgttaattgttcgccaatagacgaaaaacaggcaggaacagataaatacggtgcaactttccagccgacgttgctgccaaccattcctgccattaccactggcgttttctcttcacgccagtcggtcgtgacttctgctaacaccgcagccggagattttccgttcaggcgcgtgacgcctgcttctgattgcctgctctccaggcagtggtcgccctgataaagccaggcgcgcagattggtcgatccccagtcaattgcgatgtagcgagctgtcatgtgatttcctttaaccttcgtgtcgagctggcgatcatggtaagcgccgcctgctctgccgcatcgccgtcctgatgtcgtatcgcatcgaacagcgccttatgttcctggagcgtttgcggcatgttggcctcatcgcccatccaggttcgttcaaaaaccacccgctgcagcgaactgatcgcaatgctaagttgctgtaacaccgggttatgcaccgactgcagcaccgcctcgtggtagcgaatatccgcttcgttaaacgcttcgcggtcctgattgttggcaatcatctcgttcagcgccgattcaatctgcgccagatcgctggaagtcgcgcgctctgctgcccaacgggcaatcgccggttccaccagatttcgcacttcgctcatggcactgataagccgtgggtcgtagtcattttccagcacccattgcagtacgtcagtgtcgaggtaattccactggttacgcggtgccacaaacgccccgcgataacgtttcatttcaatcagccgcttcgccatcagcgaacggaacacctcacggatgatgttgcgcgaggttgcaaactcctcacagagttccgcctcagccggaagcggcgagcctggcacgtatttgccgtgaacgatctgtttacccagcgtaatgacaatgcgatcggttttattgagagtcatggagagtccttgtgctctgtatgttcttctctactttaccccgatcgatgcataacgcggcaactttgtagtaccagcgtgatgacgttcgcgtttgccgtgcgtgtaatgtagtacaaacttatattgttgtactacaatttagatcacaaaaagaacaatgaataaaaaaatgacatgcgtcgggcagaaatctgaaaagggatatcaggcgctaaacaggagggaaagaagagtatgctttcaacggcttagctactcgtttaaaggattaatcatgaagttgaattttaagggattttttaaggctgccggtttattcccactggcgctgatgctttcaggctgtatctcgtatgctctggtttcccataccgcaaagggtagttcaggaaagtatcaatcgcagtcagacaccatcactgggctatcgcaggcaaaagatagtaatggaacaaaaggctatgtttttgtaggggaatcgctggattaccttatcactgatggtgccgatgacatcgttaagatgctcaatgatccagcacttaaccggcacaatattcaggttgccgatgacgcaagatttgttttaaatgcggggaaaaagaaatttaccggcacaatatcgctttactactactggaataacgaagaagaaaaggcactggcaacgcattatggttttgcctgtggtgttcaacactgtaccaggtcactggaaaacctaaaaggcacaatccatgagaaaaataaaaacatggattactcaaaggtgatggcgttctaccatccatttaaagtgcgattttatgaatactattcacccagaggcattccggatggtgtttccgcagcattactgccagtgactgttacgctggacatcattactgcaccgctgcaatttctggttgtatatgcagtaaaccaataatcagtaagcgggcaaacgcgtttatgctgtttgcccgcccacagattaattcagcacatacttctcaatagcaaacgccacgccatcttcaaggttagatttggtgacaaagttcgccacttctttcactgaaggaatagcgttatccatcgccacaccgacgcctgcatattcaatcattgcgatatcgttttcctgatcgccaatcgccatgatttcttccggtttaatacctaacacgtcggccagtgatttcacccccgtacctttgttaacgcgtttatcgaggatttcgaggaagtacggcgcacttttcagcacggtatatttctctttcacttcctgcggaatacgcgcgatagcctggtcgaggatggcgggttcatcaatcatcatcactttcaggaactgggtattggggtccattttctccgcttcgcagaacaccagcggaatggtggcaacgaaggattcatgcaccgtgtagtagctgatatcacggttggcggtgtacagcgtggtgcggtccagggcgtggaaatgagaaccgacttcgcgagagagtttttccaggaaacgatagtcgtcatagctgagagcagtttgcgccacggtgctaccatcagcggccttctgtaccagcgcgccgttataagtaatgcagtagtcgcccggctgttccatatgcagctctttcaggtagttgtgcacacctgcatacgggcgacccgtcgttagcacgacattcacgccacgggcgcgagctgcggcaatcgcatttttaacggcgggtgaaatggtgtgatcgggcagcagaagggtgccatccatatcgatagcaatgagtttaatagccatgagttccccaggtagattggttcctgacccatgctaacgcgattccgctcaaaaatcagtacaacacccgagggaaaagggggatgcaacgcgcgttgcgtgctccctttttgcttagcggaagagtttccctttcagcagttccatgcctgcggaaagcagatcgttattggcttgtggtgacacttcaccttgcggtgagagcgcatcaataatcttcggcaattgttctgccagtaaactggaagctgtactggtatccacgccaagtttttgcccgagatcggacaccgcatttgtgccgagcgccgattccagttgctcgccactaaccgattgattgccctgttgattactcagccaggttgagagaatggcccctaagccgccactttgcagtttttccagcagcacctgaatgccgccctgctcctcaacccaacttaaaatagcctgatatttccccgcatcgcctttcagaaaggcaccgacaacttcatcaaaaagccccatgataatcacctgtaaagcgttacgtgttgacccaaaaagtatagatttgcgggatgataattgcggattgcagaaataaaaagggcggagatgatctccgcccttttcttatagcttcttgccggatgcggcgtgaacgccttatccggcctacaaaatcatgaaaattcaatacattgcaagattttcgtaggcctgataagcgtagcgcatcaggcacgctcgcatggttagcgccattaaatatcgatattcgccgctttcagggcgttctcttcaataaacgcacggcgcggttcaacggcgtcgcccatcagcgtggtgaacaactggtcggcagcaatcgcatctttaacggtaacgcgcagcatacgacgactttccgggtccatagtggtttcccacagctgttccgggttcatctcgcccagacctttataacgctggatggagaggccgcgacgggactctttcaccagccagtccagcgcctgctcgaagctggctaccggctgacgacgctcgccacgttcgataaacgcatcttcttccagcaagccacgcagtttctcacccagcgtgcagatacgacgatattcgccaccggtgataaactcgtgatccagcggatagtcagtatccacaccgtgggtacgcacgcgaacaatcggctcgaacaggttttgctcagcattggtgtgaacatcaaacttccactggctgccgtgctgttctttgtcgttcagttcgctgaccagcgcgttcacccagcgggtaacggtctgctcatcagaaaggtcagcttccgtcaacgtcggctgatagataagctctttcagcattgctttcggataacgacgctccatacgattgatcattttctgcgtcgcgttgtactcagataccagtttctctaacgcttcgccagccaatgccggtgcactggcgttggtgtgcagcgttgcgccgtccagcgcgatagagatctggtactgatccatcgcttcgtcgtctttaatgtactgttcctgcttgcctttcttcactttgtacagcggcggctgagcgatgtagacgtgaccgcgttcaacgatttccggcatctgacgatagaagaaggtcaacagcagcgtacgaatgtgcgagccgtcgacgtccgcatcggtcatgatgatgatgctgtgataacgcagtttgtccgggttgtactcgtcacgaccgataccacagccaagcgcggtgataagcgtcgccacttcctgagaagagagcatcttatcgaagcgcgctttctcgacgttgaggattttacccttcagcggcagaatcgcctggttcttgcggttacgcccctgcttcgcagagccgcccgcggagtccccttccaccaggtacagttcggaaagcgccggatcgcgttcctggcagtctgccagtttgcccggcaggcccgctaagtcgagcgcacctttacggcgggtcatttcacgcgcgcgacgcgccgcttcacgggcacgggcagcatcgataattttgccaaccacgattttcgcgtcggttgggttttccagcaggtattctgccagcagttcgttcatctgctgttcaaccgccgatttcacctcagaagaaaccagtttgtctttggtctgggaggagaatttcgggtccggcactttcacggaaacgaccgcaatcaggccttcacgcgcatcgtcaccggtggcgctgactttggcttttttgctgtagccttctttgtccatgtaggcgttcagggtacgggtcatcgccgcacggaagcctgccaggtgagtaccgccgtcacgctgcggaatgttgttggtaaagcagtagatgttttcctggaagccatcgttccactgcaacgccacttcgacgccaataccgtctttttcagtggagaagtagaagatattcgggtggatcggcgttttgttcttgttcagatattcaacgaacgccttgatgccgccttcatagtggaagtggtcttctttgccgtcgcgcttgtcgcgcagacgaatggaaacgccggagttgaggaacgacaactcacgcagacgtttcgccagaatttcatattcgaactcggtcacattggtgaaggtttcgaggctgggccagaaacgcaccatggtgccggttttttcagtctcgccggtaaccgccagcggagcctgcggtacaccgtgttcgtagatctgacggtgaattttaccctcgcgctggataaccagctccagtttttgcgacagggcgtttactaccgaaacaccaacgccgtgcagaccgccggacactttataggagttatcgtcaaatttaccgcctgcgtgcagaacggtcatgatcacttccgccgccgatacgccctcttccgggtgaataccggtcggaatgccgcgcccgtcatcctgtacagagacagagttatcggcgtgaatggtgacgataatttctttacagtgacccgcgagcgcttcgtcgatagcgttatctaccacctcgaataccatgtggtgcagaccggtgccgtcatccgtgtcgccgatatacatacccgggcgcttacgcaccgcatccagccctttcaggactttgatactggaggagtcataagaattcgacatcaacgtttctcgctcatttatacttgggttaatccgttattttacccttttccacggtaaacatcttcgaattttcgtccgacatgtctataacgtgttcagcactgatcgcgctgacaaagacctgtgattgcgtcgcttttaagcggctggcaagcagcccgcgacgctcatcatcaagctcagaggcaaaatcatctatcaggtagagacaccgccgcccgctttcacgggtgaggaactctccttgcgccagacgtaaggcgcacatcaacagcttaagctgcccacgcgataaggtatcttccaccggcgcaccgtcggcgcgaatgcgtaagtccgctttatgcgggccatgcgcggtgtaggttagctggcgatcgcgttcaaaattacgttccagcacctcagcatattctgtctctttctcccagccgcgctggaaagagaaagtcagagaaaactcagggagaaattgcttacaggtatcagccatatcggccgcgataccggcgctatactccgcgcgccaggtgctgatttgctccgccagcgggatcagctctttatcccacgggcgtagctgttcgtaatgtgtcacctggcgcagcgccgcattgcgctgcttgagcaatcgcttgagattgctccaggcggtgaaaaatccgggttcgttgtgaaagcatccccagtcgaggaatgctcttctgtatttggggccgccgttgagtaaagtaaacccttctggcgttatcaactgcattggcatcaggtgcgccagttccgcgaccttatgcccatctgtaccgtcgatgcggactttgctgtcgccctgtttgtctttggttaagccaatcgctgtctcgcgctcttcgccctgtaatcgcccgtggagaacaaacgcctcctgctcatggcgaatgacgcgaccaatctgcaaactgcgaaacgcccgaccatggccgagcgtatagatggcttccagcacgctggttttgccactgccgttggcacctaccagaaagttaaagccgggagataaggcgagatccgcggtttcaatgttgcggaaatcgcggatcaacaagcgggtgagggacattacagtctcattggcatgacaacataagccgcgctctggctggccgcatcttcaatctgcacgctggaaaccgaatcggtcagcatcatgcggacgttttcgcatttcagcgcgttcagaacatccagcacataactgacgttgaagccgatttccatctccgcaccgctataggtaacgtcgaggatctcttccgcttcttcctgttccgggttgttggcggtgattttcagctggttttcgctgacataaagacgtacgccgcggaatttctcgttagagagaatcgccgcgcgagcaaacgcctgcttgagcagatcgcagccagcttccagatgtttgtccgggttcttcggcagaacgcggcgataatccgggaagcgaccatccaccagtttggaggtgaagataaagtcgccaacgtgggcgcgaatgttgttgctgccaatctgtacgcgcagcggattgtcgccgccgtcgagcatacgcatcagttcaatcacgcctttacgcggtacgatcaccgaatggcttggcaaagattgaccaattggcattgaacagaccgccagacggtggccgtcggttgccacggtgcgcagttcttcaccttcggtttcaaacagcataccatttaagtaatagcgaacgtcctgatgcgccatagaaaactgggtcgcttcaatcagacgcttcatcgttgcctgcggcagggtaaattcgacttcactctgccagtcatcgaggttcgggaaatccgccgctggcagggtagacagcgaaaaacggctacgcccggagcgtaccagcatccgttcaccttccagctgcacggcaatttccgcgccttcaggcagaccacggcagatatcaaagaatttgcgcgccggaacggtcgtcgctcctggctcgtgtggctgaaccagcgcaacacgtgccaccatttccatctcgagatcagtaccggtcagcgacaacgtaccgtcagcaacctgtaacagcagattaccgagaatcggtagcgtaggacgaccacctaacggaccgctcacctgttgtagcggttttaataaatgctcacgttctacggtaaatttcataggtttacgatgacaatgttctgattaaatttgaaaaatcttctttgatatcgtggctctcttcacgcaactgctcgatcttacggcaggcatgaagcaccgtcgtgtggtcacggccaccaaacgcatcgccaatctccggcagactgtggttagtcagctctttcgccagcgccatcgccatctggcgcggacgcgccaccgagcgggatcgacgcttggaaaggagatccgcgactttgatcttgtagtactccgccaccgtcttctgaatattgtcgatggtgaccagtttttcctgcaatgccagcaagtcgcgcagcgcctcacgcacgaagtcgatggtgatcgcccgtccggtaaagttggcattggcaatgacgcggttcagcgccccttccagctcacgtacgttagatcgtagacgcttggcgataaagaacgccacttcgcccggcaaacgaatgtcgttttcgtcggcctttttcatcaggatcgccacacgggtttccagctctggcggttcgatcgccacagtcagtccccaaccgaagcgggatttcaaacgatcctcaacgccgttgatctctttcggatagcgatccgaggtgagaatgatctgttgattaccttccagcagggcgttgaaggtgtggaaaaactcttcctgagatcgttctttattagcaaaaaactgaatatcgtcgatcagcagtgcatctacggaacggtagtagcgtttaaactcttcgatcgcgttgttttgcagggctttaaccatgtcctgaacaaagcgctcggagtgcatataaaccactttggcattcggcttgcgcgccataatgccgttacccaccgcatgcagcaggtgagttttacccagacccgtgccgccataaaggaacaacgggttataggcaccgccagggttatccgccacctggcgagccgccgcgcgcgccagttggttagatttaccttcaacgaagttatcaaacgtgtgtttgacgtttacgttagaacgataggtcggttctgccggggccgggacgttatcccaacctgagcgcgtagaaggcgcagcacgttgcggctgcgtttgcgccacctgtgcaggggccgcgacgttgctcgtcactgccgcttgtggcgtttgcgtcaccggtttggtgccgacttcaaaacgcagctgtggggcatccgctccgcagaaactggttagcagtccattgatattattaaggtacttgtcccgtacccaatcgaggacaaaacggtttggcgcgtacagggccagcgtgttatcgctcagttccgcctgcaatgggcgtatccacatactgaattctgtggctggtaactcatcctgcaatcgggcaagacactgctgccaaagcgaaagtgacacggcggactccactcgaacaaaagtcgataatgactaaggctgaaacattcatgattgttgacgtacgtcgaaaagaccctgcttgagggtgacgcacgaaccgctgtctgcggttatatgcccgatcaagatcctgcaaaacgatcgggaccgcggatcatagcctaaactgcgcaagagatcttctgtttctcacagattttcccgatttatccacaggactttccagaactcgctaagtgtaaacgatcctgccgcgaggcgggcacgatttacgccgcatattggaaaatttaatgaccatagacaaaaattggcttaatcgatctaataaagatccaggacgatccttgcgctttacccatcagcccgtataatcctccacccggcgcgccatgctggtttccactggtgtgaggtcgtacattttccctgcgaaaaggtgcggaaaagcgcggtaaataaggaaagagaattgactccggagtgtacaattattacaatccggcctctttaatcacccatggcttcggtgtccatcgtttcatttttcggcggatatccaataaagccattgaatttattcaagtttaggtagaaatcgccatgaaacgcacttttcaaccgtctgtactgaagcgcaaccgttctcacggcttccgtgctcgtatggctactaaaaatggtcgtcaggttctggcacgtcgtcgtgctaaaggccgcgctcgtctgaccgtttctaagtaataaagctaacccctgagtggttaagctcgcatttcccagggagttacgcttgttaactcccagtcaattcacattcgtcttccagcagccacaacgggctggcacgccgcaaattaccattctcggccgcctgaattcgctggggcatccccgtatcggtcttacagtcgccaagaaaaacgttcgacgcgcccatgaacgcaatcggattaaacgtctgacgcgtgaaagcttccgtctgcgccaacatgaactcccggctatggatttcgtggtggtggcgaaaaaaggggttgccgacctcgataaccgtgctctctcggaagcgttggaaaaattatggcgccgccactgtcgcctggctcgcgggtcctgatagccctcattcgggtctatcaacgcctgattagtccgctactcgggccgcattgtcgtttcactccaacctgttcaagctacggaattgaggcattgcgcaggtttggagtgataaaaggcagttggttgacggtgaaacgcgtattaaaatgccaccctttacaccctggtggtgacgatcccgtcccgcccggaccatttgataccagagaacactaacgatggattcgcaacgcaatcttttagtcatcgctttgctgttcgtgtctttcatgatctggcaagcctgggagcaggataaaaacccgcaacctcaggcccaacagaccacgcagacaacgaccaccgcagcgggtagcgccgccgaccagggcgtaccggccagtggccaggggaaactgatctcggttaagaccgacgtgcttgatctgaccatcaacacccgtggtggtgatgttgagcaagctctgctgcctgcttacccgaaagagctgaactctacccagccgttccagctgttggaaacttcaccgcagtttatttatcaggcacagagcggtctgaccggtcgtgatggcccggataacccggctaacggcccgcgtccgctgtataacgttgaaaaagacgcttatgtgctggctgaaggtcaaaacgaactgcaggtgccgatgacgtataccgacgcggcaggcaacacgtttaccaaaacgtttgtcctgaaacgtggtgattacgctgtcaacgtcaactacaacgtgcagaacgctggcgagaaaccgctggaaatctcctcgtttggtcagttgaagcaatccatcactctgccaccgcatctcgataccggaagcagcaacttcgcactgcacaccttccgtggcgcggcgtactccacgcctgacgagaagtatgagaaatacaagttcgataccattgccgataacgaaaacctgaacatctcttcgaaaggtggttgggtggcgatgctgcaacagtatttcgcgacggcgtggatcccgcataacgacggtaccaacaacttctataccgctaatctgggtaacggcatcgccgctatcggctataaatctcagccggtattggttcagcctggtcagactggcgcgatgaacagcaccctgtgggttggcccggaaatccaggacaaaatggcagctgttgctccgcacctggatctgaccgttgattacggttggttgtggttcatctctcagccgctgttcaaactgctgaaatggatccatagctttgtgggtaactggggcttctccattatcatcatcacctttatcgttcgtggcatcatgtacccgctgaccaaagcgcagtacacctccatggcgaagatgcgtatgttgcagccgaagattcaggcaatgcgtgagcgtctgggcgatgacaaacagcgtatcagccaggaaatgatggcgctgtacaaagctgagaaggttaacccgctgggcggctgcttcccgctgctgatccagatgccaatcttcctggcgttgtactacatgctgatgggttccgttgaactgcgtcaggcaccgtttgcactgtggatccacgacctgtcggcacaggacccgtactacatcctgccgatcctgatgggcgtaacgatgttcttcattcagaagatgtcgccgaccacagtgaccgacccgatgcagcagaagatcatgacctttatgccggtcatcttcaccgtgttcttcctgtggttcccgtcaggtctggtgctgtactatatcgtcagcaacctggtaaccattattcagcagcagctgatttaccgtggtctggaaaaacgtggcctgcatagccgcgagaagaaaaaatcctgattcggtgagttttcgctaaaataagggcggtcagttgaccgccttttttcttttcgtagggcggataagcaccgcgcatccgccacacaaagcaacaggaacatcatgagcgataatgacactatcgtagcccaggccacgcctccgggacgtggcggcgttggcatcctgcgcatctccggcttcaaagcccgtgaagttgccgaaaccgtgctgggtaaactgcctaagccgcgctacgccgattatcttccgtttaaagacgccgacggcagcgtgctcgatcaggggattgcgctatggttccctggcccgaactcgttcaccggcgaagatgtgctggaactgcaaggtcatggcggtccggtgatcctcgacctgctgttaaaacgcattctgaccattcccggcctgcggattgctcgccctggtgagttttccgaacgcgcgtttcttaacgataaacttgacttagcccaggccgaggcgattgccgatcttatcgacgccagttcggaacaggcggcccgttcggcacttaactcgctgcaaggcgcattctccgcacgggttaatcatctggtagaagccctcacccacttgcgcatttacgtcgaagcggcaattgatttccccgatgaagagatcgatttcctctccgacggaaaaattgaagcccagctcaatgacgttattgccgatcttgatgcagtgcgtgctgaagcacgtcagggtagtttgttgcgcgaagggatgaaagtggtgattgccggacgtcctaacgccggtaaatcgagcctgttaaacgcgctggcggggcgtgaagcggcaatcgtaaccgatatcgccggaactacgcgtgacgtgctgcgtgagcatatccacattgacggaatgccgctgcatatcatcgataccgccgggctacgtgaagccagtgacgaagtagaacgtattggtatcgagcgcgcgtggcaggaaattgaacaggccgaccgcgtgctgtttatggtcgatggcaccacaacagacgccgtggatccggcagagatctggccggaatttattgcccgtctgccagcgaaactgccgatcaccgtggtgcgcaataaagccgatatcaccggcgaaacgctgggaatgagtgaagtgaacggtcacgcgttaattcgtctctcggcaaggactggtgaaggcgtggacgtgctgcgtaaccatctcaaacagagcatgggctttgacaccaacatggaaggcggcttcctggcgcgtcgtcgccacctacaggcgctggaacaggcagcggaacatctacaacagggcaaagcgcaactgttgggagcctgggcaggtgaactgctggcggaagagttgcgtctggcacagcagaacttaagcgaaatcaccggggaatttacttcagacgacctgctggggcggattttctccagcttctgtattggtaagtaaccgcgcttacgaagccgcattctgactgtcagatgcggcttcgcttcattgttaccactcctgttattcctcaaccctttttttaaacattaaaattcttacgtaatttataatctttaaaaaaagcatttaatattgctccccgaacgattgtgattcgattcacatttaaacaatttcagaatagacaaaaactctgagtgtaataatgtagcctcgtgtcttgcgaggataagtgcattatgaatatcttacatatatgtgtgacctcaaaatggttcaatattgacaacaaaattgtcgatcaccgcccttgatttgcccttctgtagccatcaccagagccaaaccgattagattcaatgtgatctatttgtttgctatatcttaattttgccttttgcaaaggtcatctctcgtttatttacttgttttagtaaatgatggtgcttgcatatatatctggcgaattaatcggtatagcagatgtaatattcacagggatcactgtaattaaaataaatgaaggattatgtaatggaaaactttaaacatctccctgaaccgttccgcattcgtgttattgagccagtaaaacgtaccactcgcgcttatcgtgaagaggcaattattaaatccggtatgaacccgttcctgctggatagcgaagatgtgtttatcgatttactgaccgacagcggcaccggggcggtgacgcagagcatgcaggctgcgatgatgcgcggcgacgaagcctacagcggcagtcgtagctactatgcgttagccgagtcagtgaaaaatatctttggttatcaatacaccattccgactcaccagggccgtggcgcagagcaaatctatattccggtactgattaaaaaacgcgagcaggaaaaaggcctggatcgcagcaaaatggtggcgttctctaactatttctttgataccacgcagggccatagccagatcaacggctgtaccgtgcgtaacgtctatatcaaagaagccttcgatacgggcgtgcgttacgactttaaaggcaactttgaccttgagggattagaacgcggtattgaagaagttggtccgaataacgtgccgtatatcgttgcaaccatcaccagtaactctgcaggtggtcagccggtttcactggcaaacttaaaagcgatgtacagcatcgcgaagaaatacgatattccggtggtaatggactccgcgcgctttgctgaaaacgcctatttcatcaagcagcgtgaagcagaatacaaagactggaccatcgagcagatcacccgcgaaacctacaaatatgccgatatgctggcgatgtccgccaagaaagatgcgatggtgccgatgggcggcctgctgtgcatgaaagacgacagcttctttgatgtgtacaccgagtgcagaaccctttgcgtggtgcaggaaggcttcccgacatatggcggcctggaaggcggcgcgatggagcgtctggcggtaggtctgtatgacggcatgaatctcgactggctggcttatcgtatcgcgcaggtacagtatctggtcgatggtctggaagagattggcgttgtctgccagcaggcgggcggtcacgcggcattcgttgatgccggtaaactgttgccgcatatcccggcagaccagttcccggcacaggcgctggcctgcgagctgtataaagtcgccggtatccgtgcggtagaaattggctctttcctgttaggccgcgatccgaaaaccggtaaacaactgccatgcccggctgaactgctgcgtttaaccattccgcgcgcaacatatactcaaacacatatggacttcattattgaagcctttaaacatgtgaaagagaacgcggcgaatattaaaggattaacctttacgtacgaaccgaaagtattgcgtcacttcaccgcaaaacttaaagaagtttaattaatactacagagtggctataaggatgttagccactctcttaccctacatcctcaataacaaaaatagccttcctctaaaggtggcatcatgactgatcaagctgaaaaaaagcactctgcattttggggtgttatggttatagcaggtacagtaattggtggaggtatgtttgctttacctgttgatcttgccggtgcctggtttttctggggtgcctttatccttatcattgcctggttttcaatgcttcattccgggttattgttattagaagcaaatttaaattatcccgtcggctccagttttaacaccatcaccaaagatttaatcggtaacacctggaacattatcagcggtattaccgttgccttcgttctctatatcctcacttatgcctatatctctgctaatggtgcgatcattagtgaaacgatatcaatgaatttgggttatcacgctaatccacgtattgtcgggatctgcacagccattttcgttgccagcgtattgtggttaagttcgttagccgccagtcgtattacctcattgttcctcgggctgaagattatctcctttgtgatcgtgtttggttcttttttcttccaggtcgattactccattctgcgcgacgccaccagctccactgcgggaacgtcttacttcccgtatatctttatggctttgccggtgtgtctggcgtcatttggtttccacggcaatattcccagcctgattatttgctatggaaaacgcaaagataagttaatcaaaagcgtggtatttggttcgctgctggcgctggtgatttatctcttctggctctattgcaccatggggaatattccgcgagaaagctttaaggcgattatctcctcaggcggcaacgttgattcgctggtgaaatcgttcctcggcaccaaacagcacggcattatcgagttttgcctgctggtgttctctaacttagctgttgccagttcgttctttggtgtcacgctggggttgttcgattatctggcggacctgtttaagattgataactcccacggcgggcgtttcaaaaccgtgctgttaaccttcctgccacctgcgttgttgtatctgatcttcccgaacggctttatttacgggatcggcggtgccgggctgtgcgccaccatctgggcggtcattattcccgcagtgcttgcaatcaaagctcgcaagaagtttcccaatcagatgttcacggtctggggcggcaatcttattccggcgattgtcattctctttggtataaccgtgattttgtgctggttcggcaacgtctttaacgtgttacctaaatttggctaaatccttcaagaagccagccattcgctggcttcttgcctctcaggaaatcacttatgtccaaatggcaactcgcctgatcctccttcaccacgtatgctttgcgtcaccttactatcaggacgctttagcccatgtcccgctttttgatttgtagttttgccctggttttactttatcccgccgggattgatatgtacctcgttggtttaccgcgcatcgccgccgatctcaatgccagcgaagcgcagttgcatattgcgttctccgtatatctggcggggatggcagctgcgatgttatttgccggtaaagtggccgatcgttcagggagaaagccggtcgccatacccggcgcggcgctatttattattgcctcggtgttctgttcactggctgaaaccagcacgttatttcttgcaggccgatttctacaggggttgggcgcaggctgttgttacgtagtggcgttcgctattttgcgcgacacgctggatgatcgacgtcgggctaaagtgctgtcattactcaacggtattacctgcatcattccggtgttagcgccagtgctcggacatctgattatgcttaaattcccgtggcagagtctgttctgggcgatggcaatgatgggcatcgcggtactgatgttgtctttgtttattttaaaagaaacgcgcccagcggcccccgcagcttcggataaaccacgagaaaatagcgagtcgctgcttaaccgttttttcctcagccgtgttgttatcaccaccctcagcgtttcggtgatcctcactttcgtcaacacgtcaccggtattgctgatggaaatcatggggtttgagcgcggtgaatacgccaccattatggcgctgaccgctggcgtcagcatgaccgtttcattctccacgccatttgcgctgggaatttttaagccacgtacgttgatgatcacctcacaggtgttattcctggcggcggggatcactcttgccgtttcaccttcccatgcggtttctctgtttggtatcacgctgatttgcgccggtttctcggtaggttttggtgtggcgatgagtcaggcgttagggccgttttcattacgcgcgggcgtagccagctcgaccttaggtattgcgcaggtttgcggttcgtcactgtggatttggctggcagcggtggttggtatcggcgcatggaatatgctgatcgggattctgattgcctgtagcatagtgagcctgttgctgattatgttcgtcgcgcctggacgccccgttgccgctcatgaagaaatccatcaccacgcttgatctcaatctgctgctttgtctgcaactgctgatgcaggagcgcagcgtaaccaaagcggcgaagcggataaacgtgacaccttcggcggtgagtaagtcgctggcaaagttaagagcgtggtttgacgacccgctctttgtgaactcaccgctgggtctgtcgcccacaccgctgatggtcagcatggagcaaaatctggcggaatggatgcaaatgagcaatctgctgctggataaaccgcaccaccagacaccgcgcggcctgaagtttgagttggcggcggaatcgccgctgatgatgatcatgcttaatgcgctgtcgaaacggatctaccaacgttacccgcaggcgaccatcaaactacgtaactgggattacgattccttagatgccattactcgtggtgaagtggatattggtttttccggtcgcgaaagccatcctcgctcgcgggagctgttaagctcgctaccgttagccattgattatgaagtgctgtttagtgatgtaccctgcgtctggttacgcaaagatcatccggcactgcatgaaacgtggaatctggacacctttttacgttatccgcatatcagcatttgctgggaacagagcgacacctgggcgctggacaatgtgttacaggagctggggcgcgaacgcacgattgctatgagcctgccggaatttgagcagtcactgtttatggcagcgcaacccgacaatctgctactggcgaccgcgccgcgctactgtcagtactacaatcaactccatcaactgccgttggttgctcttcctctcccgtttgacgaaagccagcaaaaaaagctggaagttccttttaccctgctgtggcataaacggaacagccataatccgaagatcgtctggttacgggaaaccattaaaaacctttacgcgtcgatggcataaccgaatcgtatgaaacgcgacccaatttcacaataaaatgtaaaaaagttgtaataagcttgtctgaatcgaacttttagccgctttagtctgtccatcattccagtaaatgattactcttgtattcataatggaccattaagcatggagcgaaaaatggcgactcactttgcccgagggattttaacggaaggacatctgatttctgttcgtctcccctcccagtgtcatcaagaagcccgaaacattccccctcatcgtcaaagccgttttctggcgtctagaggtttactcgcagaactgatgttcatgctgtatggcattggcgaattgccggaaatcgtcaccctgccgaaaggtaaaccggttttcagtgataaaaatttgccttcgttttctatttcctatgccgggaatatggttggcgtggcgttaacaatcgaaggtgaatgtggtctcgatatggaactacagcgtgcgacgcgcgggtttcatagcccacacgcgcccgataaccacaccttttccagcaatgaatcgctatggatcagtaaacaaaacgatcctaacgaagcgcgggcgcagctcatcacgctgcgccgaagcgtgctaaaactaaccggtgatgttttgaatgacgatccgcgcgatctgcagctgctgcccattgccggacgcctgaaatgtgctcatgtaaatcatgtagaagcgttatgcgacgcggaagacgtgctggtgtggtccgtggcggtcacgcccacgattgaaaagctcagtgtctgggagttagatggcaaacacggctggaaaagcctgccggatattcacagccgcgccaacaatcctaccagccggatgatgcgttttgcccaactctctaccgtgaaggctttttcgccaaattgatagacaaccacaggagtcatcatgtctgaaaaattgcaggtggttacgttactggggagcctgcgcaaaggctcatttaatggcatggttgcacgtaccctgccgaaaattgctccggcgagcatggaagtcaatgcgttaccttccattgccgacattcccttgtatgacgctgacgtacagcaggaagacggttttccagcaacggttgaagctctggcggaacagatccgtcaggctgacggtgtggtgatcgtcacgccggaatataactactcggtaccgggtgggctgaaaaatgccatcgactggctttcccgcctgccggatcaaccgctggccggtaaaccggtattgattcagaccagctcaatgggcgtgattggcggcgcgcgctgtcagtatcacctgcgccagattctggttttcctcgatgcaatggtgatgaacaagccggaatttatgggcggcgtgattcagaacaaagttgatccgcaaaccggagaagtgattgaccagggtacgctggaccacctgaccgggcaattgaccgcatttggtgagtttattcagcgagttaagatctaaataaataacccgccagcaatcatgcatggcgggtttttaacgcgctatcgattttagtgagcgtcgataaacacaatcttcaggataaacagcagcgcaacgatgattacgcacgggcttagatcacgcagacgtccggtaccgattttcattacgcagtaggagataaagcccagcgcaataccttcggtaatcgaaaagctgaacggcatcatcacggcggtaataaacgccggaacagattcagtaagatcctgccagttcacgcgtgccagactggaagtcatcagcacgccaacgtaaatcagcgcaccagctgcagcgtagcctggcaccatccccgccagcggcgacagaaagataaccagcaggaacagcagaccaacaacgactgccgtcagaccggtacgaccaccaacagaaacgccggaagaagactcgatatacgccgtaacagaagaagtaccgataaacgaaccggtaacagaagagatactgtcgacatatagcgcctgcttcatgcgcgggaatttacccttctcatccgccagacctgctttatcggtcacgccaatcagcgtaccggaggagtcaaacaggttgaccagcatgaaagagaaaatcacccctgccaggccgaggttaaacgaaccggctaaatctacatgacccacgacagtcattacgctcggcggcgcagaaacgatgccattatagtggacatcacccagcatccagcccagcagcgttgtcaccacgatggaaaccagcaccgccgcgtgaatgttgcgcgaggccagaatggcgatgatgaagaagccgaggatccccagcagcacgctgtgagaagtcagattaccgatgctgaccagcgtttccgggttagcgacaatcacacctgcattcttcagtcccatcataccaatgaacagaccgataccgctggtgatgcccacacgcagactcaccggaatgttggcaatcatccagtagcgaacgcggaaaatcgtcagtaacagcagacctatcgcgccccagaagattgcgcccatcccgacctgccacggcaagcccatcgcctgcacaacgacaaaagcgaagaacgcattcaggcccatagcgggtgccagtgcaactggcaggttagcaaacagtcccatcataatactgccgaatgcagcaatcagacaggtagtgacgaagacggcgctggtatccatgccagcaacgccaagaatttgcgggttaacaaaaacgatgtaaaccatcgtcaggaaggtggtaaaaccagcgatcacttcggtccgtgccgtcgtgccatgttcgcgcagtttaaacacgcgttccagcatcccctggccagaagcctgggttgtgtgttgttgactcattatctatttccgaacaaggagggaaaatccgtcgctatcgtataccaaaatgagacaataggcgcgtttgtgagagacttttttattggatttacttatacggcaacgattgcgttgcgcaaatcggctctacgaaaacgttaaactgattaaaaaggaaaggcatgtcccggatagaagcggtatttttcgactgcgacggtacgctggtcgacagtgaagtcatttgctctcgcgcatatgtaacgatgtttcaggaatttggtattacgctcgatcctgaagaggtattcaaacgtttcaaaggtgtaaaactgtacgaaattatcgatattgtttcccttgaacatggtgttacgttagcgaaaacagaagctgaacacgtttaccgtgcagaagtcgctcggctgttcgattcagaactggaagccatcgaaggggctggagcgctcctgtcagcgatcactgcgccaatgtgtgtggtatctaacggcccaaataacaaaatgcagcattctatgggcaagctgaatatgttgcactacttcccggataaactgttcagcggctacgatattcagcgctggaagccagacccggcgttaatgttccatgcggcaaaagcgatgaatgtaaatgtagaaaactgcattctggttgatgactcagttgccggtgcgcaatctggtatcgacgcaggtatggaagtgttctacttctgcgccgacccgcacaataagccgatcgttcacccgaaagtcaccacctttacccatctttcgcagttaccggaactgtggaaagcgcgtggttgggatattacggcatagttcttcacactcccttcacttaccccgcttaaattggcgctcaaaggtaagttaagggtgtttgatatgtctgtttcacgtcgggtaatacatcacggactttattttgcggttttaggaccgttaattggtgttctgtttcttgtcctctacatattcttcgcaaaagaaccgctggttcttttggtaataatacaggtacttccattgtttctcttattgtcgattactacgggagctattcctgcattgttaaccggcgtgatggtcgcctgtctgccggaaaagatcgggtcacagaaaaattatcgttgtctggctggtggcataggtggcgtcgttatcaccgagatctattgtgcagttattgtacatattaagggcatggcttcctcggagttgtttgaaaacattctttctggtgacagtctcgttgtccgcatcattcctgcattgctggcaggtgtggtgatgagcagaatcattacccgtctgcccggattggatatttcatgtcctgaaacagactctttaagttaagcgggatactttatctttgggctactcaaaagcagacaggatgttactatgactcaaaatatcaggccgttaccccaattcaaatatcatcccaagccactggaaacaggcgcatttgaacaggataaaaccgtagagtgcgattgctgtgaacaacagacgtcagtttattactcgggtcccttttattgcgttgatgaagttgaacatctctgtccgtggtgtattgcggacggttctgctgctgaaaagtttgcaggtagttttcaggatgatgccagcatagaaggtgttgaatttgagtatgatgaagaggacgaatttgccggtattaagaacacatatcctgatgaaatgctgaaagagttggttgaacgcacgccaggttatcatggatggcaacaggaattctggcttgcgcattgtggcgatttctgtgcttttatcggctatgtgggctggaatgatataaaagatcgcctcgatgaatttgccaaccttgaagaagattgtgagaatttcggtattagaaattctgatctagctaaatgcctgcaaaagggtggtgattgtcagggttatctcttccgctgtctccactgcggcaagctgagactgtggggtgatttttcgtagttatttaaataatgagaacaggccggagcgtaattcatacatccggccttatttcttcagcttaaccgagcgctaattctgcggcagcggctttatcagcgattaccatcagcgaaggatgcagctgcaacacggaagctggaacatcttcggtaaccggaccttgcagcacatttttcagtgcctgcgctttacctgcgccactgacaattatcagcaagtttttcgccgccatgatgcttttcggccccatcgtcacgtagctgtcaggcactaacgaaaagtcgccgcccaactcaccatgcgccacaatatcaaccatctctccctggatcgggaactccacggtttgctcatggaaatgggtcgtattcggcaaattgccacaaaaatgaccatctgcacctaatcccagcaccaccaaatccaggccgccttcacgcgccagtttctgatcatgctcgcggtagttatcaatagtgagcttctggatattctcttctttgatccccgcaggggtgaaaaacagattacgcagattggtaatcgttacaccttctccctctttgccgcgaaagggaatttcatcgaaattatagaaatagcagttatcgtaccagggcttacctttaaccagggtggtgaggtattcatacatgcctttgggcgtgctaccggcggtaattgccaggttaacacgacgcgtcttcgacatataaccaagcagatggtgtgccgcgacacggctcatttcctggtaatcttcggtaatgattaatttcatcttagtgccttattttatttaaataatttctgtacgaaggctgcataggcaggccgccagacatccatttcatggttcaggccgggatattcctggtaatcaaacttaatttttttctgctcaagctcagttttcagcccggcgatatccttgccggttacgacatctttatcaccaacgaccacagtaaaattacgtagttgctggttaatagctgccggatcgttcagccgggccgcgacaccttcatccggtacggttgtcgtggtaacaccactgaatgtggccagccatccaaagctttccagatgattcattccggaaaccagcgcctggtacccgccttgtgaaagccctgccagcgcgcggccatcggcatctttacggacattaaaacgcttgctaatcagcgggataatatcgttcatcagttcgcgatctgccgctttagcattcagcggataaaagactttacgtctttcctgaggcacgaaatcttcgggaataatgcccttcgcatcggtttctgtatccgggatcaccaccagcatcggtttaattttcccttcagcaagcaggttatccatgatttgcgggatacgcccctgatcgatagcggaacgtccggtatcaccaaagccgtgatagaaatagagcactggcaaaggctcgcccatgccggtgtatcctggcggggtccagacatacatctgacgttcagattgcaatgcgttggagtggtaagttatggcgatcaaatcaccatgcgcaacagaacgcgtatccagataactgcctggcaccagaatcatactggagttaacctggcgctgaggcttagtcattgcggtgcctgtatcaatgctgcgtacaccatcaacattgaaaaaatactcgtacaggttgcctttcaggataggtgtgcgccacgaccagactcctgcttcgtctttggtcatcgggtgaatattgtccggaaccggaacacccaccactacagagacattttttgccccaggggcaaagtagcgaaaggtcacgctgttatcggcattgacctgagtcacatactgtttcaccgggatagtgggtgccgggctggctggcatatccgctgctatggcccactgagcagaaataccgctggcaatagccagcgttaaagcagcaatttttatattcatcgtaatattcctttcattaagttccattaccaccagatttcagcctgggcaccgacagcaaactggtcgtctttattgtcttcaaaggtgaagccatccagttcgttttccagggctttgatatacgtggcgtagaaacgaatttccggacgcgaggtcaacatactggtattgactttaaaggtatggaagagcgtggttttataaccagactcattaaatttattactattcgcatctttgttttgctgggtgaaatagcccagttcaacacctgtctggttatattggtcccaaatataggccgggcgaacaaccgcacgaatagattcgaaatcagagtgtgcgcctgtttcgtagctataaatatcgttaccgaaggagtaaacaatcgcgttagccacaataaaatgatcaccgatataggcttcgccctgcgaggtcagacgaactgctgttccgccggtgtgatcaccataataacgaccattaaaggtggtaaatggacttgcgccagcataacggccaaagttactggcgatagagttattcgcaaccaggaaggagaattcgttgaagccacctttatcaaatttctgcgttaaagatgtgccgaacatccaggtatctttccagtcataatacccgttattatcctgattatctttttccgatgcgctttcgtttgccgtgacataacgaccactcaccattaaggtcgctttatcccataacgggatatctttatagcgtaaatcaatagtattggtattaatctgctgtttgttttgcaggctgcgatcgtaatcatcgacatcttcgcgaaccagcgcgatatcaattttacccggaccgactttccagttttccagacctacacccgctgcggcatcagtacgctgcgttttccagtccagcatctggatttcaattttcggcgcaccgtgtttacccacccagaaatcagcctctggcgcaaagggcaggaaacctttggtggtaacgtacatatcggagaactgcataaagttctcgccaccggcgttatcgccaaaccagccggtagagtactgctgaccaacgttaccatccatcatcacaacggcatcaacccgtttgccgttttcgttgtagacacgttgttttaactgcaaatcaaaccagccggagtattcgttaccaaagcggcccagagaaccaatcgcccatgatttaggtgaaccatgagaggcggtcccccaaccagaacggtaatagccgttgtaactaaagccaatttcatctttcacaaacttactgaaatctttcagagtcatggaagaataaatcgagcctgtctcactggcatttttctcttcatttttgaccagtacagcatcaggttttgcggcactactggtcgggaacggattggcggcatacccttgatcattcgtacttacgctacgattcaccgtcgctggcgtatattttttcttctcttcatctttatactttttgagttcgctttgcgtttctcttaacgctttttctaataactcaaggcgttgttccaccgttaatgattcagccaatgattgtgcagaaaaggctaacggtgccattaataagatggcagaggtaataagatttcgtctaaacataatatccctttatggtgcaaagaaagaattaacgtatcgcatccagactgttctgaatgcgacgataattaaggtgctttattggttatttttttaatgacagcccccgcgttttgatcacttctgcataccatccgaagcttttcttacgcgttcttgtgaggcttccttcgccattatcatcacgatccacataaataaagccgtagcgcttagacatttgtgaatgagatgcactgactaaatcaattggcccccaactggtgtaccccataatatccacaccatcggcaatcgcttcatttacctgtaccaggtgatcgtttaaataggcaattcgataatcgtcctgtatcgaaccatccgcttcaacgctgtcttttgcgcctaatccgttctcgacaataaataacggtttttgataacgatcccaaagcgtatttaacagaacccgtaatccaaccggatcaatttgccacccccactctgaacttttcagatgcggattggggatcatattcagtatgttgccctgcgcatttttattaatgctttcgtcgtgggaaacacaaccagtcatgtaataactaaaagagatgaaatcgacggtatgttttaaatcttctgcgtcactttcagtcatctcaatggtgatattgtggtcgcggaagaaacgctgcatatagccgggatactggccacgcgcctgaacatcaccaaagaacatccagcgccggttctcttccatggcctgcaacatatcctgtggctggcaggtgagggggtaaaccagcccaccgagaagcatattgccgattttcgcttcggggagcaggctatgacaggctttaactgcccgcgcactggcaaccagttgatgatggatcgcctgataaacttccgcctcgccactctcttctgccagccccacgcccgtgaatggcgcgtgtaacgacatattgatttcattaaacgtcagccataacgctactttatgttggtagcgggtaaagaccgtgcgggcgtaatgctcgaagtgatcgatgaccgcccgattagcccaaccgccgtagtttttcaccagcccatatggcatttcgtaatgggataacgttaccagcggcttgatccccgcctgcgccatttcatcaaacagccgatcgtaaaacgctaaccccgcttcattcggttcggcttcgtcgccctgagggaaaattcgcgcccaggcaatggaaatacgcagacaggtgaagcccatctcggcaaataacgcgatatcttccgggtaacggtgataaaaatcgatggcgacatctttgatattctctttccccaggatgcgcggttccatttttcccataacgccatgaggctgtaaatctgaggtcgtaatccctttgccatcttccagccaggcaccttccacctgattggcagctgttgcgccaccccaaagaaatgtttctggaaatgctttcataattaactccttttatcgttagcgaatgatggataacagcggttcacctgcgcttatctgcgccgtgccgtggggtaatacgtctgtaaaatcatcgctattactgattaataccggcgtcgtcacatcaaatccggcctcgcgaatagcagggatatcaaaagaaatcagccgatcgcctgtattgaccttgtcacccacgttgacgtgagcggaaaagaatttgccgtccagttttacggtgtcgataccgacatgaatcaggatctccacaccatcatctgactcaatgccaatggcgtgtaatgtggcgaacaacgaagcaattcgacccgcaaccggagaacgcacttcaccaaccgagggcagaatggcgatacctttacccaacaggccactggcaaacgtggtatcagcgacgtgaatgagcggcacaatctctcccgtcatcggtgaacagataccgccctgctcaggtggtgtaataacctctggtgttttctcttgcggggcaccctgcgctggctgacgtttagcggtgatgaaatgaagcatcaccgtaccgacaaatgcgcaaccgatggcaatgacaccgccaataacgcggcccagacggtgaaatcaatccccgttgacgggatggtctgcatgaaggtgaaaatactcggcaaaccaaaggagtaaacttttgtttgcgcgtagccaatgatggtggcccccaaagccccactgatacaggcgataacaaaggggtacttacgcggcaggttgacgccatataccgctggttcggtgataccaaacaggcccgtcaacgccgccgatccggctaccacttttttctgcgcatcgcgttcgcagaggaagacgccgagcgccgccccgacctgcgccataatggcgggcattaacagcgggatcatggtgtcgtagcccagcacggtgaagttattgatacacagcggcaccaggccccagtgcagtccgaacatgacgaagatttgccagaagccgcccattaccgcgcccgcaaatgcaggaaccgcctgataaagccagagataaccggcggcaatcatttcgcttatccaggttgatagcggccccaccaacagaaaggtgacgggtgtgataaccatcagacatagcaatggtgtgaagaaatttttgattgccgacggtaaccacgcattaagtcggcgttccagaatgctgcacaaccaggcagaaaaaataatgggaataaccgatgacgagtaattcaacaatgtgaccggaatacccaggaaatccagccccagcgcatccgctttttgcccgttctcgaaagcagtcagaattaatggatgcactaacgctccaccaatcaccatggcagtaaatggattaccgccgaagcgtttccccgcggtgtatcccaggattatcgggaagaaccaaaacaaggcatcactggcgctgaataaaattaaataagtaccactttgttcggtcgtccactgaaaagtgagcgccagagccagcatacctttcaggatcccggttgccgccatcagaccgatcagaggcgtaaaaatacctgaaataacataaacaaagcggtttagcagattacctttctcatcattttccggtgcctgttgcgcttttcgccaaggcctgccacgctgttaaccgccaggaagacatcggccacatggttacctatgaccacctgaaactgaccaccgctttccaccaccataataataccgggggtctttttcagtacctcagcttgcgctttgctttcatcctttaacttaaaacgtaatcgcgttgcgcaatgcatcagactcacaatgttatctgcgcccccgactcctgcgactatttttctggctaactccgtcataacttgccctctaccgctttgcggcaaaactccaaaaaaaaacctgaaaaaacggcctgacgtgaatcaagcaatttttttcaggttttgcccgcttagtgcggtaacaatcctttactcagtaataatatttcagtgttctttgcgcacgcgctctatatttatggctaaaaacataatctctgcgggtgaaattttacgttgatactgcaaaccaataaaaatggcgatccgttccgcacattgccatgcttgcgggtaattttgttttactgcttgttgtaatgattcatcactatcgttaattgaagcatgttcaagaatacgccaggataaaaacttcagatgtgtaaccagtcgctgataactcaagctttcttcctggtaattaaggctgaactgaaattttattaattgcagcatttcgcgcattaactgcgtgacacctgcaacatcctccatatttccgctcatttgggcactgaccagatgcatggcaataaagcccacttcatctttcggtaactgcacgcccaaccgtttatcaataatggttaacgcttcttcccctagctggaactctttcgggtaaagccgctggatatcccacagcaacgggttgggcagcaacacgttttgctgaaagcgtttaatcgcaaactggcaatggtcagttagcgagatataaatactgtcctgtaattttcccaagcgctcctgcgctaaagagataatacgatcacaggttgccatcacctcaagaggaatatgacttaagagttcgcttaatcgcccgttcagttcatgactgctcaaggcatactctttttctattccacttgagttaattctttcgccagcgcgtttttgaaagccaattccgcgccccatgacgactttttcccgctgttgatcatcaataaccaccacaacattattgttgagaattttggtgatttgcatgttcatagcaaggaccttttttataaacaaaaaaacccgacttcaccagtattctctggttatgtcaggttttgcctgcgaatgcagtaacaatccagtcatttattaatggtttttataacgaacatccaggttcggaaattaatttaattgcgtgcagagaaaatagcaatgcgctattgataaaaatatgaccatgctcgcagttattaactttgtgtaattttaggaatttataaagttatatataacaaatcccaataattaagttattgggatttgtctggtgaattatttgtcgctatctttccccgccagcagtttatccagctcatcgccaccgacgtgacggaaatcctgccccttcacgtagtagaagataaactcacaaatattctggcagcggtcgccaatacgttcgatagaacgcgcgcagaacagcgcagtaagtacgctcggaatggtacgcgaatcttccatcatgtaggtcatcagttgacgaacaataccttcgtattcctgatcgacttttttatcttcacgataaatacgtaccgcttcgtcaatgtccatccgcgcgaacgcgtccagcacgtcgtgcagcatctggatggtatgacggcccagcgactccagacttaccagcaacggctgatgctgctgggagaatttctccagcgcagtacggcagattttgtccgccacgtcgccaatacgctccagctcggcaatggttttactgatcaccataaccagtcgcaggtcgctcgccgtcggctgacgtttggcaataatgcgcacgcaggcttcatcgatcgccacttccatcatgttgacgttcttgtcgccttcgatgacgcgcttcgccagatcgctgtcctggttatgcatcgcggtgattgcatcagaaagctgctgctccaccatgccgcccatggtcatcacctgcgtgcggatactttccagttcggcgttgaactggccggaaatatgtttattaagattgagactgtccataacgcactcctgaatcaaccgtaacgaccggtgatgtagtcttctgtttgtttcttcgctggcttggtgaacagatcgtccgtgttgctgaactcaatcaattcgcccaggtacataaacgccgtgtggtcggaacaacgcgcagcctgctgcatgttgtgggtgacgatcaccacggtgtaatcctgcttcagttcggtgatcagctcttcaatacgcccggtagagatagggtcgagcgccgaacacggttcgtcgagcagcagcacttccgggcgaatggcgataccacgcgcaatacacagacgctgttgctgaccaccagagagagagtaaccgctctggtgcaatttatctttggtttcgttccacaatgcggctttggtcaatgcccactgcacgcgctcgtccatgtcggcacgggagagcttctcaaacagacgaacgccaaaagcgatgttgtcgtagatggacatcggaaacggcgtcggtttctggaacaccatgcccactttcgcacgcagcagggcgatatcctgagagttggtcaggatgttgtcgccatcaagcagaatttcaccttccgcacgctgctccgggtacagttcaaacattttgttgaaggtacgcagcagcgtcgatttaccgcagccggacggcccgataaacgccgttacctggtttttagcgatatccaggttgatgtttttcagggcatggaatttgccgtagtagaagttcaaattacgaacctgaattttactcggggcagtttcaaccatactcattgcaatcttttcctcatcgtgcctgatgcacttcgcgaatcaggcttaccgtaggccggatcaggcgttcacgccgcatccggcaaagtgttaaccgtgtacagagtcaaaaaggcgctcggtcggtcccctcgcccctctggggagagggttagggtgaggggaaaaccgtgtcagcaatatcaaccgtgtttattcttcgcgaaaacaacgcgcgccagaatgttcagcagcagtacgcacagggtaatgatcaataccccggcccaggccagctgctgccattccgcaaacgggctcatcgcaaacttaaagatcgtcaccggcaggttggcgatcggctgcatcatgtccgtgctccagaactggttggagagcgcggtaaacagcagcggcgcggtttcaccagcaatacgggcaatcgccagcaggataccggtcatgatcccggacaccgacgctttcagcgtgatcgcggagatcatcttccacttcggtgtacccagcgcataagccgcttcacgcaggctgtccggcaccagtttcagcatgttctcggtggtgcggataacaatcggcacctgcaacagcgccagcgcaatcacgcccgcccagccggagaagtgctccatctgcgccaccacaatggtgtaaacaaacagaccaaccacaatcgatggcgcagagagcagaatgtcgttaatgaagcgaatcacttctgccagccaggatttacgaccatattcagccagataaatccccgccataatgcccagcggcgtaccgaataccgtggcccacaaaattaacaggccgctacctgccagggcgttcgccagaccaccaccttccgtattgggcggcggcgtcatttcagtgaacagcgccagcgacataccgtcgataccgcgggtgatggtggacattaaaatccagatcagccagaacagaccgaaggccatcgtcgccattgagagcgtcagtgcaatacggttcttgaggcggcgacgcgcctgcattttgcggcgggattcagccagcgccgcattggtttgcatttcaaccatagccattagcgtgccccctcattcttagccaggcgcataatcataaacttcgatgcggcgaggacgatgaaggtaatcacaaacaggatcaggcccagttccatcagtgcggcaacgtgcagaccggattccgcttccgcaaattcgttcgccagtgcagaggtgatactgttgcccggcatatacagcgaggcgctgtcgagctggtaggtgttaccgatgataaaggtcaccgccatggtttcaccgagcgcgcggcccagccccagcatgatgccgccgataacaccatttttggtgaacggaagaacgatacgccagataacttcccaggtggtgcagccaataccgtaggccgactctttcatcatcaccggggtttgttcgaacacatcgcgcattaccgccgcaatgtacggaataatcatgatggcgaggatcacgcctgccgcgaggataccgataccaaatgcagggccagagaacagcgcgccaacaatcggaatattcgacatgatattgccgaccggctcctggaagtaaacggcgaacagcggcgcaaagataaacaggccccacatgccgtaaacgatacttggaatggctgccagcagctcaatggcgatacccagcgggcgtttcagccagccgggcgcaagctcagtcaggaacagggcgataccgaaactcaccgggacggcgatcagcagcgcgataaacgaagtcaccagcgtaccgtagatcggcaccaacgccccgtagatatcgttcggtgcatcccactctttggtccacaggaaagccagaccaaatttctgaatgctcggccaggaggagatgatcagagagacaataatgccacccaacatcaatagcacaatcagcgccgccagttttaccagcacgctgaaaattatgtcgccctttttacccggtgggttaaaagcaggcttggttgcagccataagttactcttcagttaaacgcgtttacaaagtcattttgtaatgccggataagccgttaatgccttatccggcctggagttttattagtacagcggcttaccgctactgtctttaatattggtcttccacgcagcgcgaacctgttcaacgacgctatccggcaggctggcataatccaggtcgttcgcctgtttagccccggttttgtacgcccagtcgaagaacttcagcacttctgtgccttgttctggtttcttctgatctttgtggatcagaatgaacgtggtagaggtaataggccatgcatcttcgcctttctggttggtcagatcctgagcgaaggttttgctccagtctgcaccttttgctgcattagcgaagttttcttcggtcggactaaccggtttaccatcagcggagatcagtttggtgtacgccaggttgttctgcttagcgtaagcatattcaacgtaaccaattgcacccggcagacgctgaacgaacgcggcgataccgtcgttacctttaccgcccagaccgatcggccattttacggtagagccagtaccaacgttgtttttccactcttcgttcactttcgccaggtagctggtgaagacgaaggaagtcccggagccatctgcgcggcgtactacagcaatgttttgtgaaggcagtttcagacccggattcagtttggcgatggcttcatcatcccacttcttgattttgcccaggtagatgtcgccgagggttttaccatccagcaccagttcgccagacttcagccctggaatgttaaccgccagcaccacgccgccaatcacggtcgggaactggaacagaccttcctgagccagtttttcgtcagacagcggcgcgtcagaggcaccaaaatcaacggtattagcgataatctgttttacgccaccggaagaaccgataccctggtagttaactttattaccggtttctttctggtaagtgtcagcccatttggcatacaccggcgcagggaaggttgcacctgcacctgtcaggcttgcttctgcaaacacagagaaagcactcatcgataaggtcgcggcgacaacagttgcgacggtggtacgcataactttcataatgtctcctgggaggattcataaagcattgtttgttggctacgagaagcaaaataggacaaacaggtgacagttatatgtaaggaatatgacagttttatgacagagagataaagtcttcagtctgatttaaataagcgttgatattcagtcaattacaaacattaataacgaagagatgacagaaaaattttcattctgtgacagagaaaaagtagccgaagatgacggtttgtcacatggagttggcaggatgtttgattaaaaacataacaggaagaaaaatgccccgcttacgcagggcatccatttattactcaaccgtaaccgattttgccaggttacgcggctggtcaacgtcggtgcctttgatcagcgcgacatggtaagccagcagctgcagcggaacggtgtagaagatcggtgcaatcacctcttccacatgcggcatctcgatgatgtgcatgttatcgctacttacaaaacccgcatcctgatcggcgaagacatacaactgaccgccacgcgcgcgaacttcttcaatgttggatttcagtttttccagcaattcgttgttcggtgcaacaacaataaccggcatatcggcatcaattagcgccagcggaccgtgtttcagttcgccagcagcgtaggcttcagcgtgaatgtaagagatctctttcaacttcaatgcgccttccagcgcgattgggtactgatcgccacggcccaggaacagcgcgtgatgtttgtcagagaaatcttctgccagcgcttcaatgcgtttgtcctgagacagcatctgctcaatacggctcggcagcgcctgcagaccatgcacgatgtcatgttcaatggaggcatccagacctttcaggcgagacagcttcgccaccagcatcaacagcacagttaactgagtggtgaatgctttagtggatgccacgccgatttctgtacccgcgttggtcattagcgccagatcggattcgcgcaccagagaagaacccggaacgttacagattgccagtgaaccaaggtaacccagctctttcgacagacgcaggccagccagggtatccgcggtttcgccagactgtgacaaggtgatcatcaggctgttacgacgcacggcagatttgcgatagcggaattcagaggcgatttcgacgtcgcacggaatacctgctagcgattcaaaccagtagcgggaaaccataccggagttataagaagtaccacaggcgaggatctgaatatgctcaaccttcgacagcagttcgtcggcgttcggtcccagctcgcttaaatcaacctgaccgtggctgatgcgtccggtaagggtgtttttgatcgcgttcggctgttcgtagatctctttctgcatgtagtgacggtaaatgcctttatcgcccgcgtcatattgcagattggattcgatatcctgacgttttacttccgcgccagttttatcgaagatgtttaccgaacggcgagtgatttccgcaatatcgccctcttcaaggaagataaagcgacgggtcaccggcaacagcgccagctggtcagaagcgataaagttttcgcccatccccaggccaatcaccagcggactaccagaacgtgccgccagcagggtatccgggtgacgggagtccatgatcactgtaccgtacgcaccacgcagctgcgggatagcacgcagaacggcctcacgcagagtcccgccttgtttcagctcccagttcaccagatgggcaatcacttcggtgtcggtttcagaaacgaaggtatagccacgcgcttttagctcttcacgcagcggttcatggttttcgatgatgccgttatgcaccaccacaatgtgttcagaaacatgcggatgcgcattcacttctgaaggttcaccgtgggtcgcccagcgagtgtgagcaataccagtgccgccatgcagaggatgttcttccgctgcctgtgccagcatctggactttaccgaggcgacgcaggcgggtcatatgaccttctgcatcaacaacggccagaccggcagagtcatatccgcggtattccagacgacgtaaaccttcaagaaggatttctgctacatcacgttgcgcgatcgcgccaacaattccacacatagtttttgattccgatttatatcgttgtcggtcaacctgtatgcccgttttttcgggcgccccgagccttgtagagagtggggttatttttatagttactgcttgtgggagggagattatgttatctcctcatcccatgtgaccgggttagccggccagaatcactttttctttaccggacgacgccagccttctttctgagtctgcggcacacggctgatagctaatgcattttcgccgacattacgcgtcacagttgtacccgcagcaatggtcgcgcctttgcctactgttaccggggccaccagctgagtgtcggaaccaacaaacacatcgtcgccgataatggtcttaaatttattcgcaccatcgtagttgcaggtaatggttcccgcgccgatgttaacgttatcgccaatttccgcatcgcccaggtaagtcagatgaccagctttcgagcctttacccagacgcgcttttttcatctcaacgaagttaccgacgtgagcaccttccagcaactcagcaccaggacgcaaacgggcaaacgggccaatggtacaggccgctgccagattcgcatcttccacaacggtatacggactgatttcgcaatcatcgccaatcacgctgtttttaatcacgcaaccggtgccaattttcacgcgatgaccgagagtcacgttgccctcgatgataacgttagtatcaatttcaacatcgcgcccgtgagttagcgtaccacgcagatcaaaacgcgctggatcgcgcagcataacgcctgctaacagcagtttttcagcctgttcggactgataaacacgctccagacgggagagttgcaggcggttattcacgccttctacttcgcttaaacgttgcggatgaacggcgacgatttcacgcccttcctgatacgccagcgcaataatgtcggtgatgtagtattcgccctgagcattattgttggtcagcttcgccagccagcgtttcatatctgcgccgttggcaatcagaatgccggtgttgatctcctgaatctgacgctgctcgtcggtggcatctttgtgctcaacaatgccggtaactttgccgttttcacgggtgatacgtccataaccggtcggatcatccagtttcaccgtcagcagaccaatgccaccctgcggtttagcatcacgcagacgctggagtgtttcgacagagatcagcggcacgtcgccgtagagcattaaaatgtcttcatcatcggcaaagaaaggtgcggcctgctgcattgcatgacccgtacccagctgctctgcctgaagcacccagttaaggttgtcgtctttcagcgcctgttttagcagatcgccgccgtgaccgtacaccaggtgaacgtgcgctgcgcctaattcattcgcagcatcaatgacatgctgaaccatcgctttcccggcaagggtatgcagcactttcggaagatcggaatacatgcgcgtgcctttgcctgcggcaaggatcactacgctcatagcattattcaacatacgcgtcctgactgtaatttgagaacgaatttaaaccgcttcaccttgaaaaaactacatttttttcatcgtgaaatggacagaggataaattgttcaataacggattatccccgctgacgaaagcgccattttcgaccatcgtcacgccttttgtctgcagaaaattaaggcagtaccttaatttaagcgtcaggtggatgtttttgctcttatttcgatcaatgaataaacaggaaaacaggggggttttatatcagcaggatctatgtgaacgctattcaggacgggtcacacgcgcaaaaaaaagccagcctgtttccagactggcttttgtgcttttcaagccggtgttacatcgcttttttggtcaactcgataacgcgcagctgcgcgatcgctttggccagttccgcagacgcctgagcgtaatctacgtcgccgtgagagctgctaatgtgctcttcagccttacgtttcgcttccatggctcgcgcttcgtcgagatcctggccgcgaattgcggtgtcggccagaacggtcacgttgccaggctgcacttcaagaatgccgccagacagatagataaactcttcgtgaccgtgctgtttcacgatgcgaatcataccaggcttaatggcggtgagcagcggtgcgtggccagggtagatccccagttcaccttcgctacccgttacctggattttctcgaccagaccagagaacatttgttgctctgcgctgacgacgtccaggtggtaagtcattgccatatcaccctccgattaaggcgttaaagttttttggctttttccacagcttcttcgatggaaccgaccatgtagaacgcctgctccggcaggtgatcgtattcgccttccatgatgcctttaaagccacggatggtgtctttcagggagacgtatttacccggagaaccggtgaatacttctgccacgaagaacggctgggacaggaagcgctggatcttacgagcacgcgctaccaccagtttgtcttcttcagacagttcatccatacccaggatggcgatgatgtctttcagttcctgataacgttgcaggatggactgaacgccacgcgcggtgtcgtagtgttcctgaccaaccaccagcgggtccagctgacggctggtggagtccagcgggtcaacggccgggtagatacccagagacgcgatctgacggctcagtaccacggttgcgtcaaggtgcgcaaaggtggttgccggagacgggtcagtcaagtcatccgcaggtacgtatactgcctgtacggaggtgatagaaccagttttggtggaggtgatacgttcctgcagaacgcccatctcttccgccagggtcggctgataacctaccgctgaaggcatacggcccagcagtgcggatacttccgtaccggccagggtgtaacgatagatgttgtcaacgaacagcagaacgtcacgaccttcgtcacggaatttctcagccatggtcagaccggtcagagcaacgcgcagacggtttcccggcggctcgttcatctggccatacaccagggatactttgtcgataacgttggagtcggtcatttcgtggtagaagtcgttaccctcacgagtacgttcacctacgcccgcaaacacagagtaaccggagtgctcgatcgcgatgttacgaatgagctccatcatgtttacggttttacctacacccgcaccaccgaacagaccaactttaccgcccttagcgaacggacacatcaggtcgataactttgataccggtttccagcagttcctgagagtttgacagctcttcgtaggaaggtgctgcgcggtgaatcgcccaacgctcttcttcaccgatctcgcctttcatgtcgaccggttcacccagtacgttcatgatacggcccagagtcgctttacctaccgggacttcaatcgggtgttcgaggtcttttacatccagaccgcgacgcagaccgtcggaggaacccattgcgatggtacgtacgataccgccgccgagctgctgctgaacttccagcaccagacgctcattaccattttgcacctcaagagcatcgtacacgcgcggtacggcatcctgagggaattcgacgtcaactacggcgccgattacctggacaatctttccagtagccatcttaaatcctctacgaaataacctgtttaaaccgcggcggcccccgagacgatctcggtgagttcctgagtaatgctggcctgacgagctttgttgtataccaactgcagctctttaatcaggctgccgccattgtcggtcgcggctttcatcgccaccatacgggcggcctgctcgctggccaggttttcaaccacgccctgataaacctgagattcgacataacgacgcagcagggtatccagcaacgccttcggatcgggttcgtacaggtaatcccaggatttatgtttcagatcatcatcatctgatgccggtaacggcagcagctggctgatggtcggaacctgagacatggtgttaataaatttgttgctgacaatgtaaagcttgtccagacggccttcgtcgtaggcctgcaacatcacttttaccggaccgatcagttcggacagggaagggttatcccccatgccggtgacctgggcaacaacattgccgcccacggagttgaagaacgacacgcctttcgagccgatcattgcgaggtcgcattgaacgcctttgtcggtccaggtcttcatttccgccagcagttttttgaacaggttaatgttcaaaccaccgcacaaaccacggtcggtcgacaccaccaggtagcccacgcgtttaacgtcgcggtcttccaggtaagggtgcttatattccagattaccgtgtgcaaggtgaccaatcactttgcgcatggtttctgcataaggacggctggccgccatgcgatcctgcgatttacgcattttggaagcggcgaccatctccatcgctttagtgatcttttgcgtgttctggacgcttgcgatcttactacgtatctcttttgcgccggccatgagcttctcctcaatgccttgcggcctgccctaaggcaagccgccagacgttaccaggattgggttgctttgaaggaatcgaggatgcctttcagcttgccttcgatttcgtcgttgtagccaccggtctggttgatctcttgcatcaacggagcgtgatcacggtcgacgtaagccagcagagcggcttcgaagctgccaattttcgacagttcaacatccgccaggtaaccacgttctgctgcgaacagaaccagagactgctgcgcaacggacatcggcgcatactgtttctgtttcagcagttcggtcactttctgaccgtggtcaagctgcttacgtgttgcatcgtcaaggtcggatgcaaactgagagaacgctgccagttcacgatactgtgccagagcggtacggataccaccggacagttttttcatgatcttggtctgtgctgcaccaccaacacgggatacggaaatacccgggttaaccgcaggacgaataccggcgttgaacaggttggtttccaggaagatctgaccatcggtaatggagattacgttggtcggaacgaacgcagaaacgtcacccgcctgagtttcgataatcggcagtgcggtcagagaaccggttttccctttcacttcacctttggtgaaggcttcaacgtattcggcgttaacacgcgcagcacgctccagcagacgagagtggaggtagaatacgtcgcccgggaatgcttcacgtcctggcggacgacggagcagcagggagatctgacggtaagcaacagcctgtttagacaggtcatcgtaaatgatcagcgcatcttcaccgcggtcacggaagtattcgcccattgcgcaaccggcatacggtgccaggtattgcagtgcagcggattcagacgcggttgctaccacaacgatggtgttagccagtgcgccgtgctcttccagtttacgtaccacgttagaaatggtggacgctttctggccgatagcgacatagatacatttgataccggaatcgcgctggttgatgatggcatcgatagccagtgcagttttaccggtctgacggtcaccgatgatcaattcacgctgaccacgaccgattgggatcatggagtcaacagctttataaccggtctgtaccggctgatctacggactgacgttcgataacgcccggagcgattgcttctacagcagagaagccgtcgtgatccagcggacctttaccgtcgattggtgcacccagagtgttaaccacacggcccagcaggccacggccaaccggaacttccaggatacggccagtacacttaactttcatgccttcggcaaggtcagcatacggacccataacaaccgcaccaacagagtcgcgctcgaggttcagtgcgatagcgtaacggttacccggcagggagatcatttcaccctgcatacaatcggccaggccgtgaatgcggataacaccgtcacttacagaaacaatagtaccttcgttgtgagcttcactcacaacattgaactgagcaatgcgctgcttgatcagttcgctgatttcggtggaattcagttgcatgctccagtccccttaagactgcaagacgtctgcaaggcgctcaagacgaccgcgtacgctgccatcaatgaccatatcacccgctcggatgataacgcctgccattacagacttatcgattttgcaattcagcttaactttgcgtgacagacgtttttccatcgcagcagaaattttcgcgagctgttgttcactcagtgcggcagcggaaatgacgtctacctcagcggtagcctcactcacggcacgcaggtgaataaactgctccagaacatccgggagcgcgttaagacgaccattttcagccattacccgaatcaggttctgaccgttttcgtccagttgctcaccacaaactgcgataaacgactcggcgagcgtttctggcgcaagcgcgccagagagaagctctgccatttgttcgtttttggttacctcggcggcaaacgccagcatgtcctgccagcgttctacactttggtgttcgacggcaaagtcaaaagctgctttggcgtaggggcgagctaccgtaataaattcagacatcagcccctccctccttacagttcagcgacaagtttatccacgatgtcgctgttagcagcttcatccacggaacgttcgatgatcttctcggcgccagcaacagccaggatagcaacttgcttacgcagctcttcacgggcacgtttacgctcggcttcaatttccgcctgcgcctgggccacgattttagtacgttcctgttctgcctcagctttcgcttcgtccagaatctgcgagcggcgtttgttcgcctgctcgatgattacctgggcttccgctttcgcttttttcagctggtcggtcgcgctggcctttgcaaggtcaaggtccttatgtgctcgttctgcggaagcaaggccgtcagcaatttctttttgacgtttttcgatggctgccattaatggcggccatacgtacttcatgcagaacagaacgaacaggacaaacgcgatggcctggccgaggattgttgcgttaagattcacagcacaatgcctctatttagttaacgttctgatattgctctttaaataaaagcaacgcttactacgcgacagcgaacatcacgtacagacccagacctacagcgatcatcgggatagcatccaccagacccataacgataaagaactgagtacgcagcagaggaatcagatcaggttgacgcgctgcgccttccaggaatttacccccgaggatgccgataccgatcgcagcaccgattgccgccagacccatcatcacagcggcagccatgtacagcagatccatattcaggttttccatgacagtctccagtttgtttcagttaaaacgtagtagtgttggtaaattaatgttcttcagacgccatcgacagatagacgatcgtcagaaccatgaagatgaaggcttgcagcgtaatgatcaggatgtggaaaatggcccacggcacattcaggatccactgtgaccaccacggcaacagaccagcaatcagaatgaaaatcagctcaccggcatacatgttaccgaacagtcgcaaaccaagtgaaactggtttggacagcaggcttaccccttcaaggattaagttgacaggaatgaacgcccagtgattgaacggctgcagcgtcaactctttcgtgaagccgccgatgcctttcattttgatgctgtagaacagaatcaggataaatacgcccaatgccatagacagcgttacgttcacgtccgcagacggaaccacacgcagtgcaggcagacccagtacatgttcagcaatgtacggcagcaggtcgataggcagtaaatccatcaggttcatcaggaatacccagacgaagatcgtcagggccagcggagcaatcagcttgcttttgccatggtacatgtctttcacgctaccattaacaaagccgatcaccagctcaatcgcggtctgaaacttacctggcacaccgctggtcgcctttttggctacgctacggaataaaaccaggaacaacagacccagcaccaccgagaagaacatggagtcaatattgattgtccagaaggtggctggggggttatgtggatccaccagcgagaatgtacgcaggtccagctgaaggttattcaggtggtgtcctatgtaatcctgcggcgtcatattttctgaagccatgatgccttttaccctttgttgttaattacagccggtgccagtatctgaaccaccagcaccaaaacccacgtaacgatcagcggcaagaataccgcctttaaaaccgccaacgccaccaccagtaacaccaacatcgccagaactttgaaagcttcgccaaatgcgaatgtccaggccacccggcctttcgctggtgtatgcgcctggtgacgccaggcaaatatcataaacaaaacgttaggcagaaagactgccaggcccccgcttattgcagagacgccccagaaggggtctttgaggctgaacagcaatccacttgctatcaccaccagtaactgaacgagcagaagcttccgagcaacgtttcgactcacgagcgacacagacatcacgtttttcactcctgctcccttcgaggtatgccgcgtgtcgtataaaactttctttaaggcttagagtcaagcatcaaaaagcggtcaaattatacggtgcgcccccgtgatttcaaacaataagtagccaaaaggtgaataaatgtttaaatatttttccagtgcatacaattgcgacttttctgctaaccctgttcgatcatgaaaaactgtaaataacgcgtaaacactggtgataaagcgtgcttcagatcacatattgcgcatgttcgcgcacagcatatttatttacttggcaaatgatgtctttgcaagtttatgatatttcagtctaaaaacagatactgttttaataaatgacatttacacaacaaaaaccacccattgacatttttaataatgttttaacagccaatgatggttcttagcgccgatttttagcagactgatattttcactaatgacttattttctgcttaccaaaaaaagccacgttatcttgttgatgcaaaagagtgaacgtggcgttaaatgtaaccagttatatcagtagaaaacctggttgttgttaacagtctaaccggtcaattttttatgatttttttgataaaaattaaattttatttgctttaatcaccaccagatgacgttcgccatccagggctggaacctgaagtttaaccactgattcgacctgatattcttcgggcaacaaagcgatttcatcttccggcatttgccctttcagcgcgtagaaacggccttgctcaccaggaagatggtggcaccagctcaccatatcgttcagagaggcaaaagcgcggctaattacgccatcaaatggcggctctgaaggaaactcttctaccctgctctgtactggttcaatattctccagtttaagctcatgttgcacctgacgaaggaaacgcacacgtttaccaaggctatccaacagagtgaaatgggcttcaggacgcacgatagagagtggaatgcctggcagtcctggtccggtgccgacatcgataaaccgttcaccttgcagatacggtgccaccacaatgctatcgagaatatggcgtaccagcatctcattaggatcgcggaccgaagtcaggttgtacgctttgttccatttatgcagcatattcacgtaggcaataagctggtttttctggtgatcggtaagcgaaatacctgcgtctttcagcagtaaggagagtttgttgagcacggtgattacctgttcttgatgcgttgcctggtaagcgggtgcttaccaggcatttttaatgcgttatgcgctacgacgcagcataccctgttttttcagccacaccagcagaatggagatggccgcaggcgtgacgccagaaatacgtgaagcctggccgatagaggccggtttgtgatcgttaagtttggcgatcacttcgttagaaagaccggatacctggcggtaatccagtgtcgcgggtagcagggtgttctcgttacgcagctgcttttcgatctcatcttgctggcgcgcgatataaccttcgtatttaacctgaatctcaacctgttccgccgcctgttcgtctgtcaacgcaggggcaaacggcgtcagcgtggttaatttttcataagtcatttccggacgacgcagcagatcttcaccactggcttcacgggaaagcggcgcagtcaggtgagcattcacttcggctgcagcttccgccgacggggttacccaggtcgatttcagacgctgacgctcacgctcgatattctcaagtttctcgttaaagcgcgcccaacgttcgtcatccaccaggcccagttcacgaccgatttcagtcaaacgcagatccgcattatcttcgcgtagcatcagacgatattctgcgcgcgaagtaaacatacgatacggttctttggttcctaaagtgcacaggtcatcaactagtacgccgagatacgcctgagaacgtgccggagcccaaccttctttgtcagcagacagacgggcagcgttaagaccggccagcaaaccttgcgcagcggcttcttcgtaaccggtagtgccgttaatctgaccagcaaagaacagcccctggataaacttgctctccagcgtcggtttcaggtcgcgaggatcgaagaagtcatactcaatggcataacccggacgcacgatcttcgcgttttccatcccctgcatagagcggacgatttgcatctgcacatcgaacggcaggctggtggagataccgttcggataaatttcattagaggtcagtccttccggttcaaggaagatctgatgctgatttctgtcggcgaagcgcatgactttgtcttcgatcgacgggcagtagcgtgggccgacaccttcgatcacccctgcatacattgggctacgatcgaggttactgcggatcacatcatgggttttctcgttggtatgagtgatataacacggcacctgctggggatgctgggacgcattgcccataaacgagaataccggcattgggttatcgccatgctgttgcgccagcacactaaagtcgatagttcgagcatcaatacgcggtggtgtcccggttttcagacgaccaacgcgcagcggcagttcacgcaaacggcgagaaagcggaatggacggcggatcaccagcacggccaccgctgtaattatccagaccgatatgaattttaccgtcgaggaacgtcccaacggtgagcacgacggctttggcacggaacttcagtcccatttgggtaacagcaccgaccacgcgatcgttttcgacaataagatcttcaaccgcctgctggaagatcatcaggttcggttggttctccagcgccgtacgtaccgcctgacggtagagcacacgatccgcctgagctcgggtagcgcgaaccgccggtcctttgcttgcgtttagtatcctaaactggatacccgcttgatcgatcgctttcgccatcagaccgccgagtgcatccacttcttttaccagatgtcccttcccaataccgccgatcgccgggttgcagctcatctgccccagagtgtcgatattgtgtgtcaaaagcagagtctgttgacccatacgcgccgcggccatcgcggcctcggtgcctgcatgacccccgccaatgatgatgacgtcaaaaggatccggataaaacatggtgattgcctcgcataacgcggtatgaaaatggattgaagcccgggccgtggattctactcaactttgtcggcttgagaaagacctgggatcctgggtattaaaaagaagatctatttatttagagatctgttctattgtgatctcttattaggatcgcactgccctgtggataacaaggatccggcttttaagatcaacaacctggaaaggatcattaactgtgaatgatcggtgatcctggaccgtataagctgggatcagaatgaggggttatacacaactcaaaaactgaacaaccgttgttccttggataactaccggttgatccaagcttcctgacagagttatccacagtagatcgcacgatctgtatacttatttgagtaaattaatccacgatcccagccattcttctgccggatcttccggaatgtcgtgatcaagaatgttgatcttcagtgtttcgcctgtctgttttgcaccggaatttttgagttctgcctcgagtttatcgatagccccacaaaaggtgtcatattcacgactaccaataccgattgcgccaaagcggaccgcagaaagatcgggcttctgttcctgcaatgcttcatagaaaggagaaaggttgtccggaatatctccggcaccgtgggtggagctgataatcagccagatccccgaggcagataaatcttccaacagcggaccgtgcagcgtttcggtggtaaaacccgcctcttccagcttttcagccaggtgttctgctacatattcggcaccgccgagggtgctgccgctgataagagtgatatctgccataaaccgccacctttattaagagtggcgtattgtacgctgtgaacgcgttgggatctacctgtggaaaagtatgggattaaaaaagccgatcagggcttgatagtacgcatgatcgggttttgcaggacgatcaatgtctcggtggactgaatttcatcaattgtttggatcttgttgataagtacatgctggagagcgtcgatcgaacggcacattacttttataaagatgctgtagtggcctgttgtgtaataggcttcagtgacttcatcaaggctttccagctttgccagcgcggaagggtagtctttggcgctctttaatataatgccgataaagcagcctacgtcataaccgagctgcttcgggctgacatcaatacgcgccccggtaatgatccccgcctgcttcattttctctactcgaacgtgaatcgtccccggactgacgccaaattgtttcgccagttcggcgtaagcggtgcgcgcattgcccattaatgcttccaggatgccacggtccagattgtcgatcagataattttccataggattttcttatgcagattgatgattcattctattttagccttcttttttaatgaatcaaaagtgtgttaggctttttattgagtgattattgcatgtgtgtcggtttttgttgcttaatcataagcaacaggacgcaggagtataaaaaatgaaaaccgcttacattgccaaacaacgccaaattagcttcgtgaaatctcacttttctcgccaactggaagaacgtctggggctgatcgaagtccaggcgccgattcttagccgtgtgggggatggcacgcaggataacttgtcgggctgtgaaaaagcggtgcaggtaaaagtgaaagctctgcctgatgcccagttcgaagtggttcattcactggcgaagtggaaacgtcagaccttagggcaacacgacttcagcgcgggcgaagggctgtacacgcacatgaaagcccttcgccccgatgaagaccgtctttctccgttgcactcggtctatgttgaccagtgggactgggaacgcgtaatgggcgacggtgagcgtcaattctcgactctgaaaagcacggtagaggcgatctgggcgggaattaaagcaaccgaagctgcggttagcgaagagtttggcctggcaccgttcctgccggatcagatccacttcgtacacagccaggagttactgtctcgttatccggatctcgatgccaaagggcgtgagcgggcgatagcgaaagatcttggcgcggtattccttgtcgggattggcggcaagctgagcgatggtcatcgccacgacgtgcgcgcaccggattatgatgactggagcaccccgtcagagctgggtcatgcgggtctgaacggcgatattctggtgtggaaccctgtactggaagatgcgtttgagctttcttccatggggatccgcgtggatgccgacacgttgaagcatcagttggcgctgaccggtgatgaagatcgtctgcagctggaatggcatcaggcgctgctgcgcggtgaaatgccgcagaccatcggcggcggtatcggccagtctcgtttgaccatgctgctgctgcaactgccgcatatcggccaggttcagtgtggtgtatggccagctgctgttcgcgagaacgtcccttctctgctgtaataatttatcgccgccagcgtctgagcaggcggcttcgcatcccggtatcaaagcgccagatatgatcgaaaatgcgcatgatgccgggtttgccgtgtgccgacatcgccacggcatgaaagcgatgctgatgtacccgctgcagctctttcactttactcgtcacgtcgtcaggcaaccgctgggcgataaaatcagaaatcaccaccgcatcggcatcaaaccattccctgctttgcaagcgttccataatggcgcgaaaacaactggcaagatcggtgccgccacgaaactgctggcttaaaaaacggattgcttgttcgatgccttgtgggcctgaaagctcataacggacgatctcggtggaaaatagcataatataacagcgccggttttcagcgagagcaatgcgcatcaaagccaggcagaacgctttcgcacactgttcattaaagccgcccattgagccggaagtatccacgcagacaataaacggtccgcgcggctgttcgtcgtaatctttatgcaccaccgggcgttcgatcactttttcacgccacgactcaccgtgcaggcgataggtgagcaactgtttttccaccagccgacggtaaaactcatactccagttccgttatccctagtgtcgccagttctggcggcagaagacgtaaaatatcatcgctttgttgcagaccatcaacctgctcaggaaccgtcgccggttcgcgcaccatggtgcggaaggtttccatctgcgcatcgttacgcggtattgatttggcttcccgagaacgccccagctgctctgccaggcgtttcagttccggctgttcgttaagaaattcaccgtatttcacaatcaactgatagtcgccacgtttaagctgaccggcgctcatatcccacagacgaccagctgcggtattgttatctgcgagaatcggttcaagttgtccgctcagcgtcatgcgttcctgaacttcactcaacagttgttcgcgttcttcttctaatagctgttgatttaacgtcgttgcttgcacaatcagacttaaacgccagcgctggagaaaaagcgtgtgtaacgctgaagtgatcgcgctgttagcatcaaccaactgtcgggcttgttctgcccatggggaattcagacgatgcagtaagtccaggatctgtggtagctgcacaataaactgcggcgtggagaggagctggctttgctgatagcacatcacctcttcggtgagttccggcgggactcgggcatctttcagccgactgcgcagcgcctcacgccagcggggaacatcatcagtgattgccgccttcagtcgtgggaatttttcaaagaagactgccagctgcggtgaggccagcagcgcgatgatcatctcttcgatcaatccctcttcgctgacggccagcatcacattaagcgtatccagcgttagcattgttgtgcctggcgaatctgtgcaccgacatcctgtaggctggcttcaatgcgacctaaccagtcgccagggataaacagacatttttgctgttcgctgaataaagcgtgttgcttgcgccagtcgctttcaagctcttccagttgttgttttatttcaccaggcagaccttcagccgatgaaccgggaagtgccagcgtactgccttgtaaacttacatcgcgaacgacaagatgttgggcgctatcaacttccagattcagtttctgggcaaagccgataccgttcagtttaccgcgaatttcaccacctttgctcagccactgttccagcgcgctacgctcaaaggagatatgaaccacttccatatcatgcagttttaacggtttttgcagcagtagagtcagagtggaagcagtaacgttaacaggaagttgatactgctgacgacggctgaaaatgccgcccagacgaattaccgttaaggctgttttatcgctttgttgctgctggagttgcaggtgacgttgcacaatcgcgccaaggcgagtcaacatcccttgctgttgccaggcgtgaccggtcatcaatacatcaatttgttgttgtatcaaattcaggctttgcgcgtcataccacaggcaatctttcagcaaaatgagatctaccggggcaacagcactgcgaccgctaaaaaaggcgctggcctgtaataatcggatcgcttttttccagcgacgatccgagacataaggcgcatccggtaatttatccagttgctggcgcagcataaaaatcagctcaaatacatgatcgggcagcgtaatttcaccaatctctttctgccagcgttcatattcttcatctgtgacctgcaaggcatcaggaaccggattgtcgttttcatcctgttgactggtcagcatggagcggaaattcgctttatcctgcactttatctaaccacagacgaatcagcatgcggtcatataacgcttccagactgctgtctgcttccggcagctcgttggaggccgccaccagcaggcgcatcgggattttttctacgtgtgcaccgttgcggaactggcgctcgttaatggcggtgagcaaggtattaagaattgccgggcccgctttccagatctcatccagaaagacaatttctgcttccggcaggtaaccgctggttaaacgttcatagcgcccttcatcttttagcgcctgaatagaaaggggaccaaaaacttcttccggcgtggagaagcgggtcatcagatattcaaacgcgcgggcattctgaaaggcgaattttaagcgccgggcgatcaaacttttggcaatacctggcgggccaaggaggaacacactttcaccacttaatgccgctaataaacacaagcggatggcgtggctacgttcataaagccccttttccaacgaactgctcaggcgggaaattctttccgctaataaatgagggtgagccataatgaagtggcgtcctttcgtcaaaagttctgcgtaaattgcgagtatagacgtttcttgctggtggctaaaatagtctcaaagggggggtatttttctttgagccaggttaatgtggccgcatttaggagtacgattttgccgttaatcgtgcatactgtgcgcttttttgtgggccaagggactaagcacacatttcatatttcaacgaaagactagtctatgagcactgataataagcaatcattgcccgcgattaccctcgcggcgattggagttgtctacggcgatattggtaccagcccgttatatacacttcgtgaatgtttgtccggcctgtttggttttggcgttgaacgcgatgccgtgtttggctttttatcgctgatcttctggctgctaatctttgtggtttccattaaatatctcaccttcgtgatgcgggcagataacgccggtgagggggggatcctgacgttgatgtcgcttgccgggcgtaatacgtcggcgcgaaccacatcaatgctggtgattatggggctaatcggcggcagctttttctatggtgaagtcgtcataacacccgctatttcggtgatgtcagccattgaaggtctggaaatcgtcgccccgcagctggatacctggatagttcccctctcaattatcgttctcactttattatttatgattcaaaagcatggcacggctatggtcggtaagctgtttgcgccgatcatgctgacctggtttttgattctggcaggactggggttacgtagcattattgctaacccggaagtgctgcatgcgctgaatccgatgtgggcggtgcatttcttccttgaatacaaaacggtttcttttattgcattaggggcagtggtgctgtcgattacgggggtcgaggcgctgtatgctgatatgggacactttggtaagttccctattcgtctggcgtggttcactgtcgtattaccttccttaactcttaattacttcggccagggagcgctgttgttaaagaacccggaagcgattaagaacccgttcttccttttggcaccggactgggcgctgatcccgctgctgatcatcgccgcactggcgacggtaatcgcctcgcaggcggttatctctggcgtcttttcattgacgcgtcaggcggtacgtctgggatatttgtcgccgatgcgcattattcacacctccgaaatggagtcagggcaaatctatattccgtttgtgaactggatgctctatgtcgcggtcgtgattgtgattgtcagctttgagcactccagcaacctggcggcggcgtacgggattgcggtgaccggaaccatggtgctgacgtctattctctcgactaccgtggcacgtcagaactggcactggaataagtattttgttgcgctgatcctgattgctttcctttgtgtcgatattccattgttcaccgctaacctcgataaactgctctccggcggctggttgccattgagcctcggtactgtgatgtttatcgtgatgaccacctggaagagcgagcgtttccgcttgctgcggcggatgcatgaacatggtaactctctggaagcgatgattgcttcgctggagaaatcaccgcctgttcgcgtgcccgggaccgcggtgtatatgtcgcgtgcaatcaacgtcattccctttgcgctgatgcataaccttaaacataacaaggtattgcatgagcgggtgattctgttaactctgcgtaccgaagacgcgccatatgtccataatgtccgtcgggtacagattgaacaactgtcgcccactttctggcgcgtggtggcaagttatggttggcgagaaacgccaaacgtggaagaagttttccaccgctgcggtctggaaggattaagttgccggatgatggaaacctccttctttatgtcgcatgagtcgttgatcctcggcaaacgcccgtggtatttgcgtctgcgcggcaagctgtacttgctgctgcaacgtaatgcgctgcgtgcaccagatcaatttgaaattccgccaaacagggttatcgaactgggtactcaggtcgaaatctaacgccagacgcctcctttctccataagggggcgtttttgttttcatggttaatcaccatgtaaaacgtttcgaggttgatcacatttccgtaacgtcacgatggttttcccaactcagtcaggattaaactgcgggtcagcgaaacgtttcgctgatggagaaaaaaatgaaaaaaggcaccgttcttaattctgatatttcatcggtgatctcccgtctgggacataccgatacgctggtggtgtgtgatgctggtttacccatccccaaaagtacaacgcgtatcgatatggcattaacccagggtgtaccttcttttatgcaggtgctgggcgtcgtcacaaatgaaatgcaggtcgaggctgccattatcgcggaagagatcaaacaacataatccgcaactccacgaaacgttgctcactcaccttgagcagctgcaaaaacaccagggaaataccattgaaattcgttacaccacgcatgaacaattcaaacaacaaaccgcagaaagtcaggcggtaattcgcagcggagaatgttctccgtatgcgaatatcattctctgtgctggcgtgacgttctgaggccgtcatggaagcattacttcagcttaaaggcatcgataaagccttcccgggcgtaaaagccctctcgggcgcagcgttaaatgtctatccgggccgcgtgatggcgctggtgggcgaaaacggcgcgggtaaatccaccatgatgaaagtgcttactggtatctatgctcgcgatgccggcacgcttttatggctggggaaagaaacgacatttaccgggccgaaatcttcccaggaagccgggattgggattatccatcaggaactgaacctgatcccgcagttgaccattgccgaaaacattttcctcggtcgtgagtttgttaatcgctttggcaaaattgactggaaaaccatgtatgccgaagcggataaattgctggctaaacttaacctgcgctttaaaagcgacaagctggtgggcgatctttccatcggtgaccagcaaatggttgaaatcgccaaagtgctgagctttgagtcgaaagtcatcattatggatgaaccgaccgatgcgctgaccgataccgaaaccgaatccctgttccgcgtcatccgcgagctgaaatcgcaaggccgcggtattgtctatatctcccaccgcatgaaagaaatcttcgagatttgcgatgacgttaccgtttttcgtgatgggcaatttattgctgagcgcgaagtggcatcactgaccgaagattcgctgattgagatgatggtgggtcgcaagctggaagatcaatatccgcacctggacaaagcgccgggagatatccgcctgaaagtcgataatctctgcggacctggcgttaacgatgtctcttttactttacgcaaaggcgaaattcttggcgtctctggtttgatgggcgcaggtcgtaccgaactgatgaaagtgctctacggcgcactaccgcgcaccagcggttacgtcaccctggatgggcatgaagtcgttacccgttcaccgcaggatggcctggcaaacggcattgtgtatatctccgaagaccgtaaacgtgacggtttagtgttgggcatgtcagtaaaagagaacatgtcgctgacagcgctgcgctacttcagccgcgctggcggcagtttgaagcatgccgatgaacagcaggctgtgagtgatttcattcgtctgtttaatgtgaaaactccgtcgatggaacaggcaattggtctgctttccggtggcaatcagcaaaaagtggcgattgcccgcggtctgatgacacgccccaaagtgttgatccttgatgaacctacccgtggcgtagatgtcggcgcgaaaaaagagatctatcaactgattaaccagttcaaagccgatggcttgagcatcattctggtgtcatcggagatgccagaagtattaggcatgagcgatcgcatcatcgtcatgcatgaagggcatctcagcggggaatttactcgtgagcaggccacccaggaagtgttaatggctgccgctgtgggcaagcttaatcgcgtgaatcaggagtaaaaaaatgacaacccagactgtctctggtcgccgttatttcacgaaagcgtggctgatggagcagaaatcgcttatcgctctgctggtgctgatcgcgattgtctcgacgttaagcccgaactttttcaccatcaataacttattcaatattctccagcaaacctcagtgaacgccattatggcggtcgggatgacgctggtgatcctgacgtcgggcatcgacttatcggtaggttctctgttggcgctgaccggcgcagttgctgcatctatcgtcggcattgaagtcaatgcgctggtggctgtcgctgctgctctcgcgttaggtgccgcaattggtgcggtaaccggggtgattgtagcgaaaggtcgcgtccaggcgtttatcgctacgctggttatgatgcttttactgcgcggcgtgaccatggtttataccaacggtagcccagtgaataccggctttactgagaacgccgatctgtttggctggtttggtattggtcgtccgctgggcgtaccgacgccagtctggatcatggggattgtcttcctcgcggcctggtacatgctgcatcacacgcgtctggggcgttacatctacgcgctgggcggcaacgaagcggcaacgcgtctttctggtatcaacgtcaataaaatcaaaatcatcgtctattctctttgtggtctgctggcatcgctggccgggatcattgaagtggcgcgtctctcctccgcacaacccacggcggggactggctatgagctggatgctattgctgcggtggttctgggcggtacgagtctggcgggcggaaaaggtcgcattgttgggacgttgatcggcgcattaattcttggcttccttaataatggattgaatttgttaggtgtttcctcctattaccagatgatcgtcaaagcggtggtgattttgctggcggtgctggtagacaacaaaaagcagtaataacgactacaggacatcttgaatatgaacatgaaaaaactggctaccctggtttccgctgttgcgctaagcgccaccgtcagtgcgaatgcgatggcaaaagacaccatcgcgctggtggtctccacgcttaacaacccgttctttgtatcgctgaaagatggcgcgcagaaagaggcggataaacttggctataacctggtggtgctggactcccagaacaacccggcgaaagagctggcgaacgtgcaggacttaaccgttcgcggcacaaaaattctgctgattaacccgaccgactccgacgcagtgggtaatgctgtgaagatggctaaccaggcgaacatcccggttatcactcttgaccgccaggcaacgaaaggtgaagtggtgagccacattgcttctgataacgtactgggcggcaaaatcgctggtgattacatcgcgaagaaagcgggtgaaggtgccaaagttatcgagctgcaaggcattgctggtacatccgcagcccgtgaacgtggcgaaggcttccagcaggccgttgctgctcacaagtttaatgttcttgccagccagccagcagattttgatcgcactaaaggtttgaacgtaatgcagaacctgttgaccgctcatccggatgttcaggctgtattcgcgcagaatgatgaaatggcgctgggcgcgctgcgcgcactgcaaactgccggtaaatcggatgtgatggtcgtcggatttgacggtacaccggatggcgaaaaagcggtgaatgatggcaaactagcagcgactatcgctcagctacccgatcagattggcgcgaaaggcgtcgaaaccgcagataaagtgctgaaaggcgagaaagttcaggctaagtatccggttgatctgaaactggttgttaagcagtagttttaatcaggttgtatgacctgatggtgacataaatacgtcatcgacagatgaacgtgtaatataaagaaaagcagggcacgcgccaccctaacacggtggcgcattttatggacatcccgaatatgcaaaacgcaggcagcctcgttgttcttggcagcattaatgctgaccacattcttaatcttcaatcttttcctactccaggcgaaaccgtaaccggtaaccactatcaggttgcatttggcggcaaaggcgcgaatcaggctgtggctgctgggcgtagcggtgcgaatatcgcgtttattgcctgtacgggtgatgacagcattggtgagagcgttcgccagcagctcgccactgataacattgatattactccggtcagcgtgatcaaaggcgaatcaacaggtgtggcgctgatttttgttaatggcgaaggtgagaatgtcatcggtattcatgccggcgctaatgctgccctttccccggcgctggtggaagcgcaacgtgagcgtattgccaacgcgtcagcattattaatgcagctggaatcaccactcgaaagtgtgatggcagcggcgaaaatcgcccatcaaaataagactatcgttgcgcttaacccggctccggctcgcgaacttcctgacgaactgctggcgctggtggacattattacgccaaacgaaacggaagcagaaaagctcaccggtattcgtgttgaaaatgatgaagatgcagcgaaggcggcgcaggtactgcatgaaaaaggtatccgtactgtactgattactttaggaagtcgtggtgtatgggctagcgtgaatggtgaaggtcagcgcgttcctggattccgggtgcaggctgtcgataccattgctgccggagatacctttaacggcgcgttaatcacggcgttgctggaagaaaaaccattgccagaggcgattcggtttgcccatgctgccgctgcgattgccgtaacacgtaaaggcgcacaaccttccgtaccgtggcgtgaagagatcgacgcatttttagacaggcagaggtgacgcttggctacaatgaaagatgttgcccgcctggcgggcgtttctacctcaacagtttctcacgttatcaataaagatcgcttcgtcagtgaagcgattaccgccaaagttgaagcggcgattaaagaactcaattacgcgccatcagccctggcgcgtagcctcaaactcaatcaaacacataccattggcatgttgatcactgccagtaccaatcctttctattcagaactggtgcgtggcgttgaacgcagctgcttcgaacgcggttatagtctcgtcctttgcaataccgaaggcgatgaacagcggatgaatcgcaatctggaaacgctgatgcaaaaacgcgttgatggtttgctgttactgtgcaccgaaacgcatcaaccttcgcgtgaaatcatgcaacgttatccgacagtgcctactgtgatgatggactgggctccgttcgatggcgacagcgatcttattcaggataactcgttgctgggcggagacttagcaacgcaatatctgatcgataaaggtcatacccgtatcgcctgtattaccggtccgctggataaaactccggcgcgcctgcggttggaaggttatcgggcggcgatgaaacgtgcgggtctcaacattcctgatggctatgaagtcactggtgattttgaatttaacggcgggtttgacgccatgcgccaactgttatcacatccgctgcgtcctcaggccgtctttaccggaaatgacgctatggctgttggcgtttaccaggcgttatatcaggcagagttacaggttccgcaggatatcgcggtgattggctatgacgatatcgaactggcaagctttatgacgccaccattaaccactatccaccaaccgaaagatgaactgggggagctggcgattgatgtactcatccatcggataacccagccgacccttcagcaacaacgattacaacttactccgattctgatggaacgcggttcggcttagatttacgctgtcttttgatcaaattattaccatcggttgttttcagaagcatgaacattgctgctgaagcaacagtaataatgcccatcgtgataaacgtatagtggaattgttcgacagtcgttgtgccttccatcccttcataaacgcgaaggacggccgcacttacagcaacgcctaaactaatcgacagttgctgcgtgaccgccagaacactgttaccgctgctggcgttgtcatcggtcagatcggcaagtgtgatggtattcatcgcggtaaactgcgtcgacatagccatccctaatataaacaacggcaagatcagcatccatatagccattgctggtgattgcaaagagaactgagcgatcattagcccaataatcaccgtgatccccactaacgtatggcgatagcccagacgacgtaagacttgggtaaccatcgattttgcaataatggaacctaacgctgtcggtgccatcatacagccagcaataaacgcctgataaccaaatcctacctgtaacatcaatggcataaggaacggtacacagccggtccccagacgggttgcaatattgcctacgataccgatcgagaaagtgcgggttttaaataaatctaatgaaattaatgggtttggcgtgcgtcgtgcatggagaatatagagaagcagtaacccgatgctggtgacaattaccgtcaaggcaatccagctggcgacaatcttttccccgaatagctctattccgcttgagaagagaacaaggctgaggccaaacagcaaaaagccagtgatatcgaatctgcgtcgtgcggtggtgaaattgggcatatgtttgcgcgcgtaaagaaggcccgcaatacctatggggatattgattaaaaatatccagtgccaggttgcccaggtgaccagcacgccgccaagaacggggcctaaaattggccccaccagacccggcatggcgacaaaattcaatactggaagaagttcattacgaggataagcgcgcagtaaggccagccgagcaacaggcatcatcattgcgccgcctatcccctgaataacccggaagacaaccagctgtggtagcgaattagaaagtgcgcaggccagagaacccaatgtgaacagactcacggcaagggtaaaaatgcgacgcgtaccgaagcgatcggctagccatccgcttaccggaataagcatcgccaccgtcagcgtataactgatgatggctgattgcatcgcgagaggagaacgattaaggctatgagcgattgcgggtaaggcggtattaagaatagtggcatcaagtgcctgcatgaagaaggccatcgccgcgatccacggcaaacccgccatactgcgcttctttttatcgctcattcaatgtcctgttatcgggttatcacttatcaggtgagcgtagcagcgcctgacaagctttaaatgccgcgtcgccatcgctttggataatcgcatcgacaatcgcctgatgcagatccagctttatcactgtgtcgctggtaattgacgtgaagtaagtgtgataaaccgaatggaatagcgaggcgaatgaggtcaaaaacggattggcgctcatttcatagatatgctcatgccaggccatatcgacttcgatccagcgttcacggcgaaagttctcttttaatgccgccatttcggccattaacgtattgagatgcgctttctgttccgcggtgccaaccgttgctgccagtaggcaggcttgcggctccagacagatacgcataaccagaaagtgatcgatgacctgatgaaagttctcttctgtcatccaccaggtaagcaattcctgatcaagaaaattccagttcgattgtggcatgacccgagtaccaattcgcggtcgcggtaaaaccatcccttttgccgttaacgttttgaccgcttcgcgtaccgctgtacgactcactccaaattgctcgcccagctcaatctcaccgggcaaaatggtgccgggttcatattcaccttttaagatccgttgcgccagcttctcagccagaacatacgaaaggtttttctgtgcagctaactgttgtgcgcttaaaggcattacttatcttcctttttctttttattcctccttagtatgccaccaggaagtgtgattacggttgcaaaaacggcaaattgcttgttttatggcacattaacggggcttttgctgaaaaaatgcgcggtcagaaaattattttaaatttcctcttgtcaggccggaataactccctataatgcgccaccactgacacggaacaacggcaaacacgccgccgggtcagcggggttctcctgagaactccggcagagaaagcaaaaataaatgcttgactctgtagcgggaaagcgtattatgcacaccccgcgccgctgagaaaaagcaaagcggcactgctctttaacaatttatcagacaatctgtgtgggcactcgaagatacggattcttaacgtcgcaagacgataaatgaataccaagtctcaagagtgaacacgtaattcattacgaagtttaattctttgagcatcaaacttttaaattgaagagtttgatcatggctcagattgaacgctggcggcaggcctaacacatgcaagtcgaacggtaacaggaatcagcttgctgcttcgctgacgagtggcggacgggtgagtaatgtctgggaaactgcctgatggagggggataactactggaaacggtagctaataccgcataacgtcgcaagaccaaagagggggaccttcgggcctcttgccatcggatgtgcccagatgggattagctagtaggtggggtaacggctcacctaggcgacgatccctagctggtctgagaggatgaccagccacactggaactgagacacggtccagactcctacgggaggcagcagtggggaatattgcacaatgggcgcaagcctgatgcagccatgccgcgtgtatgaagaaggccttcgggttgtaaagtactttcagcggggaggaagggagtaaagttaatacctttgctcattgacgttacccgcagaagaagcaccggctaactccgtgccagcagccgcggtaatacggagggtgcaagcgttaatcggaattactgggcgtaaagcgcacgcaggcggtttgttaagtcagatgtgaaatccccgggctcaacctgggaactgcatctgatactggcaagcttgagtctcgtagaggggggtagaattccaggtgtagcggtgaaatgcgtagagatctggaggaataccggtggcgaaggcggccccctggacgaagactgacgctcaggtgcgaaagcgtggggagcaaacaggattagataccctggtagtccacgccgtaaacgatgtcgacttggaggttgtgcccttgaggcgtggcttccggagctaacgcgttaagtcgaccgcctggggagtacggccgcaaggttaaaactcaaatgaattgacgggggcccgcacaagcggtggagcatgtggtttaattcgatgcaacgcgaagaaccttacctggtcttgacatccacagaactttccagagatggattggtgccttcgggaactgtgagacaggtgctgcatggctgtcgtcagctcgtgttgtgaaatgttgggttaagtcccgcaacgagcgcaacccttatcctttgttgccagcggtccggccgggaactcaaaggagactgccagtgataaactggaggaaggtggggatgacgtcaagtcatcatggcccttacgaccagggctacacacgtgctacaatggcgcatacaaagagaagcgacctcgcgagagcaagcggacctcataaagtgcgtcgtagtccggattggagtctgcaactcgactccatgaagtcggaatcgctagtaatcgtggatcagaatgccacggtgaatacgttcccgggccttgtacacaccgcccgtcacaccatgggagtgggttgcaaaagaagtaggtagcttaaccttcgggagggcgcttaccactttgtgattcatgactggggtgaagtcgtaacaaggtaaccgtaggggaacctgcggttggatcacctccttaccttaaagaagcgtactttgcagtgctcacacagattgtctgataggaagtgaaaagcaaggcgtcttgcgaagcagactgatacgtccccttcgtctagaggcccaggacaccgccctttcacggcggtaacaggggttcgaatcccctaggggacgccacttgctggtttgtgagtgaaagtcacctgccttaatatctcaaaactcatcttcgggtgatgtttgagatatttgctctttaaaaatctggatcaagctgaaaattgaaacactgaacaacgaaagttgttcgtgagtctctcaaattttcgcaacacgatgatgaatcgaaagaaacatcttcgggttgtgaggttaagcgactaagcgtacacggtggatgccctggcagtcagaggcgatgaaggacgtgctaatctgcgataagcgtcggtaaggtgatatgaaccgttataaccggcgatttccgaatggggaaacccagtgtgtttcgacacactatcattaactgaatccataggttaatgaggcgaaccgggggaactgaaacatctaagtaccccgaggaaaagaaatcaaccgagattcccccagtagcggcgagcgaacggggagcagcccagagcctgaatcagtatgtgtgttagtggaagcgtctggaaaggcgcgcgatacagggtgacagccccgtacacaaaaatgcacatattgtgagctcgatgagtagggcgggacacgtggtatcctgtctgaatatggggggaccatcctccaaggctaaatactcctgactgaccgatagtgaaccagtaccgtgagggaaaggcgaaaagaaccccggcgaggggagtgaaaaagaacctgaaaccgtgtacgtacaagcagtgggagcacgcttaggcgtgtgactgcgtaccttttgtataatgggtcagcgacttatattctgtagcaaggttaaccgaataggggagccgaagggaaaccgagtcttaactgggcgttaagttgcagggtatagacccgaaacccggtgatctagccatgggcaggttgaaggttgggtaacactaactggaggaccgaaccgactaatgttgaaaaattagcggatgacttgtggctgggggtgaaaggccaatcaaaccgggagatagctggttctccccgaaagctatttaggtagcgcctcgtgaattcatctccgggggtagagcactgtttcggcaagggggtcatcccgacttaccaacccgatgcaaactgcgaataccggagaatgttatcacgggagacacacggcgggtgctaacgtccgtcgtgaagagggaaacaacccagaccgccagctaaggtcccaaagtcatggttaagtgggaaacgatgtgggaaggcccagacagccaggatgttggcttagaagcagccatcatttaaagaaagcgtaatagctcactggtcgagtcggcctgcgcggaagatgtaacggggctaaaccatgcaccgaagctgcggcagcgacgcttatgcgttgttgggtaggggagcgttctgtaagcctgcgaaggtgtgctgtgaggcatgctggaggtatcagaagtgcgaatgctgacataagtaacgataaagcgggtgaaaagcccgctcgccggaagaccaagggttcctgtccaacgttaatcggggcagggtgagtcgacccctaaggcgaggccgaaaggcgtagtcgatgggaaacaggttaatattcctgtacttggtgttactgcgaaggggggacggagaaggctatgttggccgggcgacggttgtcccggtttaagcgtgtaggctggttttccaggcaaatccggaaaatcaaggctgaggcgtgatgacgaggcactacggtgctgaagcaacaaatgccctgcttccaggaaaagcctctaagcatcaggtaacatcaaatcgtaccccaaaccgacacaggtggtcaggtagagaataccaaggcgcttgagagaactcgggtgaaggaactaggcaaaatggtgccgtaacttcgggagaaggcacgctgatatgtaggtgaagcgacttgctcgtggagctgaaatcagtcgaagataccagctggctgcaactgtttattaaaaacacagcactgtgcaaacacgaaagtggacgtatacggtgtgacgcctgcccggtgccggaaggttaattgatggggtcagcgcaagcgaagctcttgatcgaagccccggtaaacggcggccgtaactataacggtcctaaggtagcgaaattccttgtcgggtaagttccgacctgcacgaatggcgtaatgatggccaggctgtctccacccgagactcagtgaaattgaactcgctgtgaagatgcagtgtacccgcggcaagacggaaagaccccgtgaacctttactatagcttgacactgaacattgagccttgatgtgtaggataggtgggaggctttgaagtgtggacgccagtctgcatggagccgaccttgaaataccaccctttaatgtttgatgttctaacgtggacccgtgatccgggttgcggacagtgtctggtgggtagtttgactggggcggtctcctcctaaagagtaacggaggagcacgaaggttggctaatcctggtcggacatcaggaggttagtgcaatggcataagccagcttgactgcgagcgtgacggcgcgagcaggtgcgaaagcaggtcatagtgatccggtggttctgaatggaagggccatcgctcaacggataaaaggtactccggggataacaggctgataccgcccaagagttcatatcgacggcggtgtttggcacctcgatgtcggctcatcacatcctggagctgaagtaggtcccaagggtatggctgttcgccatttaaagtggtacgcgagctgggtttagaacgtcgtgagacagttcggtccctatctgccgtgggcgctggagaactgaggggggctgctcctagtacgagaggaccggagtggacgcatcactggtgttcgggttgtcatgccaatggcactgcccggtagctaaatgcggaagagataagtgctgaaagcatctaagcacgaaacttgccccgagatgagttctccctgaccctttaagggtcctgaaggaacgttgaagacgacgacgttgataggccgggtgtgtaagcgcagcgatgcgttgagctaaccggtactaatgaaccgtgaggcttaaccttacaacgccgaagatgttttggcggatgagagaagattttcagcctgatacagattaaatcagaacgcagaagcggtctgataaaacagaatttgcctggcggccttagcgcggtggtcccacctgaccccatgccgaactcagaagtgaaacgccgtagcgccgatggtagtgtggggtctccccatgcgagagtagggaactgccaggcatcaaattaagcagtaagccggtcataaaaaccggtggttgtaaaagaattcggtggagcggtagttcagtcggttagaatacctgcctgtcacgcagggggtcgcgggttcgagtcccgtccgttccgccaccctaattaggggcgtagttcaattggtagagcaccggtctccaaaaccgggtgttgggagttcgagtctctccgcccctgccagaaatcatccttagcgaaagctaaggattttttttatctgaaataaccctctccgaagtaaatccttctaccggcatccttgccagccattcatattaatacacttcatccagcacgttaattttcaaaagatcgcgaatcaacgcatttttatcgctattttgcagccatatggcataaagcggccgtgaaagtgttgtgctatcgacaacggtatgcaggccgccttttttacgcgcccagctgacgggtagccaggtgcaaccattaagcatcgcaatctgttgctgtgccagttcagcagaactggttgtcagaatgggcacttcgtcagcaccgatcaaacctgcctcatgctgttgaaaatctggcccccactcaagtcgcagataattaagatctccctttagttttgaaggggcactggtataaagcgctaaagtgaaatatcccagcaactgactactaaattcgtccattttgggcgcttcagtggtaataagaagatcaagctggcgttcatgcagctgttttaccagagactgccgttgggcaattcgcgcttcgaactgtaagcctgtatgggcatcctgattttgatacaagcgtcccagccactgattaagcatacattcccacaacgaggcgctggcaccgatagaaaactcgttatgtcgtgaggtatgcgccacctccttacgggcggcctgccaggtgctcatgagcgtttctgcataaggcagtagtttttcaccggcagcggttaaacggatattgtttctgtggcgggtgaaaaggttcacacccagttgattttccagttgtctgattcgaaagctcactgctgactgggtcagatagagcgattcagccgctcgaccaaagtgacgcgttcggctaacttccaggaaagtttttaacaattccgtatccacagtgctctccgcaaaattatttgtcgttatgatttaaatgttttgttttacactctgtcaagcgtaactaatactccgcgccataactagctcggtcaaagaattaggagcgtgcaggatggcggaaagctttacgacgactaatcgatatttcgacaataaacattatccacgtggattctctcgtcatggtgatttcaccatcaaagaggcacaactgcttgagcgtcatggttatgccttcaatgagttggatcttggcaaacgcgagccggttaccgaggaagagaaactcttcgtagcagtatgccgtggcgaacgtgagccagtgacagaagcagaacgcgtgtggtccaagtatatgacgcgtattaagcgtccaaaacgttttcacaccctttccggcggtaaaccgcaggttgaaggtgctgaagactacaccgattctgacgattaataaaaagggcgaaatgccctttttttatgtcagtagtttctgcagatggatgagcaaacggtcaatcgctcgatagctaactgcctcctgcaaatgctgacgtgtgataatgtcagactgatcaatatcagcaatggttcgtgcaactttcaataaccgctgccaggcacgaatcgataaccccagatggatcagtgttccttccaaccacatcgcatcttcgctctcaagtttgcagaattggcgtatttccggactatccagccaggcattcagtttattctgccgcttaaattggcgctctctggcggccattacgcgttgtttaacggtggcgctgctttctcccggcactaccgttttactcaaaatgccggggggtggtaatgggatctccagtgagagatcgaagcggtcgagaaagggccccgagagccggttgagataacgtaatgtctgttctggcgtgcagcggttatggtttccctgataatgtccggtagggctgggattcatcgccgcaacaagctggaaacgggctggataggttatttttgctcgtgtgcgtgaaagatggatctgcccggattcaatcggctctcgcaaggcatccagtgtacgccgttcaaattcaggtagctcatcaagaaaaagcacgccgttatgcgccagcgaaatttcaccgggccctggaattgcgccaccgcctaccatcgcagttaacgatgcactgtgatgaggtgagcggaacgggcgctgctgccattgtttttgtactgattcagcatttaccagacttaatatcgcagcactctccagtgcctcttcattgcttaaatctggcaacaggccattaatacggctggcgagcattgttttacctgttcccggcggcccaatcagtaaaaggttgtgcccgccagcggcggtaatttccagtcctcgctttccttgttcctgaccgataacatcactgagatcatgttgtagcgcccgggatactgcatcagttggtttcgggcgttcgagagcgtgcttaccttccagaaacgcacagacagcctgcagatgatcggctatcaggcatccttcaccgttaattagccccacttcatcttcgttatctttcgcgacgataatttttctgcccgacttaatagcttcagttgcactggagattgcgccgggaacgccacgcagagcgcctgtaagcgccagttctccgactaattcatattcatctaacttattggctgtaagctgttctgaggccgccagcaacgcaatggcgataggtaaatcatatcgtcccccttcttttggcagatcggctggagccaggttgatggtgatttttttcgccggatattcatatccgctattgataatggcgctgcgcacgcgatcgcgagcttcttttacagttgtttctggtaagcccaccatcgttaagccgggtagacctttactgatatgtacctcaacagtgattgggggcgcatttactcccagggctgcgcgggtatgaacaattgacagtgacataagccctccttgagtcactattatgtgcataagatatcgctgctgtagcccgctaattcgtgaattttagtggctgattcctgtttatttgtgcaagtgaagttgagttgttctggcggtggaatgatgctcgcaaaaatgcagcggacaaaggatgaactactaggaagggaacaacattcatactgaaattgaatttttttcactcactattttctttttaaaaaacaacaatttctattgaaattattaaacgcatcataaaaatcggccaaaaaatatcttgtgctattcgcaaaatctatggtaactctttaggcattccttcgaacaagatgcaagaaaagacaaaatgacagcccttctacgagtgattagcctggtcgtgattagcgtggtggtgattattatcccaccgtgcggggctgcacttggacgaggaaaggcttagagatcaagccttaacgaactaagacccccgcaccgaaaggtccgggggttttttttgaccttaaaaacataaccgaggagcagacaatgaataacagcacaaaattctgtttctcaagattcaggacggggaactaactatgaatggcgcacagtgggtggtacatgcgttgcgggcacagggtgtgaacaccgttttcggttatccgggtggcgcaattatgccggtttacgatgcattgtatgacggcggcgtggagcacttgctgtgccgacatgagcagggtgcggcaatggcggctatcggttatgcccgtgctaccggcaaaactggcgtatgtatcgccacgtctggtccgggcgcaaccaacctgataaccgggcttgcggacgcactgttagattctatccctgttgttgccatcaccggtcaagtgtccgcaccgtttatcggcacggacgcatttcaggaagtggatgtcctgggattgtcgttagcctgtaccaagcacagctttctggtgcagtcgctggaagagttgccgcgcatcatggctgaagcattcgacgttgcctgctcaggtcgtcctggtccggttctggtcgatatcccaaaagatatccagttagccagcggtgacctggaaccgtggttcaccaccgttgaaaacgaagtgactttcccacatgccgaagttgagcaagcgcgccagatgctggcaaaagcgcaaaaaccgatgctgtacgttggcggtggcgtgggtatggcgcaggcagttccggctttgcgtgaatttctcgctgccacaaaaatgcctgccacctgtacgctgaaagggctgggcgcagtagaagcagattatccgtactatctgggcatgctggggatgcacggcaccaaagcggcaaacttcgtggtgcaggagtgtgacctgctgatcgccgtgggcgcacgttttgatgaccgggtgaccggcaaactgaacaccttcgcgccacacgccagtgttatccatatggatatcgacccggcagaaatgaacaagctgcgtcaggcacatgtggcattacaaggtgatttaaatgctctgttaccagcattacagcagccgttaaatatcaatgactggcagcaacactgcgcgcagctgcgtgatgaacattcctggcgttacgaccatcccggtgacgctatctacgcgccgttgttgttaaaacaactgtcggatcgtaaacctgcggattgcgtcgtgaccacagatgtggggcagcaccagatgtgggctgcgcagcacatcgcccacactcgcccggaaaatttcatcacctccagcggtttaggtaccatgggttttggtttaccggcggcggttggcgcacaagtcgcgcgaccgaacgataccgttgtctgtatctccggtgacggctctttcatgatgaatgtgcaagagctgggcaccgtaaaacgcaagcagttaccgttgaaaatcgtcttactcgataaccaacggttagggatggttcgacaatggcagcaactgtttttccaggaacgatacagcgaaaccacccttaccgataaccccgatttcctcatgttagccagcgccttcggcatccctggccaacacatcacccgtaaagaccaggttgaagcggcactcgacaccatgctgaacagtgatgggccatacctgcttcatgtctcaatcgacgaacttgagaacgtctggccgctggtgccgccaggtgccagtaattcagaaatgttggagaaattatcatgatgcaacatcaggtcaatgtatcggctcgcttcaatccggaaaccttagaacgtgttttacgcgtggtgcgtcatcgtggtttccacgtctgctcaatgaatatggccgccgccagcgatgcacaaaatataaatatcgaattgaccgttgccagcccacggtcggtcgacttactgtttagtcagttaaataaactggtggacgtcgcacacgttgccatctgccagagcacaaccacatcacaacaaatccgcgcctgagcgcaaaaggaatataaaaatgaccacgaagaaagctgattacatttggttcaatggggagatggttcgctgggaagacgcgaaggtgcatgtgatgtcgcacgcgctgcactatggaacctcggtttttgaaggcatccgttgctacgactcgcacaaaggaccggttgtattccgccatcgtgagcatatgcagcgtctgcatgactccgccaaaatctatcgcttcccggtttcgcagagcattgatgagctgatggaagcttgtcgtgacgtgatccgcaaaaacaatctcaccagcgcctatatccgtccgctgatcttcgttggtgatgttggcatgggcgtaaacccgccagcgggatactcaaccgacgtgattatcgccgctttcccgtggggggcgtatctgggcgcagaagcgctggagcaggggatcgatgcgatggtttcctcctggaaccgcgcagcaccaaacaccatcccaactgcggcaaaagccggtggtaactatctctcttccctgctggtgggtagcgaagcgcgccgccacggttatcaggaaggtatcgcgctggatgtgaacggttatatctctgaaggcgcaggcgaaaacctgtttgaagtgaaagatggtgtgctgttcaccccaccgttcacctcctccgcgctgccgggtattacccgtgatgccatcatcaaactggcgaaagagctgggaattgaagtgcgtgagcaggtgctgtcgcgcgaatccctgtacctggcggatgaagtgtttatgtctgggacagcggcagaaatcacgccagtgcgcagcgtagacggtattcaggttggcgaaggccgttgtggcccggttaccaaacgcattcagcaagccttcttcggcctctttaccggcgaaaccgaagataaatggggctggttagatcaagttaatcaataaatacaaaaaatgggacggcactcaccgtcccatttacgagacagacactgggagtaaataaagtatgcctaagtaccgttccgccaccaccactcatggtcgtaatatggcgggtgctcgtgcgctgtggcgcgccaccggaatgaccgatgccgattttggcaagccgattatcgcggttgtgaactcgttcacccaatttgtaccgggtcacgtccatctgcgcgatctcggtaaactggtcgccgaacaaattgaagcggctggcggcgttgccaaagagttcaacaccattgcggtggatgatgggattgctatgggccacggggggatgctttattcactgccatctcgcgaactgatcgctgattccgttgagtatatggtcaacgcccactgcgccgacgccatggtctgcatctctaactgcgacaaaatcaccccggggatgctgatggcttccctgcgcctgaatattccggtgatctttgtttccggcggcccgatggaagccgggaaaaccaaactgtccgagcagatcatcaagctcgatctggttgatgcgatgatccagggcgcagacccgaaagtttctgactcccagagcgatcaggttgaacgttccgcctgcccaacctgcggttcctgctccgggatgtttaccgctaactcaatgaactgcctgaccgaagcgctgggtttgtcgcagccaggcaacggctcgctgctggcaacccacgcggaccgtaagcagctgttccttaatgctggtaaacgcattgttgaattgaccaaacgttattacgagcaaaacgacgaaagtgcactgccgcgtaatatcgccagtaaggcggcgtttgaaaacgccatgacgctggatatcgcgatgggtggatcgactaacaccgtacttcacctgctggcggcggcgcaggaagcggaaatcgacttcaccatgagtgatatcgataagctttcccgcaaggttccacagctgtgtaaagttgcgccgagcacccagaaataccatatggaagatgttcaccgtgctggtggtgttatcggtattctcggcgaactggatcgcgcggggttactgaaccgtgatgtgaaaaacgtacttggcctgacgttgccgcaaacgctggaacaatacgacgttatgctgacccaggatgacgcggtaaaaaatatgttccgcgcaggccctgcgggcattcgtactacacaggcattctcgcaggattgccgttgggattctctcgatgacgatcgcgcaaacggctgtatccgctcgctggaacacgcctacagcaaagacggcggcctggcggtgctctacggtaattttgctgaaaacggctgcatcgtgaaaaccgcgggcgtcgatgacagcatcctcaaattcaccggcccggcgaaagtatacgaaagccaggacgacgcggtagaagcgatcctcggtggcaaagttgtcgcgggcgatgtggtggtgatccgctatgaaggcccgaaaggcggccctggcatgcaggaaatgctctacccaaccagcttcctgaaatcaatgggtctcggtaaagcctgtgcgctgatcaccgacggtcgtttctctggcggcacctctggtctttccatcggccacgtctcaccggaagcggcaagcggcggcagcattggcctgattgaagatggtgacctgatcgctatcgacatcccgaaccgtggcattcagttacaggtaagcgatgccgaactggcggcgcgtcgtgaagcgcaggaagctcggggtgacaaagcctggacgccgaaaaaccgtgaacgtcaggtttcctttgccctgcgtgcctacgccagcctggcgaccagcgccgacaaaggtgcggtgcgcgataaatcgaaactgggggattaatgatggctgactcacaacccctgtccggtgctccggaaggtgccgaatatttaagagcggtgctgcgcgcgccggtctacgaagcggcgcaggtcacgccgctacaaaaaatggaaaagctctcgtctcgtcttgataacgtcattctggtgaagcgcgaagatcgtcagccagttcatagctttaagctgcgcggcgcatacgccatgatggcgggcctgacggaagaacagaaagcgcacggcgtgatcactgcttctgcgggtaaccacgcgcagggcgtcgcgttttcttctgcgcggttaggcgtgaaggccctgatcgttatgccaaccgccaccgccgacatcaaagtcgatgcggtacgtggattcggcggcgaagtgctgcttcatggcgcgaactttgacgaagcgaaagctaaagcgatcgaactgtcacagcagcaggggttcacctgggtgccgccgttcgaccatccgatggtgattgccgggcaaggcacgctggcgctggaactgctccagcaggacgcccatctcgaccgcgtatttgtgccagtcggcggcggcggtctggcggcgggcgttgcggtgctgatcaaacaactgatgccacaaatcaaagtgatcgccgtagaagcggaagactccgcctgcctgaaagcagcgctggatgcgggtcatccggttgatctgccgcgcgtagggctatttgctgaaggcgtagcggtaaaacgcatcggtgacgaaaccttccgtttatgccaggagtatctcgacgacatcatcaccgtcgatagtgatgcgatctgtgcggcgatgaaggatttattcgaagatgtgcgcgcggtggcggaaccctctggcgcgctggcgctggcgggaatgaaaaaatatatcgccctgcacaacattcgcggcgaacgactggcgcatattctttccggtgccaacgtgaacttccacggcctgcgctacgtctcggaacgctgcgaactgggcgaacagcgtgaagcgttgttggcggtgaccattccggaagaaaaaggcagcttcctcaaattctgccaactgcttggcgggcgatcggtcaccgagttcaactaccgttttgccgatgccaaaaacgcctgcatctttgtcggcgtgcgcctgagccgcggcctcgaagagcgcaaagaaattttgcagatgctcaacgacggcggctacagcgtggtggatctctccgacgacgaaatggcgaagttgcatgtgcgctatatggtcggcgggcgtccgtcacatccgttgcaggaacgcctctacagcttcgaattcccggaatcaccgggcgcgctgttgcgcttcctaaacacgctgggtacgcactggaatatttctttgttccactatcgcagccacggtaccgactatgggcgcgtgctggcagcgttcgaactcggcgaccatgaaccggatttcgaaacccggctaaatgagctgggctacgattgccacgacgaaaccaataacccggcgttcaggttctttttggcgggttagggaaaaatgcctgatagcgcttcgcttatcaggcttacccgcgcgacaacgtcatttgtggttcggcaaaatcttccagaatgcttcaatcagcggctcatgtagccgctttttctgcgcacaaacgcccagctcaaacggcgttttctcatcgctgcgctctaaaatcatcacgcggttacgcaccggttccgggctgttttccagcaccacttccggcaacagcgccacaccacagccgagcgccaccatcgataccatcgcttcatgcccgccaaccgtggcgtaaatcatcgggttgctgattttattgcgtcgaaaccacagttcaatgcggcgacgcaccggtccctgatcggccatgataaacggcactgtagaccagtccggcttctctgccgaaacctggttacgcaccgggcagggcagcgcgggcgcaatcagcactactgccagattctccagcatcgaaaacgccacagcgccgggtagcgtctccggtttcccggcaatcgccagatccgcttctcccgtgaccactttttccattgcatctgccgcatcaccagtggtgagtttgatctccaccgacgggtgttccgcgcggaagcgatccagaatcggcggcagatggctgtaggcagcggtcaccgagcagaagatatgtaattcgccagagagcgacggcccttgctgatcgatggtgtggcgcaattgctgatactgcaacagcgtttgctgggcgaaaacgcgcagctcttcgcccgcttccgtcagcgttaccgtgcggttatcgcgcacaaacagcggctgaccgagatcttcttccaggcgctgaatctgccgtgagagcgtggatgggctaacgtgcatcgcccgcgcgctgcggccaaaatggcggctttccgccagatgcaggaaggttttcagatcgcgtaaatccacagggacagccctcgatgttgacgttgcaaaaattgcaatgtgacgttgtgaatatatcaatttccgcaataaatttcctgtcatatagtgaattcaatctcgcaaacgcgaaccgaacaataagaagcacaacatcacgaggaatcaccatggctaactacttcaatacactgaatctgcgccagcagctggcacagctgggcaaatgtcgctttatgggccgcgatgaattcgccgatggcgcgagctaccttcagggtaaaaaagtagtcatcgtcggctgtggcgcacagggtctgaaccagggcctgaacatgcgtgattctggtctcgatatctcctacgctctgcgtaaagaagcgattgccgagaagcgcgcgtcctggcgtaaagcgaccgaaaatggttttaaagtgggtacttacgaagaactgatcccacaggcggatctggtgattaacctgacgccggacaagcagcactctgatgtagtgcgcaccgtacagccactgatgaaagacggcgcggcgctgggctactcgcacggtttcaacatcgtcgaagtgggcgagcagatccgtaaagatatcaccgtagtgatggttgcgccgaaatgcccaggcaccgaagtgcgtgaagagtacaaacgtgggttcggcgtaccgacgctgattgccgttcacccggaaaacgatccgaaaggcgaaggcatggcgattgccaaagcctgggcggctgcaaccggtggtcaccgtgcgggtgtgctggaatcgtccttcgttgcggaagtgaaatctgacctgatgggcgagcaaaccatcctgtgcggtatgttgcaggctggctctctgctgtgcttcgacaagctggtggaagaaggtaccgatccagcatacgcagaaaaactgattcagttcggttgggaaaccatcaccgaagcactgaaacagggcggcatcaccctgatgatggaccgtctctctaacccggcgaaactgcgtgcttatgcgctttctgaacagctgaaagagatcatggcacccctgttccagaaacatatggacgacatcatctccggcgaattctcttccggtatgatggcggactgggccaacgatgataagaaactgctgacctggcgtgaagagaccggcaaaaccgcgtttgaaaccgcgccgcagtatgaaggcaaaatcggcgagcaggagtacttcgataaaggcgtactgatgatcgcgatggtgaaagcgggcgttgaactggcgttcgaaaccatggtcgattccggcatcattgaagagtctgcatattatgaatcactgcacgagctgccgctgattgccaacaccatcgcccgtaagcgtctgtacgaaatgaacgtggttatctctgataccgctgagtacggtaactatctgttctcttacgcttgtgtgccgttgctgaaaccgtttatggcagagctgcaaccgggcgacctgggtaaagctattccggaaggcgcggtagataacgggcaactgcgtgatgtgaacgaagcgattcgcagccatgcgattgagcaggtaggtaagaaactgcgcggctatatgacagatatgaaacgtattgctgttgcgggttaagtgcgcgctgatgccctcaccccgaccctctcccacagggagagggagaaaacactcaaggccttctcctggagaaggccttgctattagttgcggtacagcaccttaatgatgtgatatccgaactgggtgtgcagcgggccggtcggctccagtaccggacaagagaaaaccactttatcgaacgccggaaccatctgaccctggcggaattcacctaaatcaccgccgcgtttgcctgatgggcaaatggagtgtttcttcgccagcttgccgaaatcggcaccgttcttaatctgctcgagaagatccagagccagtttctcttcttttacaaggatatgcagtgctgctgatgtttttgccatgatcgtgccttgagtgaataattgtcaggcggcgattttagcatgatccgcagatgctaacgtaattgtcagtcagggaggggctggtacatatatggcaaaagcccggaaaatccgggcttcgcaggtccctcaaggggagaaaacttagggcctctatgggctacagagtcattatcggggatggtgattttattgtcaatttatgagcgatatggcattgattgacttgatgaccgccctctgtatgtctgcaaccaactcatgtggcaaacattgattaagataccctctgtaagtccttgctctgtttaatcggtttcgactgacttgttgtaccaggtcggctttggcccaacgaatctgctgatcaaagaattgcaggtcattgataacattactggctatttcaacatgcattccacgatttaacttgtcatgatcgcgagtggttgataatggaacgacgatacatgcgttgccattaatttttccgttgagcacgacaactaacctgttttttatcatttcaggaggaatgcggccattgtaatacgtggtgctgaactgtccattctggctaacaggatagttaccaaagttgcattccagtatttcaccaaccttagggctgaaatttatcgccacgagtaaacctctccttagtaaactctgaaaaagtaataacacaacgttacgacccgatattttctaagtctaatggattcacgattaactccggtttcggtcttccctctctgatttaaacatccgcagccaaccggttagcggcttacacgcggtcacattcaaatgcgattctgctacaatcctccccccgttcgaagattgagcaatacacctatgcgtctaaaccccggccaacaacaagctgtcgaattcgttaccggcccctgcctggtgctggcgggcgcgggttccggtaaaactcgtgttatcaccaataaaatcgcccatctgatccgcggttgcggttatcaggcgcgacatatcgcggcggtgacctttaccaataaggcggcgcgcgagatgaaagagcgtgtcgggcagacgctgggtcgcaaagaggcgcgcgggctgatgatctccacttttcacacgctggggttggatatcatcaaacgcgagtatgcggcgcttgggatgaaagcgaacttctcgttgtttgacgataccgatcagcttgctttgcttaaagagttgaccgaggggctgattgaagatgacaaagttctcctgcaacaactgatttcgaccatctctaactggaagaatgatctcaaaacaccgtcccaggcggcagcaagtgcgattggcgagcgggaccgtatttttgcccattgttatgggctgtatgatgcacacctgaaagcctgtaacgttctcgacttcgatgatctgattttattgccgacgttgctgctgcaacgcaatgaagaagtccgcgagcgctggcagaacaaaattcgctacctgctggtggatgagtatcaggacaccaacaccagccagtatgaactggtgaaactgctggtgggcagccgcgcgcgctttaccgtggtgggcgatgacgaccagtcgatctactcctggcgcggtgcacgtccacaaaacctggtgctgctgagtcaggattttccggcgctgaaggtgattaagcttgagcagaactaccgctcttccggacgtattttgaaagcggcgaacatcctgatcgccaataatccgcacgtctttgaaaagcgtctgttctccgaactgggttacggcacagagctaaaagttttaagcgcgaataacgaggaacatgaagccgagcgcgttactggcgagctgatcgcccatcacttcgtcaataaaacgcagtacaaagattacgccattctttatcgcggtaaccatcagtcgcgggtgtttgaaaaattcctgatgcaaaaccgcatcccgtacaaaatttctggtggtacgtcgtttttctctcgtcctgaaatcaaggacttgctggcttatctgcgcgtgctgactaacccggacgatgacagcgcatttctgcgtatcgttaacacgccgaagcgagagattggcccggctacgctgaaaaagctgggtgagtgggcgatgacgcgcaataaaagcatgtttaccgccagctttgatatgggcctgagtcagacgcttagcggacgtggttatgaagcattgacccgcttcactcactggttggcagaaattcagcgtctggcggagcgggagccgattgccgcggtgcgcgatctgatccacggcatggattatgaatcctggctgtacgaaacatcgcccagcccgaaagctgccgaaatgcgcatgaagaacgtcaaccaactgtttagctggatgacggagatgctggaaggcagcgaactggatgagccgatgacgctcacccaggtggtgacgcgctttactttgcgcgacatgatggagcgtggtgagagtgaagaagagctggatcaggtgcaactgatgactctgcacgcgtcaaaagggctggagtttccttatgtctacatggtcggtatggaagaagggtttttgccgcaccagagcagcatcgatgaagataatatcgatgaggagcggcggctggcctatgtcggcattacccgcgcccagaaggaattgacctttacgctgtgtaaagaacgccgtcagtacggcgagctggtgcgcccggagccgagccgctttttgctggagctgccgcaggatgatctgatttgggaacaggagcgcaaagtggtcagcgccgaagaacggatgcagaaagggcaaagccatctggcgaatctgaaagcgatgatggcggcaaaacgagggaaataatcaaggccggagaagatgcgtcagcatcgcatccggcacttactcattaatgcacttctagcgaccagtggacatagctctgccactggctttcctgagcaataatctctttacccagcggatgttgggttagccaaccttgcggaagcgtcaaggtcaacagttcatggttagcctgtaatgtcatctctggcacgagatcgtcacggcgacggctggcaaaaatgatggccaggcggagtaaacggcagagttgttctgcgacgcgcggcggtacggcattttgctgatgcagcgatgagagatcgaccggattagtctggttgagcagtagcgtcgccagcaattttttctgtgcgggggtaaaaccgggaagatccagattacgcaccagataagcagcgtgttgcggcgcttgtttgaagtcaacgctcaggccgatttcatgaagctgacaggcgctgatgagcaaatcgcggcttattgcttcaagatgccattccttttccacctgatcgaagaagttagccgcaactttggctacgcgctgcgcctgatcaatatcgatcataaagcggcgctgaatattacgcagcgtacggctgcgaatatcctgctcgacggccagatgcaacatgccgtagaccaggccttcacgcagcgcaccgcccgccagggtcatacactgaatattcagttcggtaaaaatggcgatcaggatcgccagaccactcgggaacactaacgcacgttccagcgtcagcccgtcaatctccagttcctccagccgaccgcaatgaatggctcgctgtttcaattgctgcaacttttccagggtaatgcgttcatccatcccctgtgccatcatgatttcctgtaacgcctgcacggtgccggaagcgccaacgcacactttccagccgtgataccgtaattcatcggcaaccggacgtaacacttcgcgtgccgctttttctgcagcatcaaaattttcctgccccagattacgatcggcaaaatagcgttccagccaggtgacgcagcccatcgacaggctgaacaacgaggtggtttgtgcacccgtgccggttaccagttcagtgctggcaccgcctatatccaccaccaggcgctgatcggcaccaccagtggtgtgagcaacgccctgataaatcagacgcgcttcctcttcaccgctgatcacctgtaccggacaaccgaggatttcctgcgctttggcaataaaatcacccgcattgacggcaagtcgtaatgtcgccgtagcgacaacgcgaatttgcgagggagggatatcttgcagacgttcagcaaacaggcgcagacattgccaaccgcgctccattgcttcattagagagggcattttcgctattcaggccagcagccagacgcactttgcgtttaattcgcgtcagcgtctggatgcttccagccacctcgcgcacaaccagcatatgaaaactattcgaaccgagatcaatggctgcatacagcgacgaggtggaacccatactcttcatccttcaatctgtctctgtgttggctgcattctttcacctgaatcacttactacattaagctcatcgggattcattctcttgccatcttgatacagtttgaatgattttgagtatgacattttatttaacctgaacgacgacgattacgcggagcgccagtacgacgcggaccattgcctgtacgcgggcgcgtgaggcgcagcggttttggcagatcggtcatcaatgcgtccggattgtatttgcttaccggaattgagtgaccaatataggtttcaatagcaggcaaattcaatgcatactcttcacacgccaggctgatagagtgaccgcttgcgcctgcgcgacctgtacgaccaatacggtgaacgtaatcttcacagtcatcgggtaaatcgtagttaaagacgtgcgtcactgccggaatatgcaaaccacgcgcggcaacgtcggtggcaaccagaatatccagatcgccacgggtaaattcatcaagaatacgcagacgttttttctgcgcgacatcgcctgtcaacaaaccgacacgatgaccatctgccgccaggtggccccagatctcttcacaacggtgtttggtattggcgaaaataatcgctctgtctggccactcttcttcgatcagcgtttgcagcaaacgcattttttcttcgttagaagggtagaaaagctcttctttaatacggtggcccgttttctgttccggttccacttcaatatattcggcattgttcatctgctcgaacgccagttcacgtacccggtacgaaagcgtggcggagaacagcatgttgaggcgctggtttgcaggcggcatacggcggaacagccagcggatatctttaataaagcccagatcgtacatgcgatcggcttcgtccagtaccactacctgaatggcaccgaggttaatgtggttctgcttggcgtagtcaattaaacgacccgtggtgccaatcagaatgtcaacgccgctttccagcactttcagctgtttgtcgtagccatcaccaccgtaagccagacccagcttcaggccggtagcttccgccagcggttctgcgtcggcatggatctgcacggcaagttcacgcgtcggtgccataattaaggcacgtggttgattcaccttgcgatcggcaatcgcaggatgagagagaagataatgaaacgttgacgtaagaaacgccatcgttttcccggtaccggtttgcgcctgcccggctacgtcacgacccgccagcgtcagcggaagggccagtgcctgaatgggcgtacagttatgaaacccttttttttcaagggcttctacaaccttcggatgcagggcgaagtcggaaaacttctgttctgttaaatgtgttttgctcatagtgtggtagaatatcagcttactattgctttacgaaagcgtatccggtgaaataaagtcaacctttagttggttaatgttacaccaacaacgaaaccaacacgccaggcttattcctgtggagttatatatgagcgataaaattattcacctgactgacgacagttttgacacggatgtactcaaagcggacggggcgatcctcgtcgatttctgggcagagtggtgcggtccgtgcaaaatgatcgccccgattctggatgaaatcgctgacgaatatcagggcaaactgaccgttgcaaaactgaacatcgatcaaaaccctggcactgcgccgaaatatggcatccgtggtatcccgactctgctgctgttcaaaaacggtgaagtggcggcaaccaaagtgggtgcactgtctaaaggtcagttgaaagagttcctcgacgctaacctggcgtaagggaatttcatgttcgggtgccccgtcgctaaaaactggacgcccggcgtgagtcatgctaacttagtgttgacttcgtattaaacataccttattaagtttgaatcttgtaatttccaacgcttcccgttttatcttaaatgcgaagtgaacagatttctggctcgtcactcaatccgtcttgtcgtttcagttctgcgtactctcctgtgaccaggcagcgaaaagacatgagtcgatgaccgtaaacaggcatggatgatcctgccataccattcacaacattaagttcgagatttaccccaagtttaagaactcacaccactatgaatcttaccgaattaaagaatacgccggtttctgagctgatcactctcggcgaaaatatggggctggaaaacctggctcgtatgcgtaagcaggacattatttttgccatcctgaagcagcacgcaaagagtggcgaagatatctttggtgatggcgtactggagatattgcaggatggatttggtttcctccgttccgcagacagctcctacctcgccggtcctgatgacatctacgtttcccctagccaaatccgccgtttcaacctccgcactggtgataccatctctggtaagattcgcccgccgaaagaaggtgaacgctattttgcgctgctgaaagttaacgaagttaacttcgacaaacctgaaaacgcccgcaacaaaatcctctttgagaacttaaccccgctgcacgcaaactctcgtctgcgtatggaacgtggtaacggttctactgaagatttaactgctcgcgtactggatctggcatcacctatcggtcgtggtcagcgtggtctgattgtggcaccgccgaaagccggtaaaactatgctgctgcagaacattgctcagagcattgcttacaaccacccggattgtgtgctgatggttctgctgatcgacgaacgtccggaagaagtaaccgagatgcagcgtctggtaaaaggtgaagttgttgcttctacctttgacgaacccgcatctcgccacgttcaggttgcggaaatggtgatcgagaaggccaaacgcctggttgagcacaagaaagacgttatcattctgctcgactccatcactcgtctggcgcgcgcttacaacactgttgttccggcgtcaggtaaagtgttgaccggtggtgtggacgccaatgcccttcatcgtccgaaacgcttcttcggtgcggcgcgtaacgtggaagagggcggcagcctgaccattatcgcgacggcgcttatcgataccggttctaaaatggacgaagttatttacgaagagtttaaaggtacaggcaacatggaactgcacctctctcgtaagatcgctgaaaaacgcgtcttcccggctatcgactacaaccgttccggtacccgtaaagaagaactgctcactactcaggaagaactgcagaaaatgtggatcctgcgcaaaatcattcacccgatgggcgaaatcgatgcaatggaattcctcattaataaactggccatgaccaagaccaatgacgatttcttcgaaatgatgaaacgctcataaatttgtcttatgccaaaaacgccacgtgtttacgtggcgttttgcttttatatctgtaatcttaatgccgcgctggcgatgttaggaaaattcctggaatttgctggcatgttatgcaatttgcatatcaaatggttaatttttgcacaggactggtgggttcggaacggactttcccttctgaataaaggtcttcgtggttatacttctgctaataattttctctgagagcatgcattgtgaatttactgacagtgagtactgatctcatcagtatttttttattcacgacactgtttctgttttttgcccgtaaggtggcaaaaaaagtcggtttagtggataaaccaaacttccgcaaacgtcaccagggattgatacctctcgttggggggatttcggtttacgcagggatttgcttcacgttcggaattgtcgattactatattccgcatgcatctctctatctcgcttgtgccggtgtgcttgttttcattggcgcgctggatgaccgttttgatatcagcgtaaaaatccgtgccaccatacaggccgctgttggcattgttatgatggtgttcggcaagctttatctcagtagcctgggttatatctttggctcctgggagatggtgctcggaccgtttggttacttcctgacgctatttgccgtctgggcggccattaatgcgttcaacatggttgatggcattgatggcttgctgggcgggttgtcctgcgtctcgtttgcagcaatcggtatgattttgtggttcgacgggcaaaccagcctcgcaatctggtgctttgcgatgatcgccgccatcctgccatacatcatgcttaaccttggtatcctgggtcgccgctacaaagtctttatgggtgatgcgggcagtacgctgattggttttaccgtgatctggatcctgctcgaaacgacccagggcaaaacccatcccatcagcccggttaccgctttgtggataatcgccattccgctaatggatatggtggcgattatgtaccgtcgcctgcgtaaaggcatgagcccattctctcctgaccgtcagcatattcaccatttgatcatgcgtgccgggtttacttcccgtcaggcgtttgtgctgattacccttgccgcagcactgctcgcttccattggcgtgctggcagaatattctcattttgtcccggagtgggtcatgctggtgctctttttgctagcattcttcctctatggatattgcattaagcgtgcctggaaagttgctcgctttattaagcgcgtaaaacgcagactgcgtagaaatcgtggtggcagccccaatttaaccaaataaatgaggatgtgatgacacaaccaatgcctgggaaaccggccgaagacgctgaaaatgaactggatattcgtgggttgtttcgtaccttgtgggctgggaagctatggattattggcatggggctggcgtttgcgttaatcgcgctggcgtatacgttttttgctcgtcaggagtggagctcgacggcgattaccgatcgtccaacggtgaatatgctggggggatattactcgcagcagcaatttttgcgtaacctggatgtccgttcaaacatggcttctgccgaccaaccatcggtcatggacgaagcctataaagagtttgttatgcaactggcctcgtgggatacccgcagagagttctggctgcaaaccgactattacaaacagcggatggtgggcaacagcaaagccgatgcggcgttgctggatgaaatgattaacaacatccagtttatccccggagactttacccgcgcggtcaatgacagcgtgaagcttattgccgaaaccgcgcctgacgctaataacctgttacgtcagtatgttgcttttgccagccagcgtgcagccagccatctgaatgatgagctgaaaggcgcatgggcggcgcgtaccatccagatgaaagctcaggtgaagcgtcaggaagaggtggcgaaagccatctacgaccgccggatgaacagcattgagcaggcgctgaaaattgctgagcagcataatatttcgcgcagtgcgacagatgtgcctgccgaggaattacctgattcagaaatgttcctgcttgggcgtccaatgcttcaggctcgactggaaaatttacaggccgtcggtccggcctttgatctcgactatgatcagaatcgggccatgttaaacaccctgaatgttggtccaaccctggatccgcgttttcagacctatcgctatttgcgtacgccggaagaaccggtaaaacgcgatagcccacgtcgtgccttcctgatgattatgtggggcattgtcggggggctgatcggggctggtgtcgcattaacccgccgttgctcgaaatagcaacactgctgcggtgagcgcaaaggcgctcgccgcttattcgaagagaatcgatgtgaaagtactgactgtatttggtacgcgcccggaagccatcaagatggcgccgttggtgcatgcgttggcaaaagatcctttttttgaggctaaagtttgcgtcactgcgcagcatcgggagatgctcgatcaggtgctgaaactcttttccattgtacctgactacgatctcaacataatgcagccaggacagggcctgacagagataacctgtcggattctggaagggctaaaacctattcttgccgagttcaaaccagacgtcgtgctggttcacggcgatacgacgacgacgctggcaaccagcctggcggcgttttatcagcgtattcctgttggtcacgttgaggctggtctgcgcacgggcgatctctattcgccgtggccggaagaggctaaccgtacattgaccgggcatctggcgatgtatcacttctctccaaccgaaacttcccggcaaaacttgctgcgtgaaaacgttgcggatagccgaatcttcattaccggtaatacagtcattgatgcactgttatgggtgcgtgaccaggtgatgagcagcgacaagctgcgttcagaactggcggcaaattacccgtttatcgaccccgataaaaagatgattctggtgaccggtcacaggcgtgagagtttcggtcgtggctttgaagaaatctgccacgcgctggcagacatcgccaccacgcaccaggacatccagattgtctatccggtgcatctcaacccgaacgtcagagagccggtcaatcgcattctggggcatgtgaaaaatgtcattctgatcgatccccaggagtatttaccgtttgtctggctgatgaaccacgcctggctgattttgaccgactcaggcggcattcaggaagaagcgccttcgctggggaaacctgtgctggtgatgcgcgataccactgagcgtccggaagcggtgacggcgggtacggtgcgtctggtaggcacggataagcagcgaattgtcgaggaagtgacgcgtcttttaaaagacgaaaacgaatatcaagctatgagccgcgcccataacccgtatggtgatggtcaggcatgctctcgcattctggaagcgttaaaaaataatcggatatcactatgagttttgcgaccatttctgttatcggactgggttatatcgggctgccaacggcagcagcgtttgcctcacggcaaaaacaggtaattggtgtcgatatcaaccaacatgcggttgataccatcaatcgtggcgaaatccatatcgtcgaacctgatttggcgagtgtagtaaaaactgccgtagaaggcggttttttacgagcgagcacgacgccagttgaagcggatgcctggctgattgctgtacccacgccgtttaagggcgatcatgagccagatatgacctacgttgaatcggctgctcgctccattgcgccagtgctgaaaaaaggcgcgctggtgatccttgaatccacctcgccggtggggtcaaccgagaagatggcagaatggttagcagagatgcgtccggatctcactttcccgcagcaggtgggcgagcaggcggacgtcaacattgcttactgcccggaacgcgtgttaccaggacaggtaatggtcgagctgattaaaaacgatcgcgtgattggtggtatgacgccggtttgttcggcccgcgccagcgaactgtacaaaattttcctcgaaggtgagtgtgtcgtcactaactcgcggacggcggaaatgtgtaagctcaccgaaaacagcttccgcgatgtgaatatcgcttttgctaatgaattgtcgctgatttgtgccgatcaggggattaacgtctgggaactgattcgcctggcgaatcgtcaccctcgcgttaatattcttcagcctggccctggcgtgggcggtcactgcattgctgttgatccgtggtttatcgtggcacagaacccccagcaggcgcggcttatccgtaccgcgcgcgaagtgaacgatcacaaaccgttctgggttatcgatcaggtgaaagcggcggtggctgattgcctggcggctaccgataaacgcgccagtgaactgaaaatcgcctgctttggtctggcgtttaaaccgaatattgatgacctgcgcgaaagcccggcgatggaaatcgctgaactgatcgcccagtggcatagcggcgaaactctggttgttgagcctaacatccaccagttgccgaaaaaactgaccgggctttgtactctggcgcagcttgacgaggcgctggcaacggcagacgtgctggtgatgctggtcgatcatagtcagttcaaagttatcaatggcgacaatgtccatcagcagtatgtcgtcgatgccaaaggagtctggcgctgatgagaaaaattctgataacaggtggtgccgggtttattggctcggcgctggtgcgttatatcatcaacgaaatgagcgatgcggtggtagtggtcgataagctgacctacgccggaaacctgatgtcgctggcaccggtcgcgcaaagcgagcactttgcctttgagaaagttgatatctgcgatcgggcagaactggcacgcgtattcactgagcatcagccagactgtgtcatgcatctggcagccgaaagccatgttgaccgttctattgacggcccggcagcgtttattgaaaccaacattgtcgggacttatacattgcttgaagcggcgcgggcttactggaatacgctgacggaagataaaaaatcagcgttccgttttcatcatatctccaccgacgaagtatatggtgacctgcactcgacggatgatttcttcaccgaaaccacgccgtatgcgccgagcagcccttattccgcgtcaaaagccagcagcgaccatctggtgcgcgcctggctgcggacctacggtctgccgacgcttatcaccaactgctcgaataactacggtccttaccactttccggaaaaactgatcccgctgatgatcctcaacgcgctggcgggtaaatcgctgccggtatatggcaacgggcagcaaatccgtgactggctgtatgtggaagatcacgctcgcgcgctgtattgcgtggcgaccaccgggaaagtcggtgaaacctataatattggtggtcacaacgagcgtaagaatctcgatgttgtggaaaccatttgcgagctgctggaagaactggctccgaacaagccgcacggcgtggtgcactatagtgacttgatcacctttgtcgctgaccgtccggggcatgatctgcgttatgccattgatgcttcgaaaattgcccgtgaacttggctggctgccgcaggaaacctttgaaagtggaatgcgtaaaacggtgcagtggtatctggctaatgaaagctggtggaagcaggtgcaggacggcagctatcagggcgagcgtttaggtctgaaaggctaattttcagcggaggcaaacatgaaaggtattatcctggcgggcggttccggcacccgattgcatccgattacgcgcggcgtatcgaagcaactgttgccgatttacgataagccaatgatttactatccgctgtcggtgctgatgctggccggtatccgcgaaattctcatcatcactacgccggaagataaaggttatttccagcgcctgctgggcgatggtagtgagttcggtatccagctggaatatgccgaacagcccagcccggacggtctggcgcaggcctttatcatcggtgaaaccttccttaatggtgaaccttcttgtctggtgctgggcgataacatcttcttcggtcagggcttcagtccgaagctgcgtcatgttgcggcgcgcaccgaaggggcgacggtttttggctatcaggtgatggacccggaacgctttggcgtggtggagtttgacgacaatttccgcgctatctcgctggaagaaaagccaaaacagccgaagtcaaactgggcggtgaccgggctttatttctacgacagtaaagtcgtggagtacgcaaagcaggtgaagccgtcggagcgtgatgaactggagattacctccatcaaccagatgtacctcgaggcgggcaacctgaccgttgaactgctcgggcgcggatttgcctggctggataccggcactcacgacagcctgattgaagccagcacctttgtacagacggtggaaaaacgccagggctttaagattgcctgcctggaagagattgcctggcgtaacggctggctcgatgacgagggtgtgaagcgtgctgccagttcattagcgaaaactggctacggccaatatctgctggagttacttcgtgcccgtccgcgccagtattgagccactaacctgggaaaacgccttctttggtgttaacagcgccatcgtgcgcattacgtctgaagcaccgctcctgacgccagacgcgttagcgccgtggtcacgggtgcaggccaaaattgcggcatcaaatacgggtgaactggatgccctgcaacagctgggattctccctggtagaaggtgaagttgatttggcgctacccgtgaacaatgccagtgatagcggtgctgtagtggcacaagagaccgatattcccgcattacgtcagttagccagcgccgcatttgcgcaaagccgttttcgtgcgccgtggtatgcgcctgacgccagcagtcgcttttatgcacagtggattgaaaatgccgtgcgcggcacctttgatcatcaatgtctgattttacgtgcggcgtccggcgatattcgcggctatgtctctttacgggaactcaatgcgacagatgcgcgaattggcctgctggctggacgcggtgcaggtgctgagctgatgcaaacggcgctaaactgggcgtatgctcgcggtaaaacaactttgcgggtggcgacccaaatgggcaacaccgccgcgcttaaacgatacatacaaagtggtgcgaatgtagaaagcaccgcgtactggttatacaggtgatcacatgattccatttaacgcaccgccggtggtgggaaccgaactcgactatatgcagtcggcaatgggtagcggcaaactgtgtggcgatggcggttttacccgtcgctgccagcagtggctggagcaacgttttggcagcgccaaagtgttactgacgccgtcctgcaccgcttcgctggagatggcggcgctgctgctcgatatccagcctggcgatgaagtgatcatgccgagctacacctttgtctccaccgccaatgcctttgtgctgcgtggcgcaaaaatcgtttttgtggatgttcgcccggacaccatgaacatcgacgaaacgctgattgaagcggcgatcaccgataaaacgcgcgttatcgtgccggtccattacgcgggtgtggcctgcgaaatggacaccattatggcgttggcgaaaaagcataatttgtttgtggtagaagatgccgctcagggcgtgatgtccacttacaaagggcgtgcactgggaaccattggtcatattggctgctttagcttccatgaaaccaaaaactacacggcgggcggtgaaggcggcgcgacgctgattaacgataaagcgttaatcgaacgagccgagatcatccgtgaaaagggcactaaccgcagccagttcttccgtggtcaggtcgataaatatacctggcgcgatattggctccagctatttgatgtccgatctgcaagctgcatacctgtgggcgcaactggaagcagcggatcgtatcaaccagcaacgtctggcgctgtggcaaaactactacgatgcgttagcgcctctggcgaaagccgggcgtatcgagctgccgtcgattcccgatggctgcgtgcagaacgcgcatatgttctacattaaactgcgggatattgatgaccggagcgcgttgattaactttctgaaagaagcggaaatcatggcggtgtttcattacattccgctgcacggttgccctgcgggggaacactttggtgagttccacggtgaagatcgctacaccaccaaagagagcgagcgcctgctgcgcctgccgctgttctacaacctgtcgcccgtcaatcagcgtacggtaattgcgactttgttgaactacttttcctgatatgtcgttggcaaaagcgtccttgtggacggcggccagtacactggtcaagattggtgccgggttactggtcggtaagttgctggcggtgtcatttggtccggcggggcttgggctggcggcaaatttccgccagttgattaccgtgctcggcgtgcttgccggggctggcatctttaacggtgtaaccaaatacgttgcccagtaccatgataatccgcaacagctgcgccgcgtggtcggcacttcatcagcgatggtacttggtttctctacgctgatggcgctggtttttgtgctggcagctgcgccaatcagccagggattgtttggtaataccgactatcaggggctggtgcgtttagtggcgctggtgcaaatggggatcgcctggggcaacctgttactggcgctgatgaaaggctttcgcgatgccgcaggtaatgcgttatcgctgattgtcggcagcttgattggcgttctcgcgtactacgtcagttaccgtttgggcggttatgaaggggcgttgctgggtctggcgctgattcccgcgctggtggtaattcctgccgccatcatgttgatcaaacgtggtgtcatcccgttaagctatctgaaacccagctgggataacggtctggcagggcagttgagcaaatttacgctcatggcgttgattacgtcggtgaccttgcctgttgcttacatcatgatgcgtaaactgctggcggcgcagtatagctgggatgaggtggggatctggcaaggggtgagcagtatttccgatgcctacctgcaatttattacggcatcgttcagcgtatatttgctgcccacgttgtcgcggctaacggaaaagcgcgatatcacccgggaagtggttaaatcgctgaaattcgtcttaccggcagtggcggcggcgagttttaccgtctggctgctgcgtgattttgctatctggctgctgttgtcgaataaatttaccgctatgcgcgatctctttgcctggcagttagtgggtgatgtgttaaaagtgggcgcttatgtctttggttatctggtgatcgccaaagcgtcactgcggttttatattctggcggaagtcagccagttcactttattgatggtatttgcccactggctaatccctgcgcatggtgcactgggcgcggcgcaggcatatatggcaacttatatcgtctatttttctctttgttgtggcgtgtttttactctggcgtaggcgggcatgactgtactgattcacgtactgggatcggatatccctcaccataaccgaaccgttttgcggtttttcaatgacgcgctggccgcgacgagcgagcacgcgcgcgagtttatggttgttggcaaggacgacggcttaagtgatagctgtccggcgctttctgtgcaatttttccctgggaaaaaatcgctggcggaagcggtcatcgcgaaagcaaaagctaaccgtcagcagcgttttttcttccacggtcagttcaatcccacactgtggctggctctgctgagtggtggcattaagcccagccagtttttctggcatatctggggggcagacctgtatgagctttccagtggcttgagatataagcttttttacccactacgtcgcctggcgcaaaagcgagtcggctgtgtatttgccacccgcggcgatttgagcttttttgccaaaacgcacccaaaggtgcggggcgaactgctgtacttcccgacgcggatggacccttcgctcaatacgatggcgaacgatcggcaacgtgaagggaaaatgaccattctggtggggaactccggcgaccgcagcaataagcatattgctgccttgcgcgccgttcatcagcaatttggcgatacggtaaaagtggtggtgccgatgggatatccgcctaataacgaagcgtacattgaggaagttcgtcaggcggggctggagttattcagcgaagaaaatctacaaattctgagcgaaaaactggaatttgacgcctatctggcgctacttcgtcagtgcgatcttggttactttatttttgcccgccagcagggcattggtacgctgtgcttactgattcaggcgggcattccttgtgtgcttaaccgggaaaatccgttctggcaggatatgacggaacaacatttgccggtgctgtttactaccgacgatctcaacgaggatattgtgcgtgaagcgcagcgccagttggcgtcggtggataaaaacaccattgccttctttagccctaactatctacaaggctggcagcgggcgttggcgattgccgccggggaggtcgcatgagtctgctgcaattcagtggcctgtttgttgtctggctgctctgcacgctgtttattgccacgctgacctggtttgagtttcgccgtgtgcgctttaacttcaatgtcttcttttcattgctgtttttgctcacctttttcttcggcttcccgctgaccagcgtgctggtatttcgctttgatgttggtgtcgcgccgccagaaatcttgttgcaggcgttgctttctgcgggctgcttctacgcggtttactatgtcacctacaaaacccgcctacgcaaacgcgttgctgatgtaccgcgccgtccgctgtttaccatgaaccgcgtggagaccaatcttacgtgggtgatcctgatgggtatcgcgctggtaagcgtcggcatcttcttcatgcacaacggctttttgctgttccggcttaactcctacagtcagatcttttccagtgaagtctccggcgtggcgttaaaacgcttcttttactttttcatcccggcgatgctggtggtctactttctgcgccaggacagcaaagcgtggctgtttttcctcgtcagcacggtcgcctttggcttgctgacttatatgattgtcggcggcactcgcgccaatatcatcatcgcattcgctatcttcctgtttattggcattattcgcggctggatttcgttgtggatgctggcggcggcgggcgtgctggggattgttggcatgttctggctggcactaaaacgctatggaatgaatgtgagcggcgatgaagcgttctatacgtttctctatctcactcgcgacaccttctcgccgtgggagaatctggcgttgctgttgcagaactacgacaacatcgacttccagggcctggctccaattgtccgcgatttctatgtctttatcccttcctggctgtggccgggtcgcccgagtatggtgctgaactcagccaactactttacctgggaagtgctgaataaccactccggactggcgatctcgcctacgcttataggctcactggtggtgatgggcggcgcgttgttcatcccgctcggggcgatcgtggttggtctgatcatcaaatggttcgactggctgtatgagctgggcaaccgcgagcctaatcgctataaagctgcgatattgcacagtttctgctttggggcgatcttcaatatgatcgtgctggcgcgtgaagggctggattcgtttgtctcacgcgtggtcttttttatcgtggtcttcggcgcatgtctgatgatcgcaaaactgttgtactggctttttgaaagcgccggactcattcataaacgtacaaaatcatcgctccggacgcaggttgaaggataacaatgaataacaacaccacggcaccaacctatacgctgcgtggcttacagttgattggttggcgtgatatgcagcacgccctcgattatctgtttgctgacgggcagcttaagcagggaacgctggttgccattaatgctgaaaaaatgctgactattgaagataacgccgaggtcagggagttaattaacgctgccgaatttaaatatgcggatggcatcagcgttgtacgttcagtacgtaaaaagtacccgcaggcgcaggtttcccgcgttgccggtgccgatctctgggaagagctgatggcgcgcgcaggcaaagaagggacgccggtatttcttgtgggcggtaaacctgaagtgctggcgcaaactgaagctaaactgcgcaaccagtggaatgtgaatatcgttggcagtcaggatggttattttaaacccgagcagcgtcaggcgctgtttgaacgcattcatgccagcggtgcgcaaatcgtcaccgttgcgatgggatcgccaaagcaggagatcatcatgcgcgactgccgtctggtacatccagatgcgctgtatatgggcgttggcgggacttacgatgttttcaccggtcacgtaaaacgcgcaccgaaaatctggcaaacgctggggctggagtggctctaccgcctgctttcgcagccgagccgcattaagcgtcagcttcgtttgctgcgttatttacgctggcactacaccggcaacctatgattttcctctctttgtaaagcgacggagtggtcactccgtcgcctgtctgcttttttattacacaaagcattcaaatttttaatgctttatttgccatttctcctgaattacgaaaacatttgcaacactcgatgtacccataacgataaccggtaacaccggaaagcatgcaaacacaacacgaggatttatggcagataacaaaccagagctacagcgtgggctggaagctcgacatatcgaactcatcgccctggggggcaccattggcgtcggcctgtttatgggagccgccagtaccctgaaatgggccgggccatccgtattgttggcctatatcatcgccgggctgttcgtctttttcatcatgcgttcaatgggcgaaatgttgttcctcgaaccggttaccggttcgttcgccgtttatgcgcatcgttatatgagcccgttctttggctatctcaccgcctggtcttactggtttatgtggatggcggtggggatctctgaaatcaccgccattggcgtttatgtccagttctggttcccggagatggcgcagtggatacccgcattgatcgcagtggcgctggtggcgttggcgaatctggcggcggtgcggttgtacggcgaaatcgagttctggttcgcgatgatcaaagtcaccacgattatcgtgatgattgtcattggcctgggcgtgattttctttggctttggcaatggcgggcagtcgattggttttagcaatctcacagagcatggcggtttctttgcgggtggctggaaagggttcctgaccgctctgtgtattgtggtggcgtcctaccagggcgtggagctgattggcattactgccggtgaagcgaagaatccgcaggtgacgctgcgcagtgccgtaggcaaggtgctgtggcggatcctgattttctacgtaggcgcgattttcgttatcgtcaccatcttcccgtggaatgaaataggcagcaacggcagcccgttcgtactgacttttgccaaaatcggtattaccgcagcggcgggcattatcaactttgtggtgctgacggctgcgctctctggctgtaacagcggcatgtacagttgcggacgtatgctctacgcactggcgaaaaaccgtcagttaccggcggcaatggcgaaagtttcccgtcacggcgtaccggttgcgggtgtggcagtatctattgctattctgctaattggctcatgcctgaactacatcattcccaatccgcagcgtgtgtttgtctacgtctacagtgccagcgtgcttccggggatggtgccatggtttgtgatattgataagccagctgcgttttcggcgtgcacataaagcggcgattgccagccatccgttccgctcaatcctgttcccgtgggccaattacgtaacaatggcattcctgatttgcgttttgatcggcatgtactttaatgaagatacgcgtatgtcgctgtttgttggcatcatctttatgctggcggtgacggcgatttataaagtttttggccttaatcgccacgggaaagcgcataaactggaggaataagcagcaaaacgcacaaaccgtaaccaaacgcgcaatttatttaaaaagggactagacagaggggtgggaagtccgtattatccacccccgcaacggcgctaagcgcccgtagctcagctggatagagcgctgccctccggaggcagaggtctcaggttcgaatcctgtcgggcgcgccatttagtcccggcgcttgagctgcggtggtagtaataccgcgtaacaagatttgtagtggtggctatagctcagttggtagagccctggattgtgattccagttgtcgtgggttcgaatcccattagccaccccattattagaagttgtgacaatgcgaaggtggcggaattggtagacgcgctagcttcaggtgttagtgtccttacggacgtgggggttcaagtcccccccctcgcaccacgactttaaagaattgaactaaaaattcaaaaagcagtatttcggcgagtagcgcagcttggtagcgcaactggtttgggaccagtgggtcggaggttcgaatcctctctcgccgaccaattttgaaccccgcttcggcggggttttttgttttctgtgcatttcgtcaccctcccttcgcaataaacgcccgtaataactcattgccccacggtatgatttcgcccttaacgtattgaaggatgacttcaggcaaggagtgaccatgctgcaacaggttccaacgcgtgcttttcatgtgatggcgaaaccgagtggttccgattgtaatctgaactgtgactactgtttttatctcgaaaaacaatccctttaccgcgaaaagccagtcacgcatatggacgatgacacgctggaagcgtatgtccgtcactatatcgctgccagcgaaccgcaaaacgaagtggcttttacctggcagggcggcgaaccaacgctactcgggctggagttttaccgccgtgccgtagcgctacaggcgaaatatggtgctggcaggaagataagtaacagcttccagactaacggcgtgctgctggatgacgaatggtgcgcgtttctcgcggagcatcattttcttgttggtttatcgctggatggcccgcctgagatccacaatcaatatcgcgtgactaaaggtggcagacccacgcataagctggtgatgcgtgccctgacgttcctgcaaaaacatcatgtcgactataacgtgctggtctgcgttaatcgcaccagcgcgcagcaaccgttgcaggtatatgattttttgtgcgatgcgggagtggaattcatccagtttattccggtggtcgagcgcctggctgatgaaacggctgcccgcgaaggactgaaattgcatgcgcctggtgatattcagggtgagctaacggaatggtctgtgcgccccgatgaatttggtgaatttctggtggcgatttttgaccactggatcaaacgcgacgtcggcaagattttcgtgatgaatatcgaatgggcgtttgccaattttgtcggtgcgccgggtgcggtttgccatcatcagccaacctgtgggcgctcggtgattgttgagcacaatggcgacgtttacgcctgcgatcactatgtttatccgcaatatcggctggggaatatgcaccagcaaacaattgcagaaatgatcgattccccgcaacagcaggtgtttggtgaagataaatttaagcagttaccggcgcagtgtcgtagttgtaacgtgttaaaagcgtgctggggaggctgcccgaaacaccgctttatgctcgatgccagcggcaagcctgggctgaattatttatgtgccgggtatcagcgttattttcgccatctgccgccgtatcttaaagcaatgtctgatttgctggcgcatggccgcccggccagcgacattatgcatgcgcatttgctggtggtgagtaagtaaaaaagcggccattttgtggccgcctgcggttgattgccggatgcggcgtaaacgccttatccggcctacatgatcgtgcaaattcaataaattgcagcgttctgtaggctggataagatgcgtcagcatcgcatccggcaaaggcagatctcagcgatagcgccggcttagtcagatttaatctgcgcgcgtggtggatattttttcaggatctccatatacgcgtgcatttcggtctgtagcggtacacccatcggaatatggcgcacgccgatggagtcgctttcctgcggatcggtgtagaggttaaacaccgacgatcccgccgtttgcattactgtgccggtgaatccaccctgatatccgctctgggtataagcgtaaggttgctgaatcaggacgtgatacttgaactcatccatacgcacagcagcgagtttaccgttgaggaagtagtgctcggccttacggttagactgaccatttgttcccaggaagaaggatgtctggtccacaccatcgataaaggtggttttcggcactaaattcgccactttcgctccaggatgccctgccagatccagcgcggtagggaagagatctgccagatcgacaataccgtcagatttacgcggttggatcatccctttccagtaaacgaaagtcggtacgcgaacgccgccttcccaggtcgaacctttcgcaccacggaacggggtgcgtccgtgcggcggtacttcggcttccggtccgttatcggaggtaaagacgatcagcgtgttatcaagctgaccgtttttctccagtgttttatacagattagcgaacacatcgttcatctccaccatgcagtcgccatacgaggtgcgtgccggagagctacccgcatatttagcgttcgggtagttatcgaagtgacagccgcgagtgccgtaatagaggaagaaaggcttatcgctcttcgccatcttgtcgaggaacttaacgccatattccatccagcgttgatccagatcttccatatatttcggcgtaatgtcggcaatggcctgttgttcgccgccgcgcactgcatgaacatcatctttgctgaacggtaattgcttgatgtattcagaacggtccggactcagggccacttccggattgacgtgaacgtcgcgccattcggtgtacatatcagacaccgagttaaagccacggaaatcatcaaagccaacgttctgcggctgcgactctttgttttcccccatatgccatttcccgatagcctgggtgacgtaaccttggtcgtgcagcaattgcggcagggtggttaacccttgcagacctcccggttgcccgtacattggcggcatcagaatgccgtggtggatggagtattgtccggtgagaatggtggcgcgggttggggaagagcttggttgagaatacgccgacgttaaaatcagcccctggctggcaactgcatcgatatctggtgtagggttacccaccgccacgccgccaccgttaaaaccgacgtccatccagcccacatcgtccagcaggaagataaccacattgggcttcttaccggtttttttctcaagttctgccagcttctgctgggtttctttatcctgcgccggatgctgcattactggcatcatgttgtcggcaatagtggtcgccggtttaaccagatactggtttgggtgatcgtatccggcaaagcctttgcgtgcggtggcagttgacggggtatctgctgcgctggccatgagaggaagagcggcggcgacagcaacaacaagacgtttgggtgaaaacgaaatttccatgcaaaatgctccggtttcatgtcatcaaaatgatgacgtaattaagcattgataattgagatccctctccctgacaggatgattacataaataatagtgacaaaaataaattatttatttatccagaaaatgaattggaaaatcaggagagcgttttcaatcctacctctggcgcagttgatatgtaaggcaggtttattatatcgcgttgattattgatgctgtttttagttttaacggcaattaatatatgtgttattaattgaatgaattttatcattcataataagtatgtgtaggatcaagctcaggttaaatattcactcaggaagttattactcaggaagcaaagaggattacagaattatctcataacaagtgttaagggatgttatttcccgattctctgtggcataataaacgagtagatgctcattccatctcttatgttcgccttagtgcctcataaactccggaatgacgcagagccgtttacggtgcttatcgtccactgacagatgtcgcttatgcctcatcagacaccatggacacaacgttgagtgaagcacccacttgttgtcatacagacctgttttaacgcctgctccgtaataagagcaggcgtttttttatgtgtcaagaaggccccggaggtgcttgcccccgggtgagaaggaactactgtggtgggttgttctgcaacgttaacatcaaaccgtcgtgacgcatcgctgcagcttcttccggcttgtgcagtctgtccagcgcgtcggcaagccatgcgtaatcgtaggcgtccggacgttgtttcagcgctgcgcggaaggcgagcgatgcttcctgccattctccgtgcttcatcagtgactggcccagtgtgctccacaacagcgggcgatcgccgacgtttttgatctgctggcgcagcactttttccagctgttccggattgttggttttcagtcgaggaatcggcagcagtaggcgatcgtcgtactggcgtttcaggccatcgatgataatttgctgggcagtatcatgatcgtcacattcaataagatgttccgccattgccacctgcaacgctacctgatgacgcgttttccggctttggtttttccaccagttacgcaaaccttcactaccgttatcggcacgcgcctgatccatcaggccaatccatgcctgttgttccagcattgcacgatgttcttcatcaccaacatgggctttcgccattgatgggatgatatccagcagagaactccatgcacctgtgcggatatacgcctgttccgccagacgtaatacttccggatggcgtggcgtaacttccagcagcttatccacgccgtggcgtgcagcatggttttcattacgggccagttgcagacgtacacgggtgatttctaccggaatggtgtcattgccggccagctccgctgcgcgttccagatgttggttggcgcgcgcttcatcaccacgttgttgcgcggcttcggcagccagtagatagttcaccaccggttgttcagcgtgatcggcatttttcgccatcagcttttcaacttgctgataatcgccttccgccagtttcagcagcgcctgttcggtctgcttacgtgcacggcgacgcttacgcccgacaaaccacccacgggtgtgcgcgccagtgcggaagatccgccgcagtagccactcaatggcaaacagcactaccatcgccagaatcaatatgatcgccaggcccgtgacgctggtttcgatattgtagttgtcggtctggatcagcacataaccctgatgaccggcaatcatcgggccaaccactatccccgcaatcagcaacacaaagagtaataacacttttagcatggttattctccttgcggcgcggctgccggagtatcaccttgcggtgcaggtgcaggtgcaggtgcaggtgcaggtgcaggtgcaggtgcaggtgcaggtttagcttccgttgtccctgctgccggttgtgccagcaggttacgcacgcgagtctgcatcagtttttccagcatcgcctggctttgcagggtttccggaagatccatcgagatattttgctggcttaactggtccacctcgtcgaggaacgctttggtggtggcatcatcagtatcgtagtaagcacgtacccaggtggagacgttctccagcgcctggcgataagtctcttcctggtgacgcggtacagcttgtgctgcgaccagcaggcgagagcgaatattttcgcgcagatagatatcctgatttggcgctaacagcggtacggcggtgtcatcacgacggcgaatcgtaatgaagttgtccataaagttctgccagcttttttgcagattgatacgccattcgctgatggaactggaaagctcttcaccgtctgaatccatcggcgaaccatcgctgtcattatcggccagacgcaggttatctacctgatttgaaagctgattaagcttaaggatgatgccgtcataatccacctgcgatactgcagaaaggctggcgatatcatcggtaattgcccgacgaacggtaatcagactcgggtcattcatatccgccaggctggcgtctgcacttttcagcaacgctgcagcggtcgtgacgtcctgatcgctccacagcttccgtccggcgagtttcaccagaaaatcggcctgagccagcagccaggttttagcatcgctgccggaaatggtggcgaccttttgttggacctcatccaactgttttgccagcgtttcttgctgacgattcgcctgcttaagctgtgcagcttgttgcttaataatgccttccagctcggatttttggctctcctgggctttttgcaatgccgtcagttggttagccagggcatcgctggtggcggtctgattgacggcctgttgtttaccccagccatacaaaccgacgcccgccgccagagcaatagcgatagccaccgcgctgagaatcaatgcggtattgttcttactctttttttctgttgcgacaggttgtgacgtggtgtccacggcctccctggtctcttcaaccacggcggaggttttttcttgttccgtcattatggcttcctgttatgagagttattgtaatgcccgtaaaagcgcatcgttgtcagcgttatcggcgaccttaatgtcttgccagcccagttcccgggcgagtttcgccaaacgctcactgacgaccaatagtcgacagtgtagtaaccagtgctcacgataccattgtgggatcagcgaccagagttgctgcaacatttcaccgctggtaacaacgaccgtcgtcacctcgcgggattgccagcgcatcgcttcttctgcaccatcgtaatggattgcgcatcgttgataacattcacaaaaagtgacctcagcaccgcgcgccgtcagggtatccccaattagctcacgaccaccattgccacgtaatatcagcgcacgtttgcccgcaatattttgtaattcaggtaattgtagcaagacttcgctgatttcccgatcctgcgggtagagaatcttctgtccgcttacggtatgtagtgccagtgcggtggtgcgtccaatggcgaaataatcaggtagtcggggccatttacgatcttgctgatgcagctgtgattgggcaaaagcaaccgcgtgttgcgagagggcaaacaacagatcgctctcccccagcgctgccagttgatcagcaagttgcggtaattgttgacccggagaaaactcaatcagcggaaaatgccaggccacctgccccagtgtgcgcagacggctcactaactcttctccagcgggagacgggcgggtgacaaggatactcatgccggggcgtctccgttatagacttcagcgaggatctcgcgcgcgccgttattcagtagctcttctgccagcgaaatccccatttgttcggcatcttgcggcgcaccgcggcgttcaccgcgaataatctgcgaaccgtccggcgcgccgaccagcgcacgcagccagatttcgccatcaataagctcggcgtagctaccaattggcacctgacatccgccttcgagacgggtattcatggcgcgttctgcggtaacgcgcagtgcagtttcgtggtgattcagcgcggcaagcagctcgcgagtgcgtgaatcatcaaggcggcattcaatacccaccgcaccttgtcctaccgccggaagagaaatctcgggtggcaacgcggcgcgaatacgtgactccagacctaaacgttttagtccggctacggcaagaatgatggcatcgtattcgccgttatccagtttgctcaggcgagtgccgacgttgccgcgcagggagcggataatcagatccggacggcgttcagccagttggcactggcgacgtaaactggacgtcccgacgatactgcctgccggtaacgcatccagactgtcatagttattggacacaaaggcatcgcgaggatcttcacgctcacaaatagtgaccagtcccagaccttgcgggaattcaaccggcacatctttcattgagtgtacggcgatatcggcgcgattttcgaggagcgcgacttccagctcttttacaaataagccttttccgcctactttcgccagcggcgtatcaagaatcacatcgccgcgcgtcaccatcggtaccagttcaacgaccaggcccggatggctcgccatcaacttgtctttgacatagtgtgcctgccagagtgcaagtgggctttggcgtgtggcaattcttaaaacattgtctaacatgcttgttaccgtcattatcatccgtggtccatcctaacatccttgccagagtgatgtcagtgttgtggtgaaacgtagacgcctgcgcaaaccgtaaaatgaggtctggcagtggatcctgacaggcgtttcacgccgttgtaataaggaatttacagagaataaacggtgctacacttgtatgtagcgcatctttctttacggtcaatcagcaaggtgttaaattgatcacgttttagaccattttttcgtcgtgaaactaaaaaaaccaggcgcgaaaagtggtaacggttacctttgacatacgaaatatcccgaatgccgcgtgttaccgttgatgttggcggaatcacagtcatgacgggtagcaaatcaggcgatacgtcttgtacctctatattgagactctgaaacagagactggatgccataaatcaattgcgtgtggatcgcgcgcttgctgctatggggcctgcattccaacaggtctacagtctactgccgacattgttgcactatcaccatccgctaatgccgggttaccttgatggtaacgttcccaaaggcatttgcctttacacgcctgatgaaactcaacgccactacctgaacgagcttgaactgtatcgtggaatgtcagtacaggatccgccgaaaggtgagcttccaattactggtgtatacaccatgggcagcacctcgtccgtagggcaaagttgttcctctgacctggatatctgggtctgtcatcaatcctggctcgatagcgaagagcgccaattgctacaacgtaaatgtagcctgctggaaaactgggccgcctcgctgggtgtggaagtcagcttcttcctgattgatgaaaaccgcttccgtcataatgaaagcggcagcctggggggcgaagattgtggctccacccagcatatactgctgcttgacgaattttatcgtaccgccgtgcgtctcgccggtaagcgtattctgtggaatatggtgccgtgcgacgaagaagagcattacgacgactatgtgatgacgctttacgcgcagggcgtgctgacgccaaatgaatggctggatctcggtggcttaagctcgctttctgctgaagagtactttggtgccagcctttggcagctctacaagagtatcgattccccatacaaagcggtactgaaaacactgctgctggaagcctattcctgggaatacccgaacccacgtctgctggcgaaagatatcaaacagcgtttgcacgacggcgagattgtatcgtttggtctcgatccatactgcatgatgctggagcgtgttactgaatacctgacggcgattgaagattttacccgtctggatttagtacgtcgctgcttctatttaaaagtgtgcgaaaagctcagccgtgaacgcgcctgcgtaggctggcgtcgcgcagtgttgagccagttagtgagcgagtggggttgggacgaagctcgtctggcaatgctcgataaccgcgctaactggaagattgatcaggtgcgtgaggcgcacaacgagttgctcgacgcgatgatgcagagctaccgtaatctgatccgctttgcgcgtcgcaataaccttagcgtctccgccagtccgcaggatatcggcgtgctgacgcgtaagctgtatgccgcgtttgaagcattaccaggtaaagtgacgctggtaaacccgcagatttcacccgatctctcggaaccgaatctgacctttatttatgtgccgccgggccgggctaaccgttcaggttggtatctgtataaccgcgcgccaaatattgagtcgatcatcagccatcagccgctggaatataaccgttacctgaataaactggtggcgtgggcatggtttaacggcctgctgacctcgcgcacccgtttgtatattaaaggtaacggcattgtcgatttgcctaagttgcaggagatggtcgccgacgtgtcgcaccatttcccgctgcgcttacctgcaccgacaccgaaggcgctctacagcccgtgtgagatccgccatctggcgattatcgttaacctggaatatgacccgacagcggcgttccgcaatcaggtggtgcatttcgatttccgtaagctggatgtcttcagctttggcgagaatcaaaattgcctggtaggtagcgttgacctgctgtaccgcaactcgtggaacgaagtgcgtacgctgcacttcaacggcgagcaatcgatgatcgaagccctgaaaactattctcggcaaaatgcatcaggacgccgcaccgccagatagcgtggaagtcttctgttatagccagcatctgcgcggcttaattcgtactcgcgtgcagcaactggtttctgagtgtattgaattgcgtctttccagcacccgccaggaaaccgggcgtttcaaggcgctgcgcgtttctggtcaaacctgggggttgttcttcgaacgcctgaatgtatcggtacagaaactggaaaacgccatcgagttttatggcgcgatttcgcataacaaactgcacggcctgtcagtgcaggttgaaaccaatcacgtcaaattaccggcggtggtggacggctttgccagcgaagggatcatccagttctttttcgaagaaacgcaagacgagaatggctttaatatctacattctcgacgaaagcaaccgggttgaggtatatcaccactgcgaaggcagcaaagaggagctggtacgtgacgtcagtcgcttctactcgtcatcgcatgaccgttttacctacggctcaagcttcatcaacttcaacctgccgcagttctatcagattgtgaaggttgatggtcgtgaacaggtgattccgttccgcacaaaatctatcggtaacatgccgcctgccaatcaggatcacgatacgccgctattacagcaatatttttcgtgatgaacgtgccggaaagcgaggcttatccggcatgcaatcttagcggaaactgactgtttcacccgcctgctgcgtcgccgcctgttccagcaaatcccagaaggtttcgccgctgcgatcacaaatccactcatcgcctttcaggtcaaaatggtagccgccctgtttggttgccagccatacctggtgcagcggctcctggcggttgataatgattttgctgccattctcaaaggtaatggtcagtacgccgccgttgatttcgcagtcgatatcgctgtcgccatcccagtcgtccaggcgttcttcaatggtcagccagagttgatcagccaggcgatgaaattcactgtcgttcattgttgtatcctgtttttaagtgatggcggcagtatagcggcatggggtcagggcttcaaagtttgcacctctgcggctgcgttccggcacgattcatccgtcaccggaataatgatgtctctgtgtagcgaaagatttgtctcttcattagggcgcagttacaccacgtctttccctgtttctggtaaacattatgatcaggtttaccgagcgagcatcctcacgctgacggaactaaaaaagacaacaaacaaaccacattgcgatagtgcataaagccatcctggcgcgaggtgccgatcacgaaactaccagcaaaacataaatccccacgagtaagcgttatactcgcagcatttcctcacttttcagacttcataaagagtcgctaaacgcttgcttttacgtcttctcctgcgatgatagaaagcagaaagcgatgaactttacaggcaatccataatgaaaaacgtgtttaaggcactcactgtattacttactctcttcagcctgacgggctgcggtctgaaaggtccgctctatttcccgcctgcagataaaaacgcaccgccgccgaccaaaccggtagagacgcaaacgcaatccacggtgccggataaaaacgatcgcgccactggcgatggtccatcccaggtgaattactaaaagtcagtttctgtacccgcgtgattggagtaaatgatgcagttctcgaaaatgcatggccttggcaacgattttatggtcgtcgacgcggtaacgcagaatgtctttttttcaccggagctgattcgtcgcctggctgatcggcacctgggggtagggtttgaccaactgctggtggttgagccgccgtatgatcctgaactggattttcactatcgcattttcaatgctgatggcagtgaagtggcgcagtgcggcaacggtgcgcgctgctttgcccgttttgtgcgtctgaaaggactgaccaataagcgtgatatccgcgtcagcaccgccaacgggcggatggttctgaccgtcaccgatgatgatctggtccgcgtaaatatgggcgaacccaacttcgaaccttccgccgtgccgtttcgcgctaacaaagcggaaaagacctatattatgcgcgccgccgagcagacaatcttatgcggcgtggtgtcgatgggaaatccgcattgcgtgattcaggtcgatgatgtcgataccgcggcggtagaaacgcttggtcctgttctggaaagccacgagcgttttccggagcgcgccaatatcggttttatgcaagtggttaagcgcgagcatattcgtttacgcgtttatgagcgtggggcaggagaaacccaggcctgcggcagcggcgcgtgtgcggcggttgcagtagggattcagcaaggtttgctggccgaagaagtacgcgtggaactccccggcggtcgtcttgatatcgcctggaaaggtccgggtcacccgttatatatgactggcccggcggtacatgtctacgacggatttattcatctatgaagcaaccaggggaagaactgcaggaaacactcacggagcttgatgaccgggcggttgtcgattatctgattaaaaatcctgagttttttatccgtaatgcgcgcgcagtagaagcgatacgtgtgccgcatccggtacgcggcaccgtttcgttggtcgagtggcacatggcccgcgcacgtaatcatattcatgttctggaagagaacatggcgctgttgatggaacaggctatcgccaacgaaggcctgttttatcgcctactctacctgcagcgcagtctcaccgccgccagcagtctcgacgatatgctgatgcgctttcaccgctgggcgcgcgatctcggcctggcaggtgcgagtctgcgcctgtttccggatcgctggcgcttaggtgcgccgtcgaaccacactcatctggcattaagccgtcagtctttcgaaccgctgcgtattcagcgtttggggcaggaacagcactatcttgggccgcttaacggaccagagctgctggtggtgctaccggaagcgaaagcggtgggatcggtggcgatgtcgatgctgggaagcgatgctgatttgggtgtcgtgctgtttaccagtcgcgatgccagtcactatcaacaagggcaaggaacgcagttacttcatgaaattgcgctgatgttgccggagcttctggagcgttggattgaacgcgtatgaccgatttacacaccgatgtagaacgctacctacgttatctgagcgtggagcgccagcttagcccgataaccctgcttaactaccagcgtcagcttgaggcgatcatcaattttgccagcgaaaacggcctgcaaagctggcagcaatgtgatgtgacgatggtgcgcaattttgctgtacgcagtcgccgtaaagggctgggagcagcaagtctggcgttacggctttctgcgctacgtagcttttttgactggctggtcagccagaacgaactcaaagctaacccggcgaaaggtgtttcggcaccgaaagcgccgcgtcatctgccgaaaaacatcgacgtcgacgatatgaatcggctgctggatattgatatcaatgatcccctcgctgtacgcgaccgtgcaatgctggaagtgatgtacggcgcgggtctgcgtctttctgagctggtggggctggatattaaacacctcgacctggagtctggtgaagtgtgggttatggggaaaggcagcaaagagcgccgcctgccgattggtcgcaacgctgtggcgtggattgagcactggcttgatttgcgcgacctgtttggtagcgaagacgacgcgctttttctgtcgaaactgggcaagcgtatctccgcgcgtaatgtgcagaaacgctttgccgaatggggcataaaacaagggctgaataatcacgttcatccgcataaattacgtcactcgttcgccacgcatatgctggagtcgagcggcgatcttcgtggtgtgcaggagctgctgggtcatgccaacctctccaccacgcaaatctatactcatcttgattttcaacaccttgcctcggtgtacgatgcggcgcatccacgcgccaaacgggggaaataatgcgtttttaccggcctttggggcgcatctcggcgctcacctttgacctggatgataccctttacgataaccgtccggtgattttgcgcaccgagcgagaggcgcttacctttgtgcaaaattatcatccggcgctgcgcagcttccagaatgaagatctgcaacgcctgcgccaggcggtacgggaagcggaacccgagatttatcacgacgtgacgcgctggcgttttcgttcgattgaacaagcgatgctcgacgccgggctgagtgccgaagaagccagtgcaggcgcacacgcagcaatgatcaactttgccaaatggcgcagccgaatcgacgtcccgcagcaaactcacgacaccttaaaacagctggcgaagaaatggccgctggtggcgatcaccaacggtaacgcccagccggagctgtttggtttgggggattattttgagtttgtgctgcgcgctggcccgcacgggcgctcaaaaccgttcagcgatatgtactttttggctgcggaaaaactcaacgtgccgatcggcgagatcttacatgttggggacgatctcaccactgacgtgggtggggcaattcgcagcggaatgcaggcttgttggatcagaccggaaaatggcgatctgatgcaaacctgggacagccgtttactgccgcatctggaaatttcccggttggcatctctgacctcgctgatataatcagcaaatctgtatatatacccagctttttggcggagggcgttgcgcttctccgcccaacctatttttacgcggcggtgccaatggacgtttcttacctgctcgacagccttaatgacaaacagcgcgaagcggtggccgcgccacgcagcaaccttctggtgctggcgggcgcgggcagtggtaagacgcgcgtactggtgcatcgtatcgcctggttgatgagcgtggaaaactgctcgccatactcgattatggcggtgacgtttaccaacaaagcggcggcggagatgcgtcatcgtatcgggcaactgatgggcacgagccagggcggtatgtgggtcggcaccttccacgggctggcgcaccgtttgctgcgtgcgcaccatatggacgccaatctgccgcaggatttccagatcctcgacagtgaagaccagctacgcctgcttaagcgtctgatcaaagccatgaacctcgacgagaagcagtggccgccgcggcaggcaatgtggtacatcaacagccagaaagatgaaggcctgcgtccgcatcatattcaaagctacggtaatccggtggagcagacctggcagaaggtgtatcaggcgtatcaggaagcgtgtgaccgcgcgggcctggtggacttcgccgagctgctgctgcgcgctcacgagttgtggcttaacaagccgcatatcctgcaacactaccgcgaacgttttaccaatatcctggtggacgaattccaggataccaacaacattcagtacgcgtggatccgcctgctggcgggcgacaccggcaaagtgatgatcgtcggtgatgacgaccagtcaatctacggctggcgcggggcgcaggtggagaatattcagcgtttccttaatgatttccccggtgccgaaactattcgtctggagcaaaactaccgctctaccagcaatattctgagcgccgctaacgccctgattgaaaacaataacgggcgtctgggtaaaaaactgtggaccgatggcgcggacggtgagcctatttccctctattgcgcttttaacgaactcgatgaagcgcgttttgtggttaaccgcatcaaaacctggcaggacaacggcggagcgcttgccgagtgcgccattctctaccgcagcaacgcccagtcgcgggtgctcgaagaggcgttattgcaggccagtatgccgtaccgtatttacggcgggatgcgcttcttcgaacgccaggaaatcaaagatgcgctctcgtatctgcgcctgattgccaaccgcaacgacgacgcggcctttgagcgtgtggtgaatacgccaacgcggggtattggtgaccggacgctggacgtggtacgtcagacatcgcgcgatcgccagttaacactctggcaggcatgtcgtgagctgttgcaggaaaaagccctcgccgggcgagctgccagcgccttgcagcgatttatggaattaatcgacgccttagcgcaggaaactgccgatatgccgctgcatgtacagactgaccgggtaattaaagactccggcctgcgtaccatgtatgagcaggagaagggcgaaaaaggtcagacgcgtatcgaaaacttagaggaactggtgacggcaacgcgccagttcagctacaacgaagaagacgaagatttaatgccgctgcaggcgttcctctcccatgcggcactggaagcaggtgaagggcaggcggatacctggcaggatgcggtgcagttgatgacgctacactcggcgaaaggcctggagttcccgcaggtgtttatcgttggtatggaagagggcatgttcccaagccagatgtcgctggatgaaggcgggcgtctggaagaagaacgccgtctggcctacgttggcgtaacccgcgcgatgcagaaactgacgctgacctacgcggaaacccgccgtctgtatggtaaagaggtttaccatcgcccgtcgcgctttatcggcgagctgccggaagagtgtgtggaagaggtgcgcctgcgcgccacggtaagccgcccggtcagccatcagcggatgggtacgccgatggtcgagaacgacagcggctacaagctcggccagcgcgtacgccacgctaagtttggtgaaggcaccattgtcaatatggaaggcagcggtgagcatagccgtttgcaggtggcatttcagggccagggtattaaatggctggtggcggcatacgcccggctggagtcggtgtaacgttgccggatgcggtgctgcgcaccttatttggcctaaaaaatcattcatattcaataaattgcaacgtcatgtatgccggatagggcgtttacgccgcatccggcatctgcgccatcttcagtatctgacacaaaactatcgttttaacctttccgctctacggaaatcatggtgacaaaaggatagcgttgccacgggattgccccgcctttcatatacatatgtgaaatcgtgccatcaagataaagcagctgctcaacgttcagtttcgctttggcataacaggcaaaatcataaaaatttgtcgcctgctggctcaacaaaaacacggcattcccatgtttattaatcccaacaccgttacgaattttacgtgaggcgacgttgggatgaatacgcggattaattacaccgttttccatcaacattggccctgactgcaccgcaaactgaatatctttactggctttaaaagcatctagacgaacgatgccgactttatctcccgcgacataaaacacgccgccaggacggataaagaaattcccttcacctgaagcgagatttaacgccaccttctgctgaccgttttcgatgtacaaaccgagcggcgcatagctttcatcatagatgccgccgttcatcgccatctgcacctgaccctgactattaatatccgccagcagagcatgtaacgttccccacgcttcgccattggctttttgccagtacattttcacccgctctgtttgaggattaacggtatacgcctgtacggtcagcgtcggatctgagagtgcgcaatcatcagcggcaacagcaaacaagggaagtaaggtgagggcgagaaaaatccgtttgagattcaaggtgatcattcctttaccaatgagtagctgatgcgccattataggtcctggatgtgggatttttttatcctgttagcgaccttgacgagtaccaaaaagcgcgaagttcaactattgttctgtggtgttctgttgcgtgttgacggcaaaattttgctggcgtaacatgcgcgcacgatcactctaagaggacattcgccttggacacacccagtagatactggctcactatcctgtcatccaggatcaactcctaaggctatccctttttgctgatagccttagcggttgtcagcgacctcaatttttcccgtcgcgctgagtcaggctgtttaatggtctgaaacccaatttgtttctgtgtgcccaccgaactgtccgatattttaagcattgggagtcccggtcatgctgagcgcatttcaactggaaaataaccgactgacccggctggaagtcgaagagtcacaaccccttgtaaatgcagtatggattgatcttgtcgaaccggacgacgacgagcgactgcgcgtacaatctgaacttggccagagcctggcaacccgcccggaactggaagacatcgaagcatcggcacgtttctttgaagacgacgacggcctgcatattcactccttcttcttctttgaagatgcggaagatcacgccggtaactccactgtggcatttaccatccgtgatggtcgtctgtttactctgcgtgagcgtgaactgcccgcttttcgtctgtatcgtatgcgtgcccgtagccagtcgatggtagacggtaacgcctacgagttgctgctggatctgttcgaaaccaaaatcgaacagttggcagatgaaattgaaaatatctatagcgacctggagcagttgagccgggtgattatggaagggcatcagggcgatgagtacgacgaggcgctctccactctggcggaactggaagatatcggctggaaagttcgcctgtgtctgatggatacccagcgcgcgctcaacttcctggtgcgtaaagcgcgtttaccgggtgggcaactggagcaggcgcgtgaaatcctgcgagatatcgaatccctgctgccgcataacgaatccctgttccagaaggtgaacttcctgatgcaggcggcaatgggttttatcaacatcgagcagaaccgcatcatcaaaatcttctcggtggtatccgtggtattcctgccgccgacgctcgttgcttccagctatggcatgaactttgagtttatgccagaactgaagtggagcttcggctaccctggcgcgattatctttatgatcctcgcgggcctggcaccgtatctgtactttaagcggaagaactggttgtaaaaaacgagagcggtggcttagtctggctaagccacctgttattcaaaggctccaggtatttaacccttttacctctttctcatagaaccatttgttcgtgttaacagcaacataggctgctacggcaattcccagaatgttaacgccaattagtgcaccaacaaatagagatagaataccaagtaatagaactataattgcttttttccataaccccaggacaaataaatatatccaggaacagaagaaagcaatgaaattcatttgaatagttaagcgttgtcttacttttaatgctttaaatgctgctttatattctggtgttgccccccagaatccaggaaaaccatgttgatcataaaaattaaatcggtatttccatttttcacttaatgaaccatcgttcatatattccttactcataaatactccataactattgttttgatgaatcagtaggtgcaagcattagcatactgaaagtggaaaaataacaaatcaaaaaaatcatcgaaccattgcctgaacaggcaaaatcttcggctatcattgtgatgatagagatgatatatactgctaatgtaccaaaaacataagtttttatatagatgaaaccactatcacggagtcgctggcaattcatgttgatgacgagataatggagtacgatggtagagactataacaagaaagcctgcttctccatcgttaaaaaagataataagaaaggcaaaaatgaaatttattaaaataaatgaaaatatataacgacgtctggaaatcttaccgttagatgttgggataaatatacgtaacataaattttacatccttgtatgagtctccggtcagcatggcaatatgcccactctcatgcaagagtcggcatattttttcagaatatatttattttttatttggacgttctacgctgcgtataaatcgcatccatcacaaaaattgccagcgccacccaaataaaggcgaaagtcaccatcttatcggcacccggtttttcaccataaaacgtcacagccagcaggaacatcagtgtcgggccaatgtactggaaaaagcctaacgttgagagacgcaagcgcgtggcagcggcggtaaaacacaacagcggtacggtagtgacaataccggcggcgatcagcagtaaattcagcgacatcgggttttgccccatatggctggttgagctgtcggcaatagcaaacaggtaaattgccgccacgggcagcagccacatggtttcgattaacatgccggtttgcgcttcaacggcaatcttcttgcgtaccagaccgtagaaggcaaaactaaatgccagtcccagcgcgataataggtagcgaaccaaaagtccacagctggactaacacgccacatatcgccagaatcaccgccagccattgcatccggcggaatcgctcgccgaggaaaatcatccccagcacaatgttcaccagcgggttaataaagtaaccaaggctcgcttccagcatatggtgattgttcaccgcccagataaacagtagccagttgccaccaatcagcacggcagagactgccagcataaaaattttctgtggcgtctgaatcagcgtttttaaataggaccactggcggcaaatgctcatcagcaccaccataaagaaaaacgaccagatcacgcgatgcgtcaggatttcatcggcgggcacgtagtaaatcaacttgaagtacgctggcgctataccccaaataaaataagcggcaagagcgagtaatacgccctgccgcgtttgttttgcatccatcgggaatactcatttttaattggtaacagcagtttacctgcttttatgtcttcaacctaccatataggtggcggtggcactggcaatataaagctgttcttcattgtgtaattcaacgcgggcgacggcgactttattgcctgcacgcaacaggctactagtagcagtaaaacgctcgcccctgcctgggcgcagataatcaacgcgaagatcaatggtccccatccgcgatagccgctggcgtagttcatcttcactgatggtttcgtggcgggttaaggtacttcccacgcacaccagaccggcggcgacatccagcgccgacgcaatgaccccgccgtgcaaaatgctttgcgcccagttgcccaccatcattggctgatttttaaaggccagctgtgcgaactctttttcgtaacgctccagttccatccccaatgcgcggttaaatggcatgtgataaacaaacatctcacccactaatttcagggcttgttcagcggtcagtacggcagacatatcatccttacacttcattggttaatgaaatgttgattttatgcttctttgttgttggtttctactttaggaagggataactaacggctatggagttaagtatgtaaaatagcccgcagaaaaatattcaccttatcaataattcgttacggagaacacgaccgatgcggactctgcagggctggttgttgccggtgtttatgttgcctatggcagtatatgcacaagaggcaacggtgaaagaggtgcatgacgcgccagcggtgcgtggcagtattatcgccaatatgctgcaggagcatgacaatccgttcacgctctatccttatgacaccaactacctcatttacacccaaaccagcgatctgaataaagaagcgattgccagttacgactgggcggaaaatgcgcgtaaggatgaagtaaagtttcagttgagcctggcatttccgctgtggcgtgggattttaggcccgaactcggtgttgggtgcgtcttatacgcaaaaatcctggtggcaactgtccaatagcgaagagtcttcaccgtttcgtgaaaccaactacgaaccgcaattgttcctcggttttgccaccgattaccgttttgcaggttggacgctgcgcgatgtggagatggggtataaccacgactctaacgggcgttccgacccgacctcccgcagctggaaccgcctttatactcgcctgatggcagaaaacggtaactggctggtagaagtgaagccgtggtatgtggtgggtaatactgacgataacccggatatcaccaaatatatgggttactaccagcttaaaatcggctatcacctcggtgatgcggtgctcagtgcgaaaggacagtacaactggaacaccggctacggcggcgcggagttaggcttaagttacccgatcaccaaacatgtgcgcctttatactcaggtttacagcggctatggcgaatcgctcatcgactataacttcaaccagacccgtgtcggtgtgggggttatgctaaacgatttgttttgatgaacggttgagtggttggcaaatctggaatccagcatccaggattaccctctcagagactaaaagcattgcagtttctcgcgcaggcgctgaaaatagcgcctgtttttatttcaggcaatcggggtgaatgtggcgcaggcggaagtgttgaatctggagtccggagctaaacaggttttacaagaaacctttggctaccaacagtttcgccccggccaggaagaaattatcgacactgtgctttccggccgcgattgcctcgtcgtcatgcccactggtggcggaaaatccctttgctatcaaatccctgccttattgctaaacggccttaccgtggttgtttcaccgctgatttcgttgatgaaagatcaggtggatcaactgcaagccaacggcgtggcggcggcgtgccttaactcgacgcaaacccgcgaacagcaacttgaagtgatgacaggctgccgcaccgggcaaattcgtctgctttatatcgccccggaacgcctgatgctggataactttcttgagcatctggcgcactggaatccggtgttattagccgttgatgaagcgcactgtatctcccaatggggccacgatttccgcccggaatatgccgcgctcggtcagttgcgccagcggttcccgacgctgccgtttatggcgctgaccgccacagccgacgacaccacgcgccaggatatcgtgcgcctgctggggctgaacgatccgctgattcaaatcagcagttttgaccgtccgaatattcgctacatgctgatggagaagttcaaaccgctcgatcagttgatgcgctacgtgcaggaacagcgcggtaagtcaggcattatctactgcaacagccgcgcgaaagtagaagacaccgctgcgcgcctgcaaagcaagggaattagcgcggcggcctatcatgccgggctggaaaataatgttcgcgccgatgtgcaggaaaaattccagcgcgatgacctgcaaattgtggtggcgacggtggcgttcggcatgggcatcaataaaccaaacgttcgcttcgtggtccactttgatattccgcgcaatatcgaatcctattatcaggaaaccggacgcgccgggcgtgatggcctgcccgcggaagcgatgctgttttacgatccggctgatatggcgtggctgcgccgttgtctggaagagaagccgcaggggcagttgcaggatatcgagcgccacaaactcaatgcgatgggcgcgtttgccgaagcgcaaacttgccgtcgtctggtattgctgaactattttggcgaagggcgtcaggagccgtgcgggaactgcgatatctgcctcgatccgccgaaacagtacgacggttcaaccgatgctcagattgccctttccaccattggtcgtgtgaatcagcggtttgggatgggttatgtggtggaagtgattcgtggtgctaataaccagcgtatccgcgactatggtcatgacaaactgaaagtctatggcatgggccgtgataaaagccatgaacattgggtgagcgtgatccgccagctgattcacctcggcctggtgacgcaaaatattgcccagcattctgccctacaactgacagaggccgcgcgcccggtgctgcgcggcgaatcctctttgcaacttgccgtgccgcgtatcgtggcgctcaaaccgaaagcgatgcagaaatcgttcggcggcaactatgatcgcaaactgttcgccaaattacgcaaactgcgtaaatcgatagccgatgaaagtaatgtcccgccgtacgtggtgtttaacgacgcaaccttgattgagatggctgaacagatgccgatcaccgccagcgaaatgctcagcgttaacggcgttgggatgcgcaagctggaacgctttggcaaaccgtttatggcgctgattcgtgcgcatgttgatggcgatgacgaagagtagtcagcagcataaaaaagtgccagtatgaagactccgtaaacgtttcccccgcgagtcaaatgtatgttgatgttatttctcaccgtcgccatggtgcacattgtggcgcttatgagccccggtcccgatttcttttttgtctctcagaccgctgtcagtcgttcccgtaaagaagcgatgatgggcgtgctgggcattacctgcggcgtaatggtttgggctgggattgcgctgcttggcctgcatttgattatcgaaaaaatggcctggctgcatacgctgattatggtgggcggtggcctgtatctctgctggatgggttaccagatgctacgcggtgcactgaaaaaagaggcggtttctgcacctgcgccacaggtcgagctggcgaaaagtgggcgcagtttcctgaaaggtttactgaccaatctcgctaatccgaaagcgattatctactttggctcggtgttctcattgtttgtcggtgataacgttggcactaccgcgcgctggggcatttttgcgctgatcattgtcgaaacgctggcgtggtttaccgtcgttgccagcctgtttgccctgccgcaaatgcgccgtggttatcaacgtctggcgaagtggattgatggttttgccggggcgttatttgccggatttggcattcatttgattatttcgcggtgatgccagacgcgtcttcagagtaagtcggataaggcgtttacgccgcatccgacattatttttcacgcatgcctcgccgatgctaacagcgctcccaccagcataaacaacgagccgaaaatcttattcagcgccttcatctgctttggtcctttaatccatagagcaatccgttgagcaagggtggcgtaaccgatcatcacaataatatcgaccacaatagtggtgacgccgagcacgatatactgcatcagttgcggctgttgcggcatgatgaattgcggaaatagcgccgccagaaacacaatacttttgggattggtgagattcacaaaaactgcgcgctggaacaaatgtcgacgcgattgagtagaggccagcgatttaaggtcaattgcaccagcggcgcgccactgctggattcccagccaaatcaagtaagccgcgcctgcccacttcaacacttcaaacgcaatcactgagcgggaaaatagcgtccccaaccccacgccaaccagcacaatatgaatcgccagtccggtctgaagcccagcaatagacgccaccgcgccgcgataaccgtggttgagcgaggtggtcatagtgttgattgcaccagagcctggcgacaggcttaaaatgatcgatgtcagcaggtaggcaaaccaccattctaaggtcatgatgaactcccggtgtgtctatttttgtgccacaatacgctactgtcgcagcgttgtgtcaggcacgctaaaaaaaacgattttacgtggtttaagaggcagattacccgatgtttcagcagcaaaaagactgggaaacaagagaaaacgcgtttgctgcttttaccatgggaccgctgactgatttctggcgtcagcgtgatgaagcagagtttactggtgtggatgacattccggtgcgctttgtccgttttcgcgcacagcaccatgaccgggtggtagtcatctgcccggggcgtattgagagctacgtaaaatatgcggaactggcctatgacctgttccatttggggtttgatgtcttaatcatcgaccatcgcgggcagggacgttccggtcgcctgttagccgatccgcatctcgggcatgttaatcgctttaatgattatgttgatgatctggcggcattctggcagcaggaggttcagcccggtccgtggcgtaaacgctatatactggcacattcgatgggcggtgcgatctccacattatttctgcaacgccatccaggtgtatgtgacgccattgcgctaactgcgccaatgtttgggatcgtgattcgtatgccgtcatttatggcacggcagatcctcaactgggccgaagcgcatccacgtttccgtgatggctatgcaataggcaccgggcgctggcgcgcgttgccgtttgctatcaacgtactgacccacagcagacagcgatatcgacgtaacttacgcttctatgctgatgacccaacgattcgcgtcggtgggccgacctaccattgggtacgcgaaagtattctggctggcgaacaggtgttagccggtgcgggtgatgacgccacgccaacgcttctcttgcaggctgaagaggaacgcgtggtggataaccgcatgcatgaccgtttttgtgaactccgcaccgccgcgggccatcctgtcgaaggaggacggccgttggtaattaaaggtgcttaccatgagatcctttttgaaaaggacgcaatgcgctcagtcgcgctccacgccatcgttgattttttcaacaggcataactcacccagcggaaaccgctctacagaggtttaaatttcttatgtaccaggttgttgcgtctgatttagatggcacgttactttctcccgaccatacgttatccccttacgccaaagaaactctgaagctgctcaccgcgcgcggcatcaactttgtgtttgcgaccggtcgtcaccacgttgatgtggggcaaattcgcgataatctggagattaagtcttacatgattacctccaatggtgcgcgcgttcacgatctggatggtaatctgatttttgctcataacctggatcgcgacattgccagcgatctgtttggcgtagtcaacgacaatccggacatcattactaacgtttatcgcgacgacgaatggtttatgaatcgccatcgcccggaagagatgcgcttttttaaagaagcggtgttccaatatgcgctgtatgagcctggattactggagccggaaggcgtcagcaaagtgttcttcacctgcgattcccatgaacaactgctgccgctggagcaggcgattaacgctcgttggggcgattgcgtcaacgtcagtttctctaccttaacctgtctggaagtgatggcgggcggcgtttcaaaaggccatgcgctggaagcggtggcgaagaaactgggctacagcctgaaggattgtattgcgtttggtgacgggatgaacgacgccgaaatgctgtcgatggcggggaaaggctgcattatgggcagtgcgcaccagcgtctgaaagaccttcatcccgagctggaagtgattggtactaatgccgacgacgcggtgccgcattatctgcgtaaactctatttatcgtaatcgttctttatttggtcagttgtcaacctgatacttcgctacaatggatacccgttaatcaaagagttttccattgtggcgctacttatcatcaccacgattctgtgggccttctcctttagcttttatggcgagtaccttgcggggcacgtcgatagctattttgcggtgctggtgcgcgttggcctggcggcactcgtttttctgccgtttctgcgtacccgtggcaatagcctgaaaacggtcggcctgtatatgctggtgggcgcgatgcagcttggcgtgatgtatatgctgagtttccgcgcttatctctacctgacggtttccgagctgctgctgttcaccgtgctgacgccgctctacatcacgctgatttatgacatcatgagtaagcgccgtctgcgctggggctatgcctttagcgccttgctggcggtgattggtgccgggattattcgctatgatcaggtcaccgaccatttctggactggcttgctgctggtgcaactctccaatatcacttttgccattggcatggtgggttacaaacgcctgatggaaactcgcccgatgccacagcataacgcctttgcgtggttctatcttggcgcgtttctggtggcagtgattgcatggttcttgctgggaaatgcgcagaaaatgccgcaaaccacgctgcaatggggcattctggtgtttcttggcgtggtggcttccgggattggctactttatgtggaactacggcgcgacgcaggtggacgccggaacgctgggcattatgaataatatgcacgttccggcagggctgctggtaaacctggctatctggcaccaacagccgcactggccaacgtttattacaggcgcgctggtgatcctggcctcactgtgggtgcatcgtaagtgggtcgctccgcgctcttcacaaacggcagatgatcgcaggcgtgattgcgcgctgagcgaataaacgcttccgtaactggctgacgctgctcgccatcgcgcacggcggcgtacagtcggctccacaagccttcgcccagggttttggtcaccaccagaccctggcgctcaaaactctctactacccaatgcggtagcgcggcaatacccatccgcgcggcaaccatctgaatcaacaataaggtgttatcgacgcttttcagtgacgggctgacgcctgccggctgaagaaaatgccgccagacatccagtcgactacgctgcaccggataaattaatagcgtctcgctggcgagatcttccggtgtaattcgcgttttcgccgccagtggatggtcaggtgctaacaccagacgcacttcatagtcgaacatcggcgaataatgcaggccactgcgcggcagaatatcggacgtcattaccagatccagctctccctgttgcaaggcgggctgcgggtcaaatgtcacgcccgatttaaaatccatctctacctgcggccagttcttatggaaattttctaacgcgggtgtcagccactgaatacagctatggcactcaatggcaatgcgcagacgcgtctgttgcggttcattgcaggcttgcagggcctggctaatttgcggcagtacctggtttgccagttgcaacaggatttctccctgcggtgtaaagcgtagcggctggctcttacgcacaaatagccggaagccaaggcgttgttccagatcgctaaactggtgagacagggcggattgcgtctgatgcaacgtcgccgcagcggctgcgagcgagccgcagttccgcaacgcttgtagcgttttcaggtgttttacttcgatcatgaaagtccttcacttcggcatgaataatttgcgcttgaggaatatacagtaaccgccaattatggatgtgtaaacatctggacggctaaaatccttcgtcttttaaatttatggtgcgttggctgcgtttctccaccccggtcacttacttcagtaagctcccggggatgaataaacttgccgccttccctaaattcaaaatccataggatttacatataattagaggaagaaaaaatgacaatattgaatcacaccctcggtttccctcgcgttggcctgcgtcgcgagctgaaaaaagcgcaagaaagttattgggcggggaactccacgcgtgaagaactgctggcggtagggcgtgaattgcgtgctcgtcactgggatcaacaaaagcaagcgggtatcgacctgctgccggtgggcgattttgcctggtacgatcatgtactgaccaccagtctgctgctgggtaacgttccggcgcgtcatcagaacaaagatggttcggtagatatcgacaccctgttccgtattggtcgtggacgtgcgccgactggcgaacctgcggcggcagcggaaatgaccaaatggtttaacaccaactatcactacatggtgccggagttcgttaaaggccaacagttcaaactgacctggacgcagctgctggacgaagtggacgaggcgctggcgctgggccacaaggtgaaacctgtgctgctggggccggttacctggctgtggctggggaaagtgaaaggtgaacaatttgaccgcctgagcctgctgaacgacattctgccggtttatcagcaagtgctggcagaactggcgaaacgcggcatcgagtgggtacagattgatgaacccgcgctggtactggaactaccacaggcgtggctggacgcatacaaacccgcttacgacgcgctccagggacaggtgaaactgctgctgaccacctattttgaaggcgtaacgccaaatctcgacacgattactgcgctgcctgttcagggtctgcatgttgacctcgtacatggtaaagatgacgttgctgaactgcacaagcgcctgccttctgactggttgctgtctgcgggtctgatcaatggtcgtaacgtctggcgcgccgatcttaccgagaaatatgcgcaaattaaggacattgtcggcaaacgtgatttgtgggtggcatcttcctgctcgttgctgcacagccccatcgacctgagcgtggaaacgcgtcttgatgcagaagtgaaaagctggtttgccttcgccctacaaaaatgccatgaactggcactgctgcgcgatgcgctgaacagtggtgacacggcagctctggcagagtggagcgccccgattcaggcacgtcgtcactctacccgcgtacataatccggcggtagaaaagcgtctggcggcgatcaccgcccaggacagccagcgtgcgaatgtctatgaagtgcgtgctgaagcccagcgtgcgcgttttaaactgccagcgtggccgaccaccacgattggttccttcccgcaaaccacggaaattcgtaccctgcgtctggatttcaaaaagggcaatctcgacgccaacaactaccgcacgggcattgcggaacatatcaagcaggccattgttgagcaggaacgtttgggactggatgtgctggtacatggcgaggccgagcgtaatgacatggtggaatactttggcgagcacctcgacggatttgtctttacgcaaaacggttgggtacagagctacggttcccgctgcgtgaagccaccgattgtcattggtgacattagccgcccggcaccgattaccgtggagtgggcgaagtatgcgcaatcgctgaccgacaaaccggtgaaagggatgctgacggggccggtgaccatactctgctggtcgttcccgcgtgaagatgtcagccgtgaaaccatcgccaaacagattgcgctggcgctgcgtgatgaagtggccgatctggaagccgctggaattggcatcatccagattgacgaaccggcgctgcgcgaaggtttaccgctgcgtcgtagcgactgggatgcgtatctccagtggggcgtagaggccttccgtatcaacgccgccgtggcgaaagatgacacacaaatccacactcacatgtgttattgcgagttcaacgacatcatggattcgattgcggcgctggacgcagacgtcatcaccatcgaaacctcgcgttccgacatggagttgctggagtcgtttgaagagtttgattatccaaatgaaatcggtcctggcgtctatgacattcactcgccaaacgtaccgagcgtggaatggattgaagccttgctgaagaaagcggcaaaacgcattccggcagagcgtctgtgggtcaacccggactgtggcctgaaaacgcgcggctggccagaaacccgcgcggcactggcgaacatggtgcaggcggcgcagaatttgcgtcggggatgatgagtattaacgagtcattgtaaattgcagcacaataatggcttccaacaccggaagccattttgctatgtatgccaggtatgatgtggatcttcaggaacagaaaattaattgcggatttcttaaatattctatgcaccactgacaggctttgcccataccatcggaacgagcggcaagaaataacttggtggcgtgtttatgttcgcgcattggctttttaagcaatttaccgctgttcaataacggcaatgccagatgatgtggaatataaccaataccgacgttttgttctattaaggcgattgccgtagcgaagtcaggaacaaaaatgggtttttgtccttccaacaaccaggcttgcatcggggggaagttaacggaggtatcgcggatacaaaccgctggataatgacgcaattcactgttttctaatggatgccgcttcgctgccagtgggtggagtgggctgacgacaaaatcccattccatttgtccgaccggttcgctaatgatgccttcactgcttggcactgcatgaggagcaccgtagaccagatcggcacgcttactgtacagtgcatcccagcagccgttgtatacctcaagatctaccgtcagtgttgttgatgtgaattgccgttcaaaatctcgaataaatgccaccagcaaatcaccaggaataatattgtttaccgcaattgtcagttcacgctcaataccatcgtgaatcagcactgtgttgcgctttaatgcttccaggtcgccaagaatagttttgctatgttcgatgaagtaacttcccgctggcgataattcaatatagcgtcccttacgaatgaacagttcaacgcccaggctctcttccgctttcttgatggtgtaactgatggcggaagggactttatttaactgctcggctgcggtggtaatgctctggtgtctggcgaccagatgaataacacgaagcgtttcgtctgagatgaacataaggctccctggtcagtggtaaagtggctgaatctctccagattcagccgtaatcattgcctgagtatacccaggaattagcggtgttgacttgcccgactgagaatcgcatacgcgatacatgccaccagaatcgagtctaccgaagggatcgtcgtcagggtgaataagccttttacggtcataaagccaaccgctgcgcctatgatccatgctgcgaatgtcagcactttaatctgtgactcctgggctaacactgactcttgatagccattacggcgataaaggaaaaagtcagcgatataaattccggcaacgggtggcgtggcgatacccaggaacagcagaaacggaataaaccacgccataatatccatactgcctacgatggcggaaaggatacccagcgccacggtaatctgccatttgggaaagcgggtaagcagtgtggaaaccaccagcgtgccctggaacatattgcccgcgttaccggtgacgcaggcgaaaatcaacaacagcgccgcaggcagaaccgcaccgaataccgccatcgcacccagtaaagatccctgaccactaatggcgctcggcgttgcacccgcccagtagagcagagggtaggcaaccagaaacgtcacgcctgcggcaatcagcgcatgtttgcggttatgcacaaaactaccgaaatcaggcagtgtggcaaccagcacaataatggtgccaacaacggtggaaacggcgacacctgtattcatctccacaatcgccgctggtactgccacttcggtatgggttgccacatagaggatgtaacacagcaccagcgcgataaccggcacggcaacctgggcaatttttcccagaacggtaaagccaaatgccgtagaggcgacaaaaatgacacagccagccgccactaacagtgccagtggaacttccagtccatgttgagccagtaagtcatgtaccgaatgaccaaacatattggcggtaacggcaatccagccgaacagacttatcgccatcaaaatgttaatggcgatggcccctttttcgccaaacgaatatttcacaatgccatacgttggcaggcgggctttttctcccacgctaatggtgatggctgaaagtaaggtcagaatgacgccgcctaacaatacgacgctaattaaactgctgctggaaagttgattgccgaggcttgaagatgacaacagcacaggtgtgacggcaatacccagcaaaatcatggcaatacgcaatcctgatgccgtattcagattctcttcttttttacgcatagtatgttccctttataaatgcgcgttacacagtatgaaaatgcccggtgtatttgcgccagctacccagttctgtaatttcccgttggccttcggtcagccagttttctgccagtacgcccagcacttcgctaccatcggcaagtttgattttgccaattgccagcccagcgggttcgctcattaacagagcggcaaaactggccagcggtaattgccaaatttctacgtcgacgtgtgttcctccttcattcacgcgaatcattcccggatggcgatcattaatactccacaaccggtaatgggcgtcagttcggtcttcacggacaaaaataccgcccgctttttgcatatttgggttgagttccaggccgcgcatcagcgttccgttaacggctaaaagcgttgtagtcattgtgttctccagagaattaaagggttatccatgtaccgctctgatgcgccagggctgcttttatggtttgcggtgaagtaatcaggccgctggcctgtttgccttgttgctggctggcattgatgaaatcaacaatggcttccactttgggttgcatactgccgacaccaaactgaccttcccgcaacagcgtttgcgcttcggcaacgctgatagcgtcgagccactgttgttgtggtgtaccaaagttaatcgctactttttctacaccggtggggatcaccagcagatctgcgcctaactgactggcgagcagcgcggaggccagatctttatcgatcacggcttccacacctttcagttgttgcccgtctcgcaccaccggaataccgccgccgccgcaggcaataaccagatatccctggcgcaccaggtgagcgatggtgtcgtgctcaataatttccagtggtgcaggagagggaactgtacgccgccaaccacgcccggcgtcctccatcagcgtccagccgagttgttgttggcgttgttgggctgttgcttcatcgagaaacgcgccaattggtttactggggctggcgaaagcatcgtcatgtgggctgactcgcgtttgtgtcaccagggcaattaccggtttgtttatgccacggcgagccaattcgttatgcagcgctttctggaacatgtagccaattgcaccttgtgtatcacccacggcgtaatcaagtggaaccggagaaacttcgttactggcgagttcagagcggcgcagaataaagcccacctgcgggccattaccgtgggttagtaccaggtcccatccggcttcaaccatatcaacgatatgttgcacgcttttcatcactgcaacatattgatcgggaatactattgcgttgctcgtcctgaatgagcgcattgccgccaaccgcgacgacagccagtggcttaaccatgatggttctcctttgcgacgatctccgccagtgcacgtacagcggcgacaaaacaggccatcggcgcagtggtgatcccggcaccaatttgcccgacccccgcttgtttgtgggcgatacccgtattgatgaccggtaaaatgccgcgatcggtcactttacgcgcatcaatccctgctgcggtgggggcaaaattgagggcaggaagtgtaaatgcggggttaccaccgagggtgattgcttgcatcctacggctgttattggtggcatcggcaggggtgcctcccacaaatttgacgatcgctggagatgacgccatcgcgaagccacccacacctgcggtttcagtaattgcgctatcacccaggtcagcagcggcatcgtcgacgccaaatccggggaagaacagaccttcaacggcattggcaggagcctggaaccagcgatcgccagtaccggaaagccgaataccaaaattcaccccgttacgcgccatcaccgtaaccattgaactgaacggtacattggcggcggcatccatcattgctttacaggcggccatcgaaagattgaggaagaagtgatcgttaccggtgataaatgccacgacgcgctggatatgttcctgtggaagagagcaggccagcaatgccgggagcaggcgcttaatcagcaaaccggtagcggcagcattgcggttatgaacttcatcccccatatgcagcgcctgcgccattaatggcttgagttccagctcgccgtgttgtgcgattgctgctttcattgccggcgccagttcatcgcgcatccaggccagacgattgagaacttcatcgttattggcgccaaaacggagaaccttacccagaccttcattgaaattgctaaaagtacgatggccgttggttttgttttctaccacccataacggcatcgacgggctgatgatgcctgccattgggccaaccgcgtgataatgatgacaaggggcaaggtcgatttcgcctgcgtttatttggttttcagcgtcttgctggctggtggcccaaccttcgtacagcatggcaccaataatcgccccttttaccggaccacacatctcttcccaggcaatcggcgggccagagtgcaaaatacgtttttgttcagccattgctggaatggcctctttagcgagcatgacatccatcagcacgggctgtgcttcgagataacgtgtcatggcgatttggttggcattttctaccaggggatgacgtagcaacgatgccagatccaatccagcgtcaatatcgccttgtgctggtggctgccaattgagtgcaattgcgcttcccccggcgtgttgaatattgtcagcaaaactgtgtagtcccgcgttcacgaccttcaaaggctgattaaataaggtattcatgcgtttagcccctttttctgcaactgagtctgcgcaacggcgctggcccatagcgccgcctgtgcattgctgctggcaatgatgatgcccgcattttgtagtgcgcttatctgctgactgcgtatttgcggatcagcttccgttccgcaaacgtgcgcaatcagcaacggcgcgttattcatgtcgatgtgtgaaagttggtccagtaattcgctggcaggcgtagtggaagcgccataaccaagtaccaggtcgaataacacgacggcagtgtgtgagtcgttgagttcgttgagcagacgttgattgcgcagagtcgggtcgatcattggatgcggtttgccacgggtgaaatcatcgtcgcccatatcgatcaacgtgtgatcttcgctttgccagatatttgccagagcacgattacccgcaactggcgtattggaggctgcgctgaatcccttttgttggcagataagttgcgcttcgtagcagaaggttcctccggcgaaaacaccgcgtatcgcctggcgatgggctggcaggcgctggcaggcgttttgtaacattgtgagatcgtcgcaggaaatttcggtctcgatagtcggaagtggttgatcattcagtaacgccacggcgatatttgcggcgctggcaagtgtggtggccgcggtgatattgggacgtgccagatcatgcggattcgcaccgaggaaattcaccaccacgggttttccacaagcctcggcacgctccagaatagtccgggcaacgatcggtgaaggcggttttgaaatcagcacaattacgcgagtttcatcgtcttgcgccagcgcatctaaagcgaagagcatcgatattccaccaatctcttcactgagatcatgtccgcctgttcccaacgcctgagaaatacccgctccgagctggtcgattcggcaagtcacttcctgtagcccggtgcctgacgcgccaataacaccaattgctccgcgtttcaccacattagcgaagcctaacggaatgccgttaacaatggcggttccacagtcaggtcccattacgatgcgctgacgttctcgggcaagcgttttgatggatttttcctgcacgatactgacgttatcgctgaacatcatcacgttcattccgaggtttaacgctttaattgcttcggcggcggcgtagtctcccggtacagaaatgagtgccaggttggcttcgggttcggcttccagtgccatttccaggctgaccttttccggtgatttaatgccactatccgtttcatcatcgggtttgctggtcagacgttgctgggccagtaccagtgcttcattgcaaatatcttcttcacccatgactgcaatcactaaatcattgggactggcgttgatttcgttacccagacccgcatcgcgcaattgttcgagattattgggcgttcccatgacgaccgaggcctgttgaataccgggcaacttgctgatttgcgcggaaatctgcatcagagaaactgagtcctgataaagattactgaaaactttatatttaactttcatgctgttacgcctgtttcattccgcccgatagcaaaattcgggcaaagcatccccgtgtagccccataaacgggctacgggagaaaaggttgaaatcaattcatggtgttcagggttcgaaagccatgcagcattcctgcaaggcaatctactcctgacgttgcgccaaattgcatgacctgttctgcacaggatgcgattgtcattgccgatgcgctcccaaccagttgtgcgagtaactggcaaatcggttctgaaaaatgtccctgaagcgcacgctccagataatgacgactgatatccgtggtgttgtgcgcatgttgatcaattgcctgctgcaaccggtattgatgatcggcaagtggtgcagggagttgccataaccagagcgctgccagatagcccaacaaatagtcatctccatcgggcgttaagcctttaccaaagccgatcagttgtggcacctggcgttccagcgcatctggatgctccataaccgctaatccctggtgcgtgagactatccggcaggtgcaatgtgctttgaacgttatgttccagacaaaataaaagccgttgcgatgccatcgttgggtagtgctggaaaaccaaagggaatgcctcaagtgtcagcattccccccacaaatggcgactgccagagcgttgcgttatcgagcgccacacaaaatcgaggtgtccgcagtaagcctggggttaactgaatgggatctgaatgggcaatctctcttcgccagtcccaacattcaggtagccagactctggcagcatcagggagattcagatacgtttgcgcacacaacagagtgatgaatgttcccgcgtctgaatacagatttaccgcatgtttaaaagcgctatgcagacgtaaatcttgcgtttcattctgcgggaaaagatatcccaacgacgatgcgcaaagcgtaacctgtaccatcggcgttagccttccagacctgcaataatggctttggaatcagtaacccaaccgaaaatggcaccttgtgcttgatcatctcgagggcgtatttctggaattccgggaaataggagccgacacaatcttccgggataatgcattcatagccacgatcatttgcttcgcgcacggtggtggttacgcaaacttcggttgtaacaccacaaactatcagcgtcttgataccgtggttttgcaaaatcagatgtaagtcggtttgataaaacgcgcctttgccaggcttatcaatcaccggttcgcctgccaccgggtacagttcaggaatgatgtcatgacctgcttcacctctgaccagaatgcgtcccatcggtcctggttcaccaataaaggtttttccgccgcgcgtcagtttggctggcgggcagtcgcttaagtctgcacgatggccttcacgagtatgaataaccataattcctttttgacgtgcggctgccagcacctctgtacatggtgcgatagccgtgcgtaccagtgaaacatcattgcccagtgcctcaccgaagccccctgcttcgacaaagtcacgctgcatgtcgatcatgaccagtgcagttgtgcgcggatcaaaaggtaattcaaagggttgagcctgaaaaatggattgcgtcatggtaaatctcctgtctgatgtttaaacgatccagttgttctgagaacgagtattcaggagaaaagcggcacaaaacaggaaaaaagtttgccgcacagcaacgaaatttttgcattcagcaggtggtgtgatgacgaatgtgaagggagtcaaagagtggcatacagcaacaaattttttgatgctgtatggttttgagattaaaaaaatcgttgaaattgtgtgagcttaatcatcagatttagcgactatggcgttactttttaacaccatactgtgtaaaccattccaacattcgctgccagccgtctttcgcagactcggcatgatagctcgggcgataatcggcgttgaatgcatgcccggcatccgggtagacgataatctctgctttcgcgtttgctgcccgcagcgcctggcgcatcgtttccacgctctcttgcggaatgctgttatcctggccgccatataagccgagaaccggcgcgttaagatcggttgcgatatcaacaggttgtttcggtgaattcagcgacttatcgcctgtcagcttgccgtaccacgccactgcggcttttagctgtggattatgcgcggcatacagccaggtgatacgtccaccccagcagaatccggtgatcattaaacgatgaacatcgccgccgttgcgtgacgcccaactggcgacatgatcgagatcggccagcacctgcgagtcaggcacttttgctaccagaccgctaagcagcgtagggatatcggcaaaatcattcggatcgccttcgcggaagtaaagttcaggtgcgatagccagatacccctccagcgccagacggcgacaaatatcgcggatatgttcatgcacgccaaaaatttcctgcactacaatgaccactggcagtgggccatcgctttgctttggtctggcatggtaagcaggcatgttatccccttgtgaagggatagaggtgaagcccgccacaatcgcgtcgtccggagtctgaacgatggtcgaagcgagaggcgatgcagcaggtgcaaatccagattgttgtgttgttgccatggtattctccgtacccttataaaaatgttgcgcaatgttaactatagtcagcatgcaacaaatcacattgcctgaatcggctcatcttttatgcagtcctgcagaatgaagagtgatttatgtgatttgcatcacttttggcgggtaaatttatgcaacgcattttcgtcatggtgatgagtatcaagaaaaaatgttaaacccttcggtaaagtgtctttttgcttcttctgactaaaccgattcacagaggagttgtatatgtccaagtctgatgtttttcatctcggcctcactaaaaacgatttacaaggggctacgcttgccatcgtccctggcgacccggatcgtgtggaaaagatcgccgcgctgatggataagccggttaagctggcatctcaccgcgaattcaccacctggcgtgcagagctggatggtaaacctgttatcgtctgctctaccggtatcggcggcccgtctacctctattgctgttgaagagctggcacagctgggcattcgcaccttcctgcgtatcggcacaacgggcgctattcagccgcatattaatgtgggtgatgtcctggttaccacggcgtctgttcgtctggatggtgcgagcctgcacttcgcaccgctggaattcccggctgtcgctgatttcgaatgtacgactgcgctggttgaagctgcgaaatccattggcgcgacgactcacgttggcgtgacagcttcttctgataccttctaccctggtcaggaacgttacgatacttactctggtcgcgtagtccgtcactttaaaggttctatggaagagtggcaggcgatgggcgtaatgaactatgaaatggaatctgcaaccctgctgaccatgtgtgcaagtcagggcctgcgtgccggtatggtagcgggggttatcgttaaccgcacccagcaagagatcccgaatgctgagacgatgaaacaaaccgaaagccatgcggtgaaaatcgtggtggaagcggcgcgtcgtctgctgaaataaaaaacgctccccaacttcggggagcgatatcagttattgacgccgtaaacgcattattttgcggattattggcgtcagtagcgtaaaggttgccagagtcagcaatgccagagtgatcggtcgggtatacagaaagtcgagtgacccaccagaaagcgacagcgcacggcgaaaattactttccgccattggccccataatcaatgccagtactacgggtgatgccggatatcctcctttctgcatgaaatagcccaccacgcctgcaatcagcataatgccaacatcaaaaaggctattgttcaacgcataagtcccgaccacacaaagtgcgaggatcatcggtgtgagaatattgccgggaattttcaccacattaccgatgactttcaaagagagcagtccaagaactagtagcatgaagtaacagaagatcatgccgacaaacagtgtataaaccatatcgccgtggtcggtaaacatcagcgggcctggttgcattccctgtaacgttaacgcgcccagcatgatggcggttaccgcatcgccagggatccccagcgtcagcataggtaacaatgcgccaccggtgcagccattcgcgcctgcctcacaggaggccacagctttaatttcacccttaccaaagttttctggtgtcttactgaaacgacgagtttcgttataggcaacaaaagctgcaatatccgcccccgcaccggggatcatgccgataaaaacccctaatcctgatgagcgcaaaatggttaatgcaatgcggcgtagtgtttgccagggcagtaacagactgccgatagccaccttcgccccctgacgaatttgctggttttgctccatagagcggaatgcttctgaagcagcaaataaaccaatcatcaccgggataaatggcacattcatcagctccacaaatccacctgtaaaccgtggaaaaccgcccattggatcaaggcctatcgttgcgatcagcaatccgccaaccccggcaatcagccctttaatcagcgactcaccggaaatactggcaataatgctcagtccgaaggttgccagggcgaaggactccgaggcactaaatttcagcgcccaactggcaagtaccggagagagaaacatcagcacgataatgctgagcgttccgccactaaaggaagagaacgtggcggcactcaatgccagccctgcttttccctgtttcgtcagctcataaccatcaatagcggtggctgcggcggcaggcgttccgggaattttgagcaaaattgcggtgatagaaccaccgtagacgccaccaaaaaagacgccgcaaatcatcaacaagccagaaacaggctccatgccgtaggtgaaaggcagcaaaatcgccacacccatggtcgctgtcagaccaggcaaagcgccaatcacaatacccagcatcaccccaaaagtggcaaacagcagcgcctgaggattattgagtaatgtcgaaaaaccctgagttaaaagttcactttcaaacattgctggcccctgttattcgaaaaatgtgccgacaggcaatggcacctgtaacgcttcgacaaacagcaaccagaggattgccgttaacagcagcgcaatacccggtgtgagtacccatcgcctgtagcccatcaacgtcataatgacgatgaggaaaacaggagtagtaatgagataaccgcagtagctcatcgccacaatataaaatgcggttgccgcaattcctgttgccgttttcctgaatgccggtttttcctgtgcgttggcgcaagaggctggttttgcctgcaaaagatcgcgtatcaccagcaagacagcgagcacaatcagggcacaggcatagaaggtagggaaggcacttgcaccgggatccgtttcaatggaagttgctggaaaatcagcggcattaatcatcaccgcgccagcaaccacacaaagtaacagcgccaccaccatcgttgatgaaaggcgcttgcggtgcggtacggcgagttgagcaacagactgttttgtgttcatcaaccgtacctcaggtttattttttcaggcccaggcgagtcagcaactcgtcaaagtacttttcctgttcgctgatttgggtctggaagctggcagcgtcaagccatgcatagttgagattcaacttttgcagtgcatcctggaatgcaggctcttcagccgtctcttttgctgcctttgccagaacatccaccacatcctgcggcgttttttgcgacacaatcaggccgcgccaggtgccgatggagagatcaacgcctttctcttttaacgtcgggacgtcaggcatggtttccattcgctcatccgccatcactaccagtgtcttcagcttgccgcctttcacatgattgataacttcacctgggcttacggaaaccgcttcaatatgcccgcctaacaggcctgtaatggcaggggctgcgccgtcatacgggacatgagaaaacttcgcacccgttttgtcttccagtgcagctgccgccagatgccagatagctccggtgcctgagttaccaatgcgtacttttccgggattcgctttggcgtaagtcataaattcttcatagctattccacggcgcatcagaacggacggtgatagcagccggatccgcgtttagacgggcaatgggtttaaaatcgctggttttaaaacgcaccattccgaggctgggaagggtggtcagttcaaccgtgcctaaaccaattttgtaaccgccagggcgggcagcggcgatttcactcaggccgatagcaccgcctccgccaggtttattgataaccccgatgctgacgggtaaatggtttttggcggcatcagcaaaggcacgggcaaccagatccgtaccgcctccggcagcgtagggaacgactaactcgatctgtttggttgggtaggaggctgcctgtacaggcgcaatgctgagggcagcgcctgcaagaagtaccattgcagccatttttttcggtaaggtaagatgttttatcattgcttttatatccttatttatcagttagttgctatttaaattgttccatgcgttcataaacagtactgcattttcatagacttgctctggcgtcatgccggggtgatatagcgcagaaccgaggccaaagccgtttgcgccgtggctcagataacgcgccatggtttccggtgtgataccgccaaccggtaacatcggaacggattgtggaataaccgcacgccaggctttggtaacttctggcgtaatttgttcagccgggaacagcttgatggcattagcaccatgttcaatggcagcaaaggcttcggtgggcgtggcgacgccaggcgcacaatacatacccagcgcacgggcgcgacggatcaccgcagtatcgcaatgcggcatcacgataatctggcccccagcctctttaaccgcaaccacctgctctaccgaaagcacagttccggctccgaccaggcagtccttaggcagggcgtcgcgcagtaaactgatactttgcaacgcctccggcgagttcataggaatctcaatcaggcggaatccggcggcgtacagtttttcaccgatggcgacaatctcatccggtttcacaccgcgtaaaatggcgactaaaccggttttttgcaaaagcgtattaaatggcatgggtacattccctggcgttggtggacagtaacccggcagcgtgggcgattcgccataatccctgttcagtggcattgggaatggcgtgtatctgtctgtcgggaaaaacgtggttgaatgcttgtgaatagcggctgttcagatttgcgctaccgattaaggcgatcggtgttgtggcgggtaaatcacgtagcaaactggatgccagaccacataattcatggcctatcagtaatccggaaaggtaatccccctgcgaggacgacgtaagattactggtcagcaggcgcgaacgggtcgaaaacagcgtcgataataatccggtctgatgatgctcttgtgctgctgtcagcccgtgggtgaaggcatcccagtgcggttcatctccaggatgcatggtggcaccgagaatcgaatggcgggataaaacatcaaataactcgcccgtcataaaggttcggaaatcggtaatggtgttgttttcaactactgcccatttcgcatgtgtgccgggtaagcctatcagcactggcataccctgatggatcgcgttttgcagggccggttccatcgagatagcaccgaagatttgtgtctcttcgccacgcatcacttcgggcatttcaccttctttaatcacgccaggaatgatgtgcagcattgtctgctgctggtggataacaggcgtcaactgcttcgccagaccctcgagagtgaccgggcaaggtaaataagctgctggttgccacccttgcgcactgccgagcatgccgcaagccagtaccgggcatggggtttgtgccagccagtcgccgcagacacgtaaaaacgtatcgtggaaagcgtcctcacgtgttgctgcctgggagggtaatttcatgatcccccaggggaattcacgtttttcttgtggatttggtgattcgccaaaacgccatgcccgaagcgatgacgttccccagtccagggcaataaatgagggtgctcccggcattagtcgtttcctttaatcatggtttatttatctttgcggacgtgcttaccccagcccagttcagcggatatctcttctgcacaggatttgacgtaaggtgccagttcttccagacgcgccagcgacatatacgtggtggtactggcgacagaaatagccgccacaatttcatcccgggcgttgtaaaccggcgctgcaacgcaacggatagtcggctcgttctcttccagatcaaaagcaaaaccactggcggcataacgacgcatgttctgaataaatgcgcccagttttgtttcatcaccacaggtcttaaacagcgtgcgccactcttcttctgttcggttgaggatcaatgccttgccgatgccggtgattgccagtggcatgcgatggcctgggcgtgagcgcatttccagcccgcgctgactgttgatcttctccagatacagcacttcgtcgccttcaacgatccccagatgcacggtgtccagggtgtaacgggcaaggcgttgcaaaacgggctgggcaatttcgtacagcgaggtgctttccagtgctctggcaccgaattcgatcagtttggcacccagttggtagccctgcgttgggacatggcgcaggtagcgttgttccaccagaacggtgactaaacgatgggttgtgctccgggtcgtgccggtgaactcgccgatactttttaggtcatggcagccgttataaacagcattaagaaccgccagtccacgtaataacgtttgtgcgcctgcggtggttgaagaggtttctgccatacgtttctcctgatgatattgctgaagtgttccacataatgacgtggggaaaaggtgatatatcccacaatataaactccatctcatattgtgggataaaataatgaaaattaacgatcgttttgcgtagcgcctcgcaggaaacttctttcaaactggacgtttgtacagcacaattctattttgtgcgggtaagttgttgcgtcaggaggcgttgtggatttctcaatcatggtttacgcagttattgcattggtgggtgtggcaattggctggctgtttgccagttatcaacatgcacagcaaaaagccgagcaattcgctgaacgtgaagagatggtcgcggagttaagcgcggcaaaacaacaaattacccaaagcgagcactggcgcgctgagtgcgagttactcaataacgaagtgcgcagcctgcaaagtattaacacctcgctggaggccgatctgcgtgaagtaaccacgcggatggaagccgcacagcaacatgctgacgataaaattcgccagatgattaacagcgagcagcgcctcagtgagcagtttgaaaacctcgccaaccgtatttttgagcacagcaatcgccgggttgatgagcaaaaccgtcagagtctgaacagcctgttgtcgccgctacgtgaacaactggacggtttccgccgtcaggttcaggacagctttggtaaagaagcacaagaacgccataccctgacccacgaaattcgcaacctccagcagctcaacgcgcaaatggcccaggaagcgatcaacctgacgcgcgcgctgaaaggcgacaataaaacccagggcaactggggcgaggtagtattgacgcgggtgctggaggcttccggtctgcgtgaagggtatgaatatgaaacccaggtcagcatcgaaaatgacgcccgctcgcggatgcagccggatgtcatcgtgcggttgccgcagggaaaagatgtggtgatcgacgccaaaatgacgctggtcgcctatgaacgctatttcaacgccgaagatgactacacccgcgaaagcgcgctacaggaacatatcgcgtcggtgcgtaaccatatccgtttgctgggacgcaaagattatcaacagctgccggggctgcgaaccctggattacgtgctgatgtttattcccgttgaacccgcttttttactggcgcttgaccgccagccggagctgatcaccgaagcgttgaaaaacaatatcatgctggttagcccgactacgctgctggtggcgttgcgcactatcgccaacctgtggcgttatgagcatcaaagccgcaacgcccagcaaatcgccgatcgtgccagcaagctgtacgacaagatgcgtttgttcatcgatgacatgtccgcgattggtcaaagtctcgacaaagcgcaggataactaccgccaggcaatgaaaaaactctcttcaggtcgcggaaatgtgctggcgcaggcagaagcgtttcgcggtttaggggtagaaattaaacgcgagattaatccggatttggctgaacaggcggtgagccaggatgaagagtatcgactgcggtcggttccggagcagccgaatgatgaagcttatcaacgcgatgatgaatataatcagcagtcgcgctagcccattgggggtagttaagccgggtagaaatctagggcatcgacgcccaatctgttacacttctggaacaattttttgatgagcaggcattgagatggtggataagtcacaagaaacgacgcactttggttttcagaccgtcgcgaaggaacaaaaagcggatatggtcgcccacgttttccattccgtggcatcaaaatacgatgtcatgaatgatttgatgtcattcggtattcatcgtttgtggaagcgattcacgattgattgcagcggcgtacgccgtgggcagaccgtgctggatctggctggtggcaccggcgacctgacagcgaaattctctcgcctggtcggagaaactggcaaagtggtccttgctgatatcaatgaatccatgctcaaaatgggccgcgagaagctgcgtaatatcggtgtgattggcaacgttgagtatgttcaagcgaacgctgaggcgctgccgttcccggataacacctttgattgcatcaccatttcgtttggtctgcgtaacgtcaccgacaaagataaagcactgcgttcaatgtatcgcgtgctgaaacccggcggccgcctgctggtgcttgagttctcgaagccaattatcgagccgctgagcaaagcctatgatgcatactccttccatgtgctgccgcgtattggctcactggtcgcgaacgacgccgacagctaccgttatctggcagaatccatccgtatgcatcccgatcaggataccctgaaagccatgatgcaggatgccggattcgaaagtgtcgactactacaatctgacggcaggggttgtggcgttgcatcgtggttataagttctgacaggagaccggaaatgccttttaaacctttagtgacggcaggaattgaaagtctgctcaacaccttcctgtatcgctcacccgcgctgaaaacggcccgctcgcgtctgttgggcaaagtgctgcgcgtggaggtaaaaggcttttcgacgtcattgattctggtgttcagcgaacgccaggttgatgtactgggcgaatgggcaggcgatgctgactgcaccgttatcgcctatgccagtgtgttgccgaaacttcgcgatcgccagcagcttgccgcactgattcgcagtggtgagctggaagtgcagggcgatattcaggtggtgcaaaacttcgttgcgctggcagatctggcagagttcgaccctgcggaactgctggccccttataccggtgatatcgccgctgaaggaatcagcaaagccatgcgcggaggcgcaaagttcctgcatcacggcattaagcgccagcaacgttatgtggcggaagccattactgaagagtggcgtatggcacccggtccgcttgaagtggcctggtttgcggaagagacggctgccgtcgagcgtgctgttgatgccctgaccaaacggctggaaaaactggaggctaaatgacgccaggtgaagtacggcgcctatatttcatcattcgcacttttttaagctacggacttgatgaactgatccccaaaatgcgtatcaccctgccgctacggctatggcgatactcattattctggatgccaaatcggcataaagacaaacctttaggtgagcgactacgactggccctgcaagaactggggccggtatggatcaagttcgggcagatgttatcaacccgccgcgatctttttccgccgcatattgccgatcagctggcgttattgcaggacaaagtcgctccgtttgatggcaagctggcgaagcagcagattgaagctgcaatgggcggcttgccggtagaagcgtggtttgacgattttgaaatcaagccgctggcttctgcttctatcgcccaggttcataccgcgcgattgaaatcgaatggtaaagaggtggtgattaaagtcatccgcccggatattttgccggttattaaagcggatctgaaacttatctaccggctggctcgctgggtgccgcgtttgctgccggatggtcgccgtctgcgcccaaccgaagtggtgcgcgagtacgaaaagaccttgcttgatgaactgaatttgctgcgggaatctgccaacgccattcagcttcggcgcaattttgaagacagcccgatgctctacatcccggaagtttaccctgactattgtagtgaagggatgatggtgatggagcgcatttacggcattccggtgtctgatgttgcggcgctggagaaaaacggcactaacatgaaattgctggcggaacgcggcgtgcaggtgttcttcactcaggtctttcgcgacagctttttccatgccgatatgcaccctggcaacatcttcgtaagctatgaacacccggaaaacccgaaatatatcggcattgattgcgggattgttggctcgctaaacaaagaagataaacgctatctggcagaaaactttatcgccttctttaatcgcgactatcgcaaagtggcagagctacacgtcgattcaggctgggtgccaccagataccaacgttgaagagttcgaatttgccattcgtacggtctgtgaacctatctttgagaaaccgctggccgaaatttcgtttggacatgtactgttaaatctgtttaatacggcgcgtcgcttcaatatggaagtgcagccgcaactggtgttactccagaaaaccctgctctatgtcgaaggggtaggacgccagctttatccgcagctcgatttatggaaaacagcgaagcctttcctggagtcgtggattaaagatcaggtcggtattcctgcgctggtgagagcatttaaagaaaaagcgccgttctgggtcgaaaaaatgccagaactgcctgaattggtttacgacagtttgcgccagggcaagtatttacagcacagtgttgataagattgcccgcgagcttcagtcaaatcatgtacgtcagggacaatcgcgttattttctcggaattggcgctacgttagtattaagtggcacattcttgttggtcagccgacctgaatgggggctgatgcccggctggttaatggcaggtggtctgatcgcctggtttgtcggttggcgcaaaacacgctgattttttcatcgctcaaggcgggccgtgtaacgtataatgcggctttgtttaatcatcatctaccacagaggaacatgtatgggtggtatcagtatttggcagttattgattattgccgtcatcgttgtactgctttttggcaccaaaaagctcggctccatcggttccgatcttggtgcgtcgatcaaaggctttaaaaaagcaatgagcgatgatgaaccaaagcaggataaaaccagtcaggatgctgattttactgcgaaaactatcgccgataagcaggcggatacgaatcaggaacaggctaaaacagaagacgcgaagcgccacgataaagagcaggtgtaatccgtgtttgatatcggttttagcgaactgctattggtgttcatcatcggcctcgtcgttctggggccgcaacgactgcctgtggcggtaaaaacggtagcgggctggattcgcgcgttgcgttcactggcgacaacggtgcagaacgaactgacccaggagttaaaactccaggagtttcaggacagtctgaaaaaggttgaaaaggcgagcctcactaacctgacgcccgaactgaaagcgtcgatggatgaactacgccaggccgcggagtcgatgaagcgttcctacgttgcaaacgatcctgaaaaggcgagcgatgaagcgcacaccatccataacccggtggtgaaagataatgaagctgcgcatgagggcgtaacgcctgccgctgcacaaacgcaggccagttcgccggaacagaagccagaaaccacgccagagccggtggtaaaacctgctgcggacgctgaaccgaaaaccgctgcaccttccccttcgtcgagtgataaaccgtaaacatgtctgtagaagatactcaaccgcttatcacgcatctgattgagctgcgtaagcgtctgctgaactgcattatcgcggtgatcgtgatattcctgtgtctggtctatttcgccaatgacatctatcacctggtatccgcgccattgatcaagcagttgccgcaaggttcaacgatgatcgccaccgacgtggcctcgccgttctttacgccgatcaagctgacctttatggtgtcgctgattctgtcagcgccggtgattctctatcaggtgtgggcatttatcgccccagcgctgtataagcatgaacgtcgcctggtggtgccgctgctggtttccagctctctgctgttttatatcggcatggcattcgcctactttgtggtctttccgctggcatttggcttccttgccaataccgcgccggaaggggtgcaggtatccaccgacatcgccagctatttaagcttcgttatggcgctgtttatggcgtttggtgtctcctttgaagtgccggtagcaattgtgctgctgtgctggatggggattacctcgccagaagacttacgcaaaaaacgcccgtatgtgctggttggtgcattcgttgtcgggatgttgctgacgccgccggatgtcttctcgcaaacgctgttggcgatcccgatgtactgtctgtttgaaatcggtgtcttcttctcacgcttttacgttggtaaagggcgaaatcgggaagaggaaaacgacgctgaagcagaaagcgaaaaaactgaagaataaattcaaccgcccgtcagggcggttgtcatatggagtacaggatgtttgatatcggcgttaatttgaccagttcgcaatttgcgaaagaccgtgatgatgttgtagcgtgcgcttttgacgcgggagttaatgggctactcatcaccggcactaacctgcgtgaaagccagcaggcgcaaaagctggcgcgtcagtattcgtcctgttggtcaacggcgggcgtacatcctcacgacagcagccagtggcaagctgcgactgaagaagcgattattgagctggccgcgcagccagaagtggtggcgattggtgaatgtggtctcgactttaaccgcaacttttcgacgccggaagagcaggaacgcgcttttgttgcccagctacgcattgccgcagatttaaacatgccggtatttatgcactgtcgcgatgcccacgagcggtttatgacattgctggagccgtggctggataaactgcctggtgcggttcttcattgctttaccggcacacgcgaagagatgcaggcgtgcgtggcgcatggaatttatatcggcattaccggttgggtttgcgatgaacgacgcggactggagctgcgggaacttttgccgttgattccggcggaaaaattactgatcgaaactgatgcgccgtatctgctccctcgcgatctcacgccaaagccatcatcccggcgcaacgagccagcccatctgccccatattttgcaacgtattgcgcactggcgtggagaagatgccgcatggctggctgccaccacggatgctaatgtcaaaacactgtttgggattgcgttttagagtttgcggaactcggtattcttcacactgtgcttaatctctttattaataagattaagcaatagcatggagcgagcctcaccatcgggttcggtgaaaatggcctgaaagccttcgaacgcgccttcggtaataatcaccttatctcccggataaggggttgccggatcgacaatgtctttcggtttatataccgatagctgatgaatcaccgccgatgggactatcgctggcgacgcgccaaagcgcacgaagtgactgacaccgcgggtcgcgttgatagtcgtggtatgaatcacttctggatcaaattcgacaaacaggtagttgggaaacaatggctcactgactgcagtacgttttccacgcacgattttttccagggtgatcatcggtgccaggcaattcacagcctgtctttcgaggtgttcctgggcacgttgaagttgcccgcgcttgcagtacagtaaataccaggattgcataatgactcttatccgtttaatcggggcgcaaggatagcaaaagctttacgctaagttaattatattccccggtttgcgttataccgtcagagttcacgctaatttaacaaatttacagcatcgcaaagatgaacgccgtataatgggcgcagattaagaggctacaatggacgccatgaaatataacgatttacgcgacttcttgacgctgcttgaacagcagggtgagctaaaacgtatcacgctcccggtggatccgcatctggaaatcactgaaattgctgaccgcactttgcgtgccggtgggcctgcgctgttgttcgaaaaccctaaaggctactcaatgccggtgctgtgcaacctgttcggtacgccaaagcgcgtggcgatgggcatggggcaggaagatgtttcggcgctgcgtgaagttggtaaattattggcgtttctgaaagagccggagccgccaaaaggtttccgcgacctgtttgataaactgccgcagtttaagcaagtattgaacatgccgacaaagcggctgcgtggtgcgccctgccaacaaaaaatcgtctctggcgatgacgtcgatctcaatcgcattcccattatgacctgctggccggaagatgccgcgccgctgattacctgggggctgacagtgacgcgcggcccacataaagagcggcagaatctgggcatttatcgccagcagctgattggtaaaaacaaactgattatgcgctggctgtcgcatcgcggcggcgcgctggattatcaggagtggtgtgcggcgcatccgggcgaacgtttcccggtttctgtggcgctgggtgccgatcccgccacgattctcggtgcagtcactcccgttccggatacgctttcagagtatgcgtttgccggattgctacgtggcaccaagaccgaagtggtgaagtgtatctccaatgatcttgaagtgcccgccagtgcggagattgtgctggaagggtatatcgaacaaggcgaaactgcgccggaagggccgtatggcgaccacaccggttactataatgaagtcgatagtttcccggtatttaccgtgacgcatattacccagcgtgaagatgcgatttaccattccacctataccgggcgtccgccagatgagcccgcggtgctgggtgtcgcactgaacgaagtgtttgtgccgattctgcaaaaacagttcccggaaattgtcgatttttacctgccgccggaaggctgctcttatcgcctggcggtagtgacaatcaaaaaacagtacgccggacacgcgaagcgcgtcatgatgggcgtctggtcgttcttacgccagtttatgtacactaaatttgtgatcgtttgcgatgatgacgttaacgcacgcgactggaacgatgtgatttgggcgattaccacccgtatggacccggcgcgggatactgttctggtagaaaatacgcctattgattatctggattttgcctcgcctgtctccgggctgggttcaaaaatggggctggatgccacgaataaatggccgggggaaacccagcgtgaatggggacgtcccatcaaaaaagatccagatgttgtcgcgcatattgacgccatctgggatgaactggctatttttaacaacggtaaaagcgcctgatgcgcgtttgttttgccctatttatcgatccgacagagaaagcgcatgacaaccttaagctgtaaagtgacctcggtagaagctatcacggataccgtatatcgtgtccgcatcgtgccagacgcggccttttcttttcgtgctggtcagtatttgatggtagtgatggatgagcgcgacaaacgtccgttctcaatggcttcgacgccggatgaaaaagggtttatcgagctgcatattggcgcttctgaaatcaacctttacgcgaaagcagtcatggaccgcatcctcaaagatcatcaaatcgtggtcgacattccccacggagaagcgtggctgcgcgatgatgaagagcgtccgatgattttgattgcgggcggcaccgggttctcttatgcccgctcgattttgctgacagcgttggcgcgtaacccaaaccgtgatatcaccatttactggggcgggcgtgaagagcagcatctgtatgatctctgcgagcttgaggcgctttcgttgaagcatcctggtctgcaagtggtgccggtggttgaacaaccggaagcgggctggcgtgggcgtactggcaccgtgttaacggcggtattgcaggatcacggtacgctggcagagcatgatatctatattgccggacgttttgagatggcgaaaattgcccgcgatctgttttgcagtgagcgtaatgcgcgggaagatcgcctgtttggcgatgcgtttgcatttatctgagatataaaaaaacccgcccctgacaggcgggaagaacggcaactaaactgttattcagtggcatttagatctatgacgtatctggcaaaccatgcccgatgcgacgctgtcgcgtcttatcgtgcctacaaatagtccgaaccgtaggccggataaggcgtttacgccgcatccggcaattggtgcatgatgcctgatgcgacgctgtcgcgtcttatcgtgcctacaaatagtccgaaccgtaggccggataaggcgtttacgccgcatccggcaattggtgcatgatgcctgatgcgacgctggcgcgtcttatcaggcctacattggtgccggatcggtagaccggataaggcgttcacgccgcatccggcaagtggttaaacccgctcaaacaccgtcgcaataccctgacccagaccgatacacatcgtcgccagaccaaactgaacgtctttgcgttccatcagattcagcagcgtggtgctgatacgcgcaccggaacaacccagcggatgacccagcgcgatcgcgccaccgttgaggttgatcttctcgtcaatctgctcaattagtcccagatctttaatacatggcaggatctgcgcggcaaaggcttcgttcatttcaaacacgccgatatcgctggcagaaagccccgcttttttcagcgccagtttcgaggccggaaccgggccgtaacccataatcgatgggtcacaaccaacgaccgccatcgaacgcacacgagcgcgcggcttaagacctaattcatgggcgcggctttcactcatcaccagcatggcagctgcgccatcggaaagtgcagaagatgtgcccgccgttaccataccgtttactggatcaaacgccggacgcagcgtggcgagggcttccacggtggtttccgggcgaatcacttcgtcgtaattaaactgcttcaggacgccgtcggcatcgtgaccaccggtcgggatgatttcatttttaaatgcggccgactgcgtggcggcccaggcgcgggcgtgtgaccgcgcggcaaaggcatcctgcatttcacggctgataccgtgcatacgcgccagcatttctgccgttaagcccatcatgcccgccgctttggcgacattgcggctcaggccggggtgaaaatcgacgccgtgactcatcggcacatggcccatatgctccacgccgccaaccagacatgcctgcgcatcgccagtcatgatcattcgtgctgcgtcatgcagtgcctgcatggatgaaccacacaagcgattaacggtaaccgccgggacagagtgtggtacttctgccagcagcgccgcgttacgggcgatattaaaaccctgctccagcgtctgctgcacacaaccccagtaaatatcgtcgagggccgccgcttccagcgccgggttacgcgccagcaggctacgcattaaatgagcggagagaccttctgcacgcacgttacgaaaagcaccgcccttcgaacggcccatcggggtgcgaattgcatcgacaatgacaacctgttccattgtgactccttaagccgttttcaggtcgccaaccggacgggctggctcaaccggaggatagtacggttcgttatgacgcgctttattacgcagaccttccggcacttcatacagcgggccgaggtgctgatattgctgtgccatatcgaggtattttgcgctaccgagggtgtccagccagcggaacgcgccgccgtggaacggagggaagcccaggccgtagaccagcgccatatccgcttccgccggagtggcgataatgccttcctccagacagcgcaccacttcgttgaccatcgggatcatcatgcgggcgataatctcttcttcgctgaaatcgcgcttcggctggctcacttctgccagcaggtcttcaacggcggcgtcttcttctttcttcggcttacctttgctgtcttctttataacgccagaaaccgaggccgttcttctgaccaaagcggttggcatcaaacagcgcgtcgatggcatcgcggtaatctttctgcatccgctgcgggaagcctgctgccatgacagcctgagcgtgatgcgcggtatcaatgcccacaacgtccagcagatatgccgggcccatcggccagccaaactgtttttccatcactttgtcgatcttgcggaaatccgcgccgtcgcgcagcagctggctgaaaccggcgaaatacgggaacagcacgcggttaacaaagaagccggggcagtcgttaaccacaatcggcgtcttgcccatcttgctcgcccaggcgacaactttcgcgatggtttcgtcggagcttttctcgccgcgaataatttctaccaacggcattcggtggaccgggttaaagaagtgcatcccgcagaagttttccgggcgttccagcgcgttggccagttcgctgataggaatggttgaagtgttagacgccagcacggtatcctggcgtactttttgttcggtttctgccagtacggcttttttcactttcgggttttcaacaaccgcttctaccacaatatccacgcggtcaaatccggcgtagtcgagcgttgggtggattgtggagatcacgccagccagtttcagaccatcgatcttgccgcgctcaagctgcttgttcagcagtttcgcggcttcggtcatgccgagggttaacgacttgtcgttgatatctttcatgacaaccggcacgcctttccacgcagactggtaagcgatgccgccgcccataatgcctgcacccagcaccgcggcctgtttcggggtttcaacgtctttggtgagtttcttcgctttgccttttacatattgatcgttaaggaaaatgccgaccagtgcgcgggcttcgttggtatgcgccagcgggacaaaacttttgttttccaggtttaaggcttcttcacgaccaaaacgggccgcagcttcaatggtttttactgcggtgatgggggccggataatgtttccccgctgtttgtgcgaccatccctttagcgatggtgaagctcatggtggcttcaatcttgctcagttttagtggttccagcttcggctgacgttttgctttccagtcgaggtcgccgttaatggcctggcgtaaaaccgcctttgcgccttcaaccagtttttctgctttgactacgccatccaccagaccgattttcagcgcctgatccgcgccgacatctttaccggcggcaatgatttccagcgcactgtcagcgcccagcatacgtggcatacgtacagaaccgccaaagcccggcatgatgcccagtttggtttccggcagaccgatgcgcagatccggcgtcgccagacgataatcggtcgccagcacgcattcgcagccaccgcccagcgcatagccgttgacggcagcaatggtcggcaccggcagatcttccaggcgattaaacacgctattggcaaagtgcagccactgacttaactgttcttcaggaacgaggaacagggacaaaaattcggtgatatcagcaccgacgataaaagctgctttgttcgaacgcagcagcagcccttttagatctgattgctgttccagcacgccgatggcctcgccgaggctggcgacggtcgcagtgtcgagtttattaactgaacctggggcatcaaataccagttcggcaatgccatcttccagccagtcaaggtacagggtgtcgcctttgtaaagcatgtcagtctcctgaatccgcaaggtgatctggtcgtaccagatgagtcgaagtgtgtattttgtgttaaaagtatgcaaacaaaagattaaagaaatgccgatctgatcacgctcggcagaaatcacgctctggatgaacgatgtgctaagatgcggagacttaaggtcaaaaaaacagaagggtaaaaaatggaatcactggcctcgctctataaaaatcatatagctaccttacaagaacggactcgcgatgcgctggcgcgcttcaagctggatgcgttacttattcactccggcgagctgttcaatgtttttctcgacgatcatccctatccgtttaaagtgaacccgcaattcaaagcgtgggtgccggtaactcaggtgccaaactgctggttgctggtggatggcgtgaacaagccgaaactgtggttttatctgccggttgattactggcacaacgtcgaaccgctgccgacctccttctggactgaagatgtggaagtgatcgcgctgccgaaagccgatggcattggtagcctgctgcctgctgcgcgcggcaatatcggttatatcggtccggtgccggagcgtgcgctgcaactggatattgaggccagcaacatcaacccgaaaggggttatcgactacctgcattactatcgctccttcaaaaccgagtacgaactggcctgtatgcgtgaagcgcagaaaatggcggtcaacggtcatcgtgcggcagaagaagcgttccgttctggcatgagcgagttcgatatcaacattgcctatctgaccgcgaccggtcatcgtgataccgacgtaccttacagcaacattgtggcgcttaacgaacacgctgcggtgctgcattacaccaaactggatcatcaggcgccggaagagatgcgcagcttcctgctggatgccggggccgaatataacggctatgcggctgacctgacccgtacctggtcggcaaaaagcgataacgactacgcgcagctggtgaaggacgttaatgatgaacaactggcgctgatcgccaccatgaaagcaggcgtcagctatgtggattaccacatccagttccatcagcgcatcgccaaactgctgcgtaaacatcaaatcatcaccgatatgagtgaagaagcgatggtcgaaaacgatctcaccgggccgtttatgccgcacggtatcggccatccgctgggcctgcaggtgcatgacgtcgccggttttatgcaggatgatagcggtacgcacctcgcggcaccggcaaaatatccgtacctgcgctgcacccgtattctccagccgggcatggtgttaaccatcgaaccgggtatctacttcattgaatcgctactggcaccgtggcgtgaagggcagttcagcaagcacttcaactggcagaaaattgaagcactgaaaccgttcggcggcattcgtatcgaagacaacgtggtgatccacgaaaacaacgtggaaaacatgacccgggatctgaaactggcgtgatggaaagctggttaattcctgcggcaccggtcacggtcgttgaagagatcaaaaagagccgcttcataacgatgttggcgcataccgatggcgttgaggcggcgaaagcgtttgttgaatcggtgcgggcagaacaccccgatgcccggcaccattgcgtggcgtgggtcgcgggtgcgccggatgattctcaacagctgggtttctctgacgacggggagccggcgggaacggcaggtaaaccgatgctcgcccagctaatgggcagcggcgtcggggaaattaccgctgtggtagtgcgctactacggcggcatattgcttggcaccggtgggttagtgaaagcgtatggcggcggcgtgaatcaggcgctgcgccagctaacgacccaacgcaagacgccattaaccgaatatactttgcaatgtgaatatagtcagttaaccggcattgaagcgttgctggggcagtgtgacggcaaaattatcaacagtgattatcaggcattcgttctgctgcgggtggcgcttccggcggcgaaagtggctgaattttccgcaaagctggcggattttagccgtggttcattgcaattgttagcgattgaagaataatccccacttcgttttgcagaactaaggaagcggcagagatgcattttcgcgccattacccgaatcgttggactactggtcatcttattttcagggaccatgattatccctgggctggtagcactcatctaccgggatggagcgggccgcgcttttacccagaccttttttgtcgccctcgccattggctctatgctttggtggccgaaccgcaaagagaaaggtgaacttaaatcccgtgaggggtttctgatagtggtgctgttctggaccgtgctgggtagcgtcggtgcgctcccttttatcttctcggaaagcccgaacctcacgattaccgatgcgttttttgaatctttctctggcctgaccaccacgggggccactacgctggtggggctggattcgctccctcatgccatcctcttttatcgccagatgctgcaatggtttggcgggatggggatcatcgtgttagcggttgcgatactgcctatcctcggcgtgggtgggatgcagctctatcgcgcagaaatgcccggcccgctgaaagataacaaaatgcgcccgcgaattgcggaaacggcgaaaaccctgtggttgatttatgtcttgctgaccgtcgcctgtgcgctggcgttgtggtttgccggaatggatgcctttgatgccatcggccatagctttgcgactatcgctattggcggcttctcgacacatgatgccagtatcggttatttcgatagcccgactattaacactatcattgctatcttcctgctgatctccggctgtaactacggtctgcacttttcactgttaagtgggcgtagtctgaaggtttattggcgcgatccggaatttcgcatgtttatcggcgtacagtttacgctggtggttatttgtaccctcgtactgtggtttcataatgtctacagttcggcgctgatgacaattaaccaggcgtttttccaggtggtatcgatggcgacaaccgccgggtttacgactgacagcattgcccgctggccgctctttttgccggtactgcttttatgttcagcttttatcggcggttgcgccgggtcaacgggcggtggcctgaaagtgatccgcatcctgctgctgtttaagcaggggaaccgagagctgaaacgactggtgcatccgaacgccgtctatagcattaagctggggaatcgcgcactgccggaacgtatcctcgaagccgtttggggatttttctccgcctatgcattggtgtttattgtcagtatgctggcgattatcgccacgggcgtggatgacttttctgcctttgcgtcggttgttgcgacattgaataacctggggccagggcttggcgtggttgctgataactttaccagtatgaacccggtggctaaatggatcctgattgccaacatgctgtttggtcgtctcgaggtctttacattgctggtgctctttaccccgactttctggcgtgaatgatggagtaatacgtgaaaacattaattcttttctcaacaagggacggacaaacgcgcgagattgcctcctacctggcttcggaactgaaagaactggggatccaggcggatgtcgccaatgtgcaccgcattgaagaaccacagtgggaaaactatgaccgtgtggtcattggtgcttctattcgctatggtcactaccattcagcgttccaggaatttgtcaaaaaacatgcgacgcggctgaattcgatgccgagcgccttttactccgtgaatctggtggcgcgcaaaccggagaagcgtactccacagaccaacagctacgcgcggaagtttctgatgaactcgcaatggcgtcccgatcgctgtgccgtcattgccggggcgctgcgttacccacgttatcgctggtacgaccgctttatgatcaagctgattatgaagatgtcaggcggagaaacggatacgcgcaaagaggttgtctataccgattgggagcaagtggcgaatttcgcccgagaaatcgcccatttaaccgacaaaccgacgctgaaataagcataaagaataaaaaatgcgcggtcagaaaattattttaaatttcctcttgtcaggccggaataactccctataatgcgccaccactgacacggaacaacggcaaacacgccgccgggtcagcggggttctcctgagaatctcaacagagaaaagcaaaaaaaatgcttgactctgtagcgggaaagtgtattatgcacaccccgcgccgctgagaaaaagtgaagcggcactgctctttaacaatttatcagacaatctgtgtgggcactcgaagatacggattcttaacgtcgcaagacgaaaaatgaataccaagtctcaagagtgaacacgtaattcattacgaagtttaattctttgagcatcaaacttttaaattgaagagtttgatcatggctcagattgaacgctggcggcaggcctaacacatgcaagtcgaacggtaacaggaagcagcttgctgcttcgctgacgagtggcggacgggtgagtaatgtctgggaaactgcctgatggagggggataactactggaaacggtagctaataccgcataacgtcgcaagaccaaagagggggaccttcgggcctcttgccatcggatgtgcccagatgggattagctagtaggtggggtaacggctcacctaggcgacgatccctagctggtctgagaggatgaccagccacactggaactgagacacggtccagactcctacgggaggcagcagtggggaatattgcacaatgggcgcaagcctgatgcagccatgccgcgtgtatgaagaaggccttcgggttgtaaagtactttcagcggggaggaagggagtaaagttaatacctttgctcattgacgttacccgcagaagaagcaccggctaactccgtgccagcagccgcggtaatacggagggtgcaagcgttaatcggaattactgggcgtaaagcgcacgcaggcggtttgttaagtcagatgtgaaatccccgggctcaacctgggaactgcatctgatactggcaagcttgagtctcgtagaggggggtagaattccaggtgtagcggtgaaatgcgtagagatctggaggaataccggtggcgaaggcggccccctggacgaagactgacgctcaggtgcgaaagcgtggggagcaaacaggattagataccctggtagtccacgccgtaaacgatgtcgacttggaggttgtgcccttgaggcgtggcttccggagctaacgcgttaagtcgaccgcctggggagtacggccgcaaggttaaaactcaaatgaattgacgggggcccgcacaagcggtggagcatgtggtttaattcgatgcaacgcgaagaaccttacctggtcttgacatccacagaactttccagagatggattggtgccttcgggaactgtgagacaggtgctgcatggctgtcgtcagctcgtgttgtgaaatgttgggttaagtcccgcaacgagcgcaacccttatcctttgttgccagcggtccggccgggaactcaaaggagactgccagtgataaactggaggaaggtggggatgacgtcaagtcatcatggcccttacgaccagggctacacacgtgctacaatggcgcatacaaagagaagcgacctcgcgagagcaagcggacctcataaagtgcgtcgtagtccggattggagtctgcaactcgactccatgaagtcggaatcgctagtaatcgtggatcagaatgccacggtgaatacgttcccgggccttgtacacaccgcccgtcacaccatgggagtgggttgcaaaagaagtaggtagcttaaccttcgggagggcgcttaccactttgtgattcatgactggggtgaagtcgtaacaaggtaaccgtaggggaacctgcggttggatcacctccttaccttaaagaagcgtactttgcagtgctcacacagattgtctgatgaaaatgagcagtaaaacctctacaggcttgtagctcaggtggttagagcgcacccctgataagggtgaggtcggtggttcaagtccactcaggcctaccaaatttgcacggcaaatttgaagaggttttaactacatgttatggggctatagctcagctgggagagcgcctgctttgcacgcaggaggtctgcggttcgatcccgcatagctccaccatctctgtagtgattaaataaaaaatacttcagagtgtacctgcaaaggttcactgcgaagttttgctctttaaaaatctggatcaagctgaaaattgaaacactgaacaacgaaagttgttcgtgagtctctcaaattttcgcaacacgatgatgaatcgaaagaaacatcttcgggttgtgaggttaagcgactaagcgtacacggtggatgccctggcagtcagaggcgatgaaggacgtgctaatctgcgataagcgtcggtaaggtgatatgaaccgttataaccggcgatttccgaatggggaaacccagtgtgtttcgacacactatcattaactgaatccataggttaatgaggcgaaccgggggaactgaaacatctaagtaccccgaggaaaagaaatcaaccgagattcccccagtagcggcgagcgaacggggagcagcccagagcctgaatcagtgtgtgtgttagtggaagcgtctggaaaggcgcgcgatacagggtgacagccccgtacacaaaaatgcacatgctgtgagctcgatgagtagggcgggacacgtggtatcctgtctgaatatggggggaccatcctccaaggctaaatactcctgactgaccgatagtgaaccagtaccgtgagggaaaggcgaaaagaaccccggcgaggggagtgaaaaagaacctgaaaccgtgtacgtacaagcagtgggagcctcttttatggggtgactgcgtaccttttgtataatgggtcagcgacttatattctgtagcaaggttaaccgaataggggagccgaagggaaaccgagtcttaactgggcgttaagttgcagggtatagacccgaaacccggtgatctagccatgggcaggttgaaggttgggtaacactaactggaggaccgaaccgactaatgttgaaaaattagcggatgacttgtggctgggggtgaaaggccaatcaaaccgggagatagctggttctccccgaaagctatttaggtagcgcctcgtgaattcatctccgggggtagagcactgtttcggcaagggggtcatcccgacttaccaacccgatgcaaactgcgaataccggagaatgttatcacgggagacacacggcgggtgctaacgtccgtcgtgaagagggaaacaacccagaccgccagctaaggtcccaaagtcatggttaagtgggaaacgatgtgggaaggcccagacagccaggatgttggcttagaagcagccatcatttaaagaaagcgtaatagctcactggtcgagtcggcctgcgcggaagatgtaacggggctaaaccatgcaccgaagctgcggcagcgacgcttatgcgttgttgggtaggggagcgttctgtaagcctgtgaaggtgtgctgtgaggcatgctggaggtatcagaagtgcgaatgctgacataagtaacgataaagcgggtgaaaagcccgctcgccggaagaccaagggttcctgtccaacgttaatcggggcagggtgagtcgacccctaaggcgaggccgaaaggcgtagtcgatgggaaacaggttaatattcctgtacttggtgttactgcgaaggggggacggagaaggctatgttggccgggcgacggttgtcccggtttaagcgtgtaggctggttttccaggcaaatccggaaaatcaaggctgaggcgtgatgacgaggcactacggtgctgaagcaacaaatgccctgcttccaggaaaagcctctaagcatcaggtaacatcaaatcgtaccccaaaccgacacaggtggtcaggtagagaataccaaggcgcttgagagaactcgggtgaaggaactaggcaaaatggtgccgtaacttcgggagaaggcacgctgatatgtaggtgaggtccctcgcggatggagctgaaatcagtcgaagataccagctggctgcaactgtttattaaaaacacagcactgtgcaaacacgaaagtggacgtatacggtgtgacgcctgcccggtgccggaaggttaattgatggggttagcggtaacgcgaagctcttgatcgaagccccggtaaacggcggccgtaactataacggtcctaaggtagcgaaattccttgtcgggtaagttccgacctgcacgaatggcgtaatgatggccaggctgtctccacccgagactcagtgaaattgaactcgctgtgaagatgcagtgtacccgcggcaagacggaaagaccccgtgaacctttactatagcttgacactgaacattgagccttgatgtgtaggataggtgggaggctttgaagtgtggacgccagtctgcatggagccgaccttgaaataccaccctttaatgtttgatgttctaacgttgacccgtaatccgggttgcggacagtgtctggtgggtagtttgactggggcggtctcctcctaaagagtaacggaggagcacgaaggttggctaatcctggtcggacatcaggaggttagtgcaatggcataagccagcttgactgcgagcgtgacggcgcgagcaggtgcgaaagcaggtcatagtgatccggtggttctgaatggaagggccatcgctcaacggataaaaggtactccggggataacaggctgataccgcccaagagttcatatcgacggcggtgtttggcacctcgatgtcggctcatcacatcctggggctgaagtaggtcccaagggtatggctgttcgccatttaaagtggtacgcgagctgggtttagaacgtcgtgagacagttcggtccctatctgccgtgggcgctggagaactgaggggggctgctcctagtacgagaggaccggagtggacgcatcactggtgttcgggttgtcatgccaatggcactgcccggtagctaaatgcggaagagataagtgctgaaagcatctaagcacgaaacttgccccgagatgagttctccctgaccctttaagggtcctgaaggaacgttgaagacgacgacgttgataggccgggtgtgtaagcgcagcgatgcgttgagctaaccggtactaatgaaccgtgaggcttaaccttacaacgccgaagatgttttggcggattgagagaatttcagctttgattcagagtccgaaggattttgcgctgagacaaggcggcaaatgaagcgaaggaaggagcatactgaagtatgtgactgactttcgcgaatgcagccgacgcagtatcagcacaaaagacacaggacagagcacaggaatttgcctggcggcagtagcgcggtggtcccacctgaccccatgccgaactcagaagtgaaacgccgtagcgccgatggtagtgtggggtctccccatgcgagagtagggaactgccaggcatcaaattaagcagaaggccatccgtcaggatggcctttttgcattggcgcagaaaaaaatgccggatgcgacgctggcgcgtcttatccagcctactcttgcttatccgttctgcttttgcatccactccaccacaaaatcagccagcccctcaacatcattaatatccagtaatgcgacatcaagattaagcggcacatcactggctacagcaataacatgcctgtctatcactaattcttcaggtcgatgtccggctccatcgcgaaacagcacaatctttgcgatctcttcatgcttaaacccttcgaccagaatcaaatccagctttgaggtatccattcgacttgcgagaaactgtagatccagctcttcttcgtctggtgtttccgtcatcaaggcccatcgttgctggctggcaacgatggtttgtgccgcgccagccttgcgcagctcatagctatctttgcctggcttatcaacatccatatcatggtgcgtatgcttaatcagccctggacggatccctctggcgcataatgccgggatcagttttttcaaaagcgtagtttttccggtaccactccacgcggcaaaggcgagtaacggtatcatcgtttttcctgccatcgggcaagctcctctggcgtattcacgttaacaaatgcatctttatgatcgctgaaatcaaccgcatgaccgccagccagacgcataaatgccattacccggcgttctcctgcttgcagatattccagtaataaaggctcaatagcgcggtttaccagagcaatagtcgggtgatcgcgttcaccgtcatggacccacacgacaggcgcatctttgcgctgatgattaagcctggctgctaaatcagggggaatgtaaggcgtatcgcacgggcaaaacaaaaaccactcaccagcttcctgctgcattactgaaagcattcctgccagagggcctgggtaatccgccagtgaatcttcaatcactttcagaccgcttgcctgatagatttcctgatgacgattagcattaaccacgacgtgagagagctgcgtcataagcgcgtcagcgacatgttgccataatggtttgccgtttaattcaagcaatcctttatctacgccgcccattcgtctggctttaccgcctgccagcacaacgcctgttatcgtcgtcatcagattcaccgatatcgcctcttttattgtgggattgaccctgctaacgtgtctgtctcaagagtaaggagcatcactatgaaatgtaaacgtctgaatgaagttattgaactcctccagccagcctggcaaaaagagccagaccttaacctgctgcaatttttgcagaaactggcgaaagagtcaggttttgacggcgaactggcggatttgacggatgacattctgatctatcacctgaaaatgcgtgattccgcgaaagatgcggtgatcccgggtttgcagaaagattatgaagaagacttcaaaacggcgctgttacgcgctcgcggcgtaattaaagagtaaaagcttgtaagcggcgccaccaaaatcatcgtgaaatgatatccttcgtcattcgtaatgttttccggatgatgggatgaataacagcgcttttactttccagacactacacccggataccatcatggacgctctgtttgagcatgggatccgggtggattccggtcttaccccgcttaacagctatgaaaaccgtgtctatcaatttcagggcgaagatcgtcgacgttttgtcgtcaaattttatcgccctgaacgttggacagccgatcaaatcctcgaagaacatcaatttgcgttgcagctggtaaatgatgaagttccggtcgcagcacctgtggcctttaacggtcagactttattgaatcatcagggattttatttcgctgtttttccaagcgtcggtggtcgccagttcgaagctgataatatcgatcagatggaagcggttgggcgttatttagggcgtatgcaccagacggggcgcaaacagctttttatccatcgcccgaccatcggtttgaacgaatatctcattgagccacgcaagctgtttgaggacgctacactgataccttccgggttgaaagcggcattcctgaaagcgacagatgagctgattgccgccgttacagcacactggcgggaagatttcaccgttctgcggctacatggagactgccacgccgggaatattctctggcgcgatggtccaatgtttgttgatctggatgatgcacgtaatggtccagccgttcaggatttgtggatgttgctcaatggcgataaagccgagcagcggatgcaactggaaactattattgaagcttatgaagaatttagcgagttcgacaccgctgaaatcggactgattgaacctttacgcgccatgcgtttggtttattatcttgcctggctaatgcggcgttgggctgatcccgcgttcccgaaaaatttcccgtggttaaccggggaagattactggctacgacagacggcgacttttatagaacaggcaaaagttctacaagaaccccctttgcaattaacacctatgtattaatcggagagagtagatcatgaaaaagatttggctggcgctggctggtttagttttagcgtttagcgcatcggcggcgcagtatgaagatggtaaacagtacactaccctggaaaaaccggtagctggcgcgccgcaagtgctggagtttttctctttcttctgcccgcactgctatcagtttgaagaagttctgcatatttctgataatgtgaagaaaaaactgccggaaggcgtgaagatgactaaataccacgtcaatttcatgggtggtgacctgggcaaagatctgactcaggcatgggctgtggcgatggcgctgggcgtggaagacaaagtgactgttccgctgtttgaaggcgtacagaaaacccagaccattcgttctgcttctgatatccgcgatgtatttatcaacgcaggtattaaaggtgaagagtacgacgcggcgtggaacagcttcgtggtgaaatctctggtcgctcagcaggaaaaagctgcagctgacgtgcaattgcgtggcgttccggcgatgtttgttaacggtaaatatcagctgaatccgcagggtatggataccagcaatatggatgtttttgttcagcagtatgctgatacagtgaaatatctgtccgagaaaaaataattcaatgtaaattacataaagcccgtgaatattcacgggctttttttattatttaataaatataaatacattctgataatgcatcctgccgctggacattatttcagcataagtggatattcaaagttttgctgttttatcagggaatatttatatgatacgtaagtcagctacaggtgttattgttgcgttagccgtaatctggggtggtggcacatggtacacaggtacgcaaattcagcctggtgtcgaaaaatttattaaagattttaacgatgctaaaaagaaaggtgaacatgcctacgatatgacgttaagttatcaaaattttgacaaaggcttttttaattcccgttttcaaatgcaaatgacattcgataacggtgcacccgatctcaatatcaagccaggccagaaagttgtatttgatgtggatgttgagcacggtccgttgcccatcacaatgttaatgcatggtaatgtcatcccagcactggcagcggcaaaagtgaacttagtgaataatgaactgacacaaccgctatttatcgccgcgaaaaataaatcgcccgtggaagcgacattgcgattcgcgtttggtggctcattctctacgacattagatgttgcccctgcagagtatggaaagttttcttttggtgagggccagtttacttttaatggtgatggtagttcattgtctaacctggatattgaaggcaaagtcgaagatattgttctgcaattatcaccaatgaacaaagtaacagcaaaaagttttaccattgattctctggcgcgattagaagaaaagaaatttccggttggtgaaagcgagtcgaaatttaatcagattaacattatcaatcacggggaagacgttgcccaaatcgatgctttcgttgcaaaaaccaggctggatcgcgttaaagacaaagattatatcaatgtcaatctgacctacgaacttgataagttaacaaaagggaatcagcaactcggtagtggtgagtggtcattgattgctgaatctattgatccctcagcagtgcgccaatttatcatccagtataacattgcgatgcagaagcagcttgctgcacatcctgagttagcaaacgatgaagttgctctgcaagaagtgaatgctgcattgttcaaagagtatttaccgttattacaacaaagtgagccggccattaaacaaccggtaagatggaagaacgcactcggcgaactaaatgccaatctggatatcagtattgccgacccagccaaatcttcatcatccacaaacaaagatatcaaatcgctcaattttgatgtgaagttaccgcttaatgtcgccacagaaaccgcaaaacagcttaatttatctgaaggaatggatgcggaaaaagcgcaaaagcaggctgataaacaaatcagcgggatgatgacattaggtcagatgtttcagttaatcacgattgacaacaataccgcctcgctgcagctgcgttatacaccgggtaaagttgtttttaacggacaggagatgagcgaagaagaatttatgtctcgtgccggacgttttgttcattaaaatactcactcgcctctgctcattcagaggcgagtaaaacttacttattctgacgctgtgatgacatgagagacgtcagaagccggtctttttcctgccacaatgagttcagccattgctgaaaatggcgcttaaagcttttgtcattgatgtagtcgccatgtaactcatcggcaataggctgtaaatccacatgtacgacaatccgcgtcagtttaccgcttaacatatcgaagaagggctgacggttattgtccggataacacagcgtaacattaagcagtttatcgaattgtttacccagtacatttagcgccatcgcaatgcctgccgcctttggtggcaacaagttttgaaaagtggagtgggtttgctgatgtttttcttgcgtgaaacgggagccttcaacgaaattgacaatggtggtgggatgcaggcgaaacttttcacaagaacgccgagtggtttcaacatctttaccacgtcgctccggatgacgtaataaataagcgcgggaataacgcttcataaacggcatatccagcgcccagcacgccaggccaagaaatggcacccaggccagctgttgcttgaggaaatatttattcatcggaatgtgcttacgaaacagcacgcacagtacgacaatatctgcccaactacggtggttacaaataagcagataccagttcttcttacttaacccttccagcccgtgaacttcccattgcaggtgtgggttcagatgcagtaataccgccagaccttcacaccagcaatacatcataaaatcacaaaaacgcgaaacctttcgccaaatgactggcacaggtagcaatagttttacaatcccggcaatgatgatcgggacggaacaaaaaatagtgaccaaaatggtcaatacgatactcagcaaaagggttatcgcagcgagtattctcgtcataatgaatttattcaaaaggttagccatagacagtgcgctaaagaagcgcaaggcgcagattttagcagaaaacgacccaaataacggatgatccttaaggagaaaaataattcatatctatccacattagaaaaaatcccattatctcaattatcagggatggctttacttttaactgcatgaaaaacaaagacaagcatcatgctgtaaaaagcatgataataaattaaaagcgatgtaaataatttatgcacaaagttatccacatgacgatttgcgagcgatccagaagatctacaaaagattttcacgaaaagcggtgaaaaactcatgtttttatcctgtctgtggcatcctttacccataatctgataaacaggcacggacattatggttcagatcccccaaaatccacttatccttgtagatggttcatcttatctttatcgcgcatatcacgcgtttcctccgctgactaacagcgcaggcgagccgaccggtgcgatgtatggtgtcctcaacatgctgcgcagtctgatcatgcaatataaaccgacgcatgcagcggtggtctttgacgccaagggaaaaacctttcgtgatgaactgtttgaacattacaaatcacatcgcccgccaatgccggacgatctgcgtgcacaaatcgaacccttgcacgcgatggttaaagcgatgggactgccgctgctggcggtttctggcgtagaagcggacgacgttatcggtactctggcgcgcgaagccgaaaaagccgggcgtccggtgctgatcagcactggcgataaagatatggcgcagctggtgacgccaaatattacgcttatcaataccatgacgaataccatcctcggaccggaagaggtggtgaataagtacggcgtgccgccagaactgatcatcgatttcctggcgctgatgggtgactcctctgataacattcctggcgtaccgggcgtcggtgaaaaaaccgcgcaggcattgctgcaaggtcttggcgggctggatacgctgtatgccgagccagaaaaaattgctgggttgagcttccgtggcgcgaaaacaatggcagcgaagctcgagcaaaacaaagaagttgcttatctctcataccagctggcgacgattaaaaccgacgttgaactggagctgacctgtgaacaactggaagtgcagcaaccggcagcggaagagttgttggggctgttcaaaaagtatgagttcaaacgctggactgctgatgtcgaagcgggcaaatggttacaggccaaaggggcaaaacccgccgcgaagccacaggaaaccagtgttgcagacgaagcaccagaagtgacggcaacggtgatttcttatgacaactacgtcaccatccttgatgaagaaacactgaaagcgtggattgcgaagctggaaaaagcgccggtatttgcatttgataccgaaaccgacagccttgataacatctctgctaacctggtcgggctttcttttgctatcgagccaggcgtagcggcatatattccggttgctcatgattatcttgatgcgcccgatcaaatctctcgcgagcgtgcactcgagttgctaaaaccgctgctggaagatgaaaaggcgctgaaggtcgggcaaaacctgaaatacgatcgcggtattctggcgaattacggcattgagctgcgtgggattgcgtttgataccatgctggagtcctacattctcaatagcgttgccgggcgtcacgatatggacagcctcgcggaacgttggttgaagcacaaaaccatcacttttgaagagattgcgggtaaaggcaaaaatcaactgacctttaaccagattgccctcgaagaggccggacgttacgccgccgaagatgcggatgtcaccttgcagttgcatctgaaaatgtggccagatctgcaaaaacacaaagggccgttgaacgtcttcgagaatatcgaaatgccgctggtgccggtgctttcacgcattgaacgtaacggtgtgaagatcgatccgaaagtgctgcacaatcattctgaagagcttaccttgcgtctggctgagctggaaaagaaagcgcatgaaattgcaggtgaggaatttaacctttcttccaccaagcagttacaaaccattctatttgaaaaacagggcattaaaccgctgaagaaaacgccgggtggcgcgccgtcaacgtcggaagaggtactggaagaactggcgctggactatccgttgccaaaagtgattctggagtatcgtggtctggcgaagctgaaatcgacctacaccgacaagctgccgctgatgatcaacccgaaaaccgggcgtgtgcatacctcttatcaccaggcagtaactgcaacgggacgtttatcgtcaaccgatcctaacctgcaaaacattccggtacgtaacgaagaaggtcgccgtatccgccaggcgtttattgcgccagaggattatgtgattgtctcagcggactactcgcagattgaactgcgcattatggcgcatctctcgcgtgacaaaggcttgctgaccgcattcgcggaaggaaaagatatccaccgggcaacggcggcagaagtgtttggtttgccactggaaaccgtcaccagcgagcaacgccgtagcgcgaaagcgatcaactttggtctgatttatggcatgagtgctttcggtctggcgcggcaattgaacattccacgtaaagaagcgcagaagtacatggacctttacttcgaacgctaccctggcgtgctggagtatatggaacgcacccgtgctcaggcgaaagagcagggctacgttgaaacgctggacggacgccgtctgtatctgccggatatcaaatccagcaatggtgctcgtcgtgcagcggctgaacgtgcagccattaacgcgccaatgcagggaaccgccgccgacattatcaaacgggcgatgattgccgttgatgcgtggttacaggctgagcaaccgcgtgtacgtatgatcatgcaggtacacgatgaactggtatttgaagttcatagagatgatgtcgatgccgttgcgaagcagattcatcaactgatggaaaactgtacccgtctggatgtgccgttgctggtggaagtggggagtggcgaaaactgggatcaggcgcactaagattcgcctgaacatgcccttttttcgtaagtaagcaacataagctgtcacgttttgtgatggctattagaaattcctatgcaacaactgaaaaaaaattacaaaaagtgctttctgaactgaacaaaaaagagtaaagttagtcgcgtagggtacagaggtaagatgttctatctttcagaccttttacttcacgtaatcggatttggctgaatattttagccgccccagtcagtaatgactggggcgttttttattgagcgaaagaaaaaatccgcaatgcctgatgcgccatgtttatcaggccaacggtagaattgtaatctattgaatttacgggccggatacgccacatccggcacaagcattaaggcaagaaaattattcgccgtcctgcgtttcttctacaggctgcatctcgctaaaccaggtatccagtttctgccgcagcttgtccacgccttgtttcttcaacgaagaaaacgtttcaacctgcacatcaccgttaaacgccagtacagcttcacgcaccatattcaattgcgctttacgtgcgccgcttgccagtttgtccgctttggtcagcaacaccagcacggcgatattgctgtctaccgcccactcaatcatctgctgatccaaatctttcagcggatggcgaatatccattagcaccaccagaccttgcaggctctgacgtttttcgaggtactcgccgagcgcgcgctgccatttgcgcttcatctcttccgggacttccgcataaccgtacccaggcaagtcaaccagacgcttgccgtcagccacttcaaacaggttgataagctgggtgcgtccaggggtttttgaggtacgagccaggcttttctggttagtcagcgtgttcagcgcgctggatttacctgcgttggaacggcctgcaaaagccacttcaattccggtatcggaaggtaggtggcgaatatcaggcgcactcatcacaaaatgcgtctgttgataattcaaattagtcaaagcggtcgtctccgtcagtcaaagctttgtggcgattatacctgaaccataataaaaggcggatttttcggcgtgagcgttgtaagtaaaagccatacgctttgtgagacattgccgatagtctttatgcgaaatagcagagaaaattctgcgatgcatgtcaaataagctatataaatcagtgaattgcttttatataaaactctgaaaatgtgcaaatactgatggcggttgattgtttgtttaaagcaaaggcgtaaagtaacacccatagagcgaggacgctaacaggaacaatgactcaggatgagggtcaggagcgccaggaggcgaagacagaggattgtcaggaagacaaacgtccggagacgtaattaaacggaaatggaatcaacacggattgttctggctaatggaaaaacagggtgtgttggcggcctgcaaggattgtaagacccgttaagggttatgagtcaggaaaaaaggcgacagagtaatctgtcgccttttttctttgcttgctttctgttagattccgccgcaaatctatactgaataaaacggctaaaagacgaaccattatgaaaccatcttcaccatcacgcagcaaaggtcatgcaaaagcgcgtcgcaaaacgcgcgaagagctgaatcaggaagctcgtgaccgcaagcgtcagaaaaaacgtcgtggtcatgcgccgggcagccgcgcagcgggcggtaacaccacgtcaggcagcaaaggccagaacgcaccaaaagatccacgtattggcagtaaaacccctattccattgggcgtgactgaaaaagtcaccaaacagcacaaaccgaagagtgagaaacctatgctttcaccgcaggcggagttggaattactggaaacggatgagcgtctggatgcgctgctggaacgtctggaagcaggcgaaaccctgagtgccgaagagcaatcctgggtggatgctaaactggatcgtattgatgagttgatgcagaaactcggcctctcttatgacgatgacgaagaagaggaagaagacgagaagcaagaagacatgatgcgtctgctgcggggcaactaacggattgccgccatgggccttcccgttctgctgataacccttccggttatatgttatctggtgtggttattcgttaaactacagcggttgtcgcggcgacaaaagtggctgcgcaaccggctgatgacccgaaacgggcatccgccggtacgccgtagccgccagagacgccatcggaaggagtgagcatgtctgtacagcaaatcgactgggatctggccctgatccagaaatataactattccgggccacgatacacctcgtacccgaccgcgctggagttttcagaagacttcggcgaacaggcgtttttacaagccgtggcgcgctatcctgagcgtccattatctctctacgtacatatcccgttctgccataagctttgttacttctgcggttgcaataagattgttactcgccagcagcacaaggccgatcagtatctggacgcgctggagcaagaaatcgtccatcgtgcaccgctgttcgccgggcgtcacgtcagccaattgcactggggcggcggaacgccgacgtatctgaataaagcgcaaatcagccgcctgatgaagctgctgcgcgaaaacttccagttcaatgccgatgcggagatttcgatcgaagtcgatccgcgggaaatcgaactggatgtactcgatcatttacgcgccgaaggctttaatcgcctgagcatgggcgtgcaggacttcaacaaagaagtgcaacgtctggttaaccgcgagcaggatgaagagttcatctttgcactgcttaaccatgcgcgtgagattggttttacctccaccaacatcgacctgatttacggcctgccgaaacagacgccggagagtttcgcctttaccctgaaacgtgtggcggagctgaaccccgatcgtctgagtgtctttaactacgcgcatctgccgaccatttttgctgctcagcgcaaaatcaaagatgctgacctgccgagtccgcagcaaaaactcgatatcctgcaggaaaccatcgccttcctgacgcaatcgggctatcagtttatcggtatggatcactttgcccgtccggatgacgagctggcggtggcccagcgtgaaggcgtgctgcatcgtaacttccagggctacaccactcagggcgataccgatctgctggggatgggcgtttccgccatcagcatgattggcgactgctacgcgcagaaccagaaagagttgaagcagtactatcagcaagtggatgaacaaggcaatgcgctgtggcgtggtattgcgctaacgcgtgatgactgtattcgccgcgatgtgattaagtcgctcatctgcaacttccgtctggattacgcccctattgagaaacagtgggatttgcacttcgctgattactttgcggaagatctcaagctgctcgccccgttagcaaaagatgggctggtggatgtggatgagaagggaatacaggtgacggcgaaaggtcgcttgctgatccgcaacatttgcatgtgctttgatacctatctgcgccagaaagcgcggatgcagcagttctctcgggtgatttaaatagtgaatggcgcttcgtttacaaagtagaaaacgaaagcgccatcaatgtgctgagaacaagattgcctgatgcgctgggcaacaaaacctgttgaaattattgcttttgtaggccggataaggcgtttacgccgcatcagacatctgagcatgatgcctgatgcggcgctggtcgcgtcttatcaggcctacgactttctccgcatccggcataaacaacgagcttcagctaaacagcccaatcatcgcggcacacagcacggcagcaacggcagtttgcggtgtgtggctgtcaactgcgccactcgataccagattaattattgattccagcataatgactctccccgttttccgggcaagatcatactgaacttatcggaacagtaaagcgcaaaataccagcaatttgcgctcaataatcaatctttacacacaagctgtgaatcactccatccccagctcttttaacttacgcgtcagggtgttgcggccccagccgagtagccgcgccgcttcctgtttatgcccctgcgtatgtcgcaacgcggtcgtcagtaacgtccgctccagctctggctgcgcttcggaaagcagattttgatgaccggaacgcagcgctctgtctgcccactgcgcaagaagcgtcgcccaactgtccggttgcatttgcgaagtactctccgcaaccgttgattcaaacagttcgccgggcaaatcctgaatcaacacttcctgcccggcggccatcaccgttagccagcggcaggtgttttccagctggcgcacgttgcctggccacgccagacgcgtcagagcagcttcggtttccggatgcagtaacttcgcttctacgcccagttcgtgcgcggcaacctgtaaaaaatggcgcgccagacggggaatatcttcccgacgttcgcgcagcggcggcagatgaacgcggataacgttcaggcggtggaacagatcctcacggaacttaccttcctgcactcgctgttcgagattctggtgagtggcagcgataatccgcacatccactttcaccggcgcatagccgccaacgcggtaaaactgaccgtctgccagcacgcgcagcaaacgcgtctgcacatccagcggcatatcaccaatttcgtcgaggaataatgtaccgccatcggcctgttcaaaacgcccctgacgaatggtattcgcgccagtaaacgcgcctttctcgtggccaaacagttctgattcgatcaaatcttttgggatagctgccatattcagcgcgataaacggcgctttggcgcgcggactgtggcgatgcagggcatgagcgaccagttctttaccggtgccggattcgccgttaatcagcacgctaatagaagaacgcgaaagccgaccgataatacggaacacgtcctgcatggctggcgcttcgccgatgatatcggtcgttgggccgttaagctgaatattacgcggctgctgctgttcctggtaatgactgatagcgcgctcaaccagcgccactgcttcgtcgatatcaaacggtttgggcagataatcaaacgccccttgttgataggcgctgacgacagcatccagatcggaatgtgcggtcataatgatgaccggaagcattggatggcgctgtttaatctgcttgagcagcgccagcccgtccattcccggcatacgaatatctgaaagcagcacatccggcgttttgctcgccagcgcctccagtacttccgcgccgttctcaaatgtcgtacaggttaaacccgctccagcgagcgcacgttcaagcacccaacggatggaactatcgtcatcgactacccagactatccctcgttgcataaacgtcacctttatttcctgataggcaggtaaaccgagaactcggtatgccctggccaactggtaaattcaattttgcctgaatgctgatcaatcaaattacgagcgatggataagccaagcccggtgccaccttcgcggccgctgaccatcgggtaaaacagcgtatcctgcaaatgaggcggaatgcccggcccgttatcttccacatcaatccgcgccgccagccggtagcgctcgccgtgtaaggtcagttgaaacgcggtgcgggtacgcagaatgatttcaccgccttccggccccagcgcctgtagcgcattgcgcacaatattcagcaagacctgttcaatttgatccgggtcgtgcgccagttccggcaggctgggatcgtaatcacgaatcaaccgcacgttgtccggcagttccatcgacaccagcgttaccacgcgttcagccactttgtgaatactttcggtaacgcgcgtaccgggcagctgcggccccaacagacggtcgaccagatttcgcagccggtccgcctgttcgataatcactttggtatattcgagtagtgatgggtcaggtaacgctttgctgagcagctgcgccgcgccacgtaaaccgccaagcggatttttaatctcatgtgccaggccgcgcactaaatcacgggcagcaacctgctgggcgtgctgtagctgttcctgacttaagcggcgctggttatccatcggagccatctccagcaggatcatgccgtccggcatacgctgggccgtcacagaaaggatatgcgagcgcccgtcgatgaccagcgtcacttcgttatcggtaaaaccttgccccgcctccagactttcttgcatcagctcgatatttaatgagaagtagctcaacagttccggtaacggtgtaccaaacaatttgcgggagctttgggcgagcagttgttgcgcggcggggttggcgtaatggatcgccaggttgtcatcgattaacaaaatactgttaatcagcgagttgaggatctgcccagcatcgggctgcgtgcctgttgccataaagcagtctcctgaacaggttgcaccattttagtgcattatagctttttacggataaaaagcgcgaagcatcagagaattgacggagaaaaaagcccatgcagagatgggctacagatagctgacaaacttcacgttggagagcgactcacctgctccggcctaccacatcatcaccgtgtaggccggataagacgcatttgcgtcgcatccggcgtgatgtgcttgccaccgatcccaggcctgccagagacaggcgaaaagtttccacggcaactaaaacacttagacgctgtagtacagctcaaactctaccggatgcggagtcatacgcacgcggtcatcttcttcgcgacgcagtgcgatgtacgcatcaattgcttcgtcagtgaacacgccaccggctttcaggaactcgcggtccagatccagttcgttcagtgcttcttccagagagcctgcaacctgtgggatctctttcgcttcttctggcggcaggtcatacaggtttttgtccatggcttcgcccggatggatcttgttcttgataccatcaagaccggccatcagcagggcagcaaagcacaggtacgggttagctgccggatccgggaaacgtacttcgatacgacgtgctttcggagaagaaaccaccggaatacggatagacgcagaacggttacgcgcagagtaagccagcattaccggtgcttcatagcccgggaccagacgcttataagagttggtggtcgggtttgccagggcgttaatcgctttagcgtgtttgattacgccgccaatgtagtacagcgcctgctcagacagacctgcgtatttgtcgcctgcgaacaggttaacgccgtttttagacagagacatgtggcagtgcataccggagccgttatcaccgaacatcggttttggcataaaggtcgcggttttaccgaagcggtgcgctacgttgtgcacaacatatttgtagatctgaatttcgtcagcttttttggtcatggtattgaagcgggtagccacttcgttctgaccagcagtcgctacttcgtggtgatgggcttcaaccaccaggcccatctgttccatcaccagacacatttcagaacgaatatcctgagcagagtctaccggcggaaccgggaagtaaccgcctttcactgccggacggtgacctttgttaccaccttcatattgggtggaggagttccatgcgccttcgatatcgtcgatagcaacgtgagaaccggagatagatgatccgaaacggatgtcatcgaacaggaagaattcaggttctggcccgaacagtacggtgtcggcaatgccagtggaacgcaggtaatcttcggcgcgcttcgcaatggagcgcgggtcacggtcatagccttgcagggtgccaggttcaaggatgtcgcaacggataatcagggtggagtcggcgaagaacgggtcaatcactgcggtggatgcgtctggcatcagcaccatgtcggactcgttaatgcctttccagccgccaatcgaggagccgtcaaacattttgccttcttcgaagaattcagcattcacctgatgagcagggatagtgacgtgctgttctttacctttagtatcggtgaagcgcaaatcaacaaacttcacttcgtgctcgttcagcatcgtcagtacgtgttcagcggacatactttaactctcctggattggtcatggtcgtcgtggtaacgaaatctgcaattattttggccgtgtcgccgtaaaaaagataaagcgaaatctgtgccaacttttaaattgcccctaaaaggcgttatcatgcgcaccatcgtgcaaaagggctgcaccacgatgtgaatgttgcaccaatatagtgcttcaatggaaacattaagcaccatgttggtgcaatgacctttggataaccctttttatgctccgtgaaagcgatcacaaagggactctgcaatacttgtttgcggaggatgtttgtgatcctgttttgtagtgcgattaatccgtgtacaataacgcgctatttctaatgcctgaggcaaagttgtgatcgaaaaattgcgtaatatcgccatcatcgcgcacgtagaccatggtaaaaccaccctggtagacaagctgctccaacaatccggtacgttcgactctcgtgccgaaacccaagagcgcgtgatggactccaacgatttggagaaagagcgtgggattaccatcctcgcgaaaaacaccgctatcaaatggaatgattaccgtatcaacatcgttgataccccggggcacgccgacttcggtggtgaagttgaacgtgtaatgtccatggtagactcagtgctgctggtggttgacgcatttgacggcccgatgccgcaaacgcgcttcgtaaccaaaaaagcgtttgcttacggcctgaagccgattgttgttatcaacaaagttgaccgccctggcgcgcgtcctgattgggttgtggatcaggtattcgatctgttcgttaacctcgacgcgaccgacgagcagctggacttcccgatcgtttacgcttctgcgctgaacggtatcgcgggtctggaccacgaagatatggcggaagacatgaccccgctgtatcaggcgattgttgatcacgttcctgcgccggacgttgaccttgacggtccgttccagatgcagatttctcagctcgattacaacagctatgttggcgttatcggcattggccgcatcaagcgcggtaaagtgaagccgaaccagcaggtcactatcatcgatagcgaaggcaaaacccgcaacgcgaaagtcggtaaagtgctgggccacctcggtctggaacgtatcgaaaccgatctggcggaagctggcgatatcgttgcgatcacgggccttggcgaactgaacatttctgacaccgtttgcgacacgcaaaacgttgaagcgctgccggcactctccgttgatgagccgaccgtttctatgttcttctgcgttaacacctcgccgttctgcggtaaagaaggtaagttcgtaacgtctcgtcagatcctggatcgtctgaacaaagaactggtacacaacgttgcgctgcgcgtagaagaaaccgaagacgccgatgcgttccgcgtttctggtcgtggcgaactgcacctgtctgttctgatcgaaaacatgcgtcgtgaaggtttcgaactggcggtatcccgtccgaaagttatcttccgtgaaatcgacggtcgtaaacaagagccgtatgaaaacgtgactctggacgttgaagaacagcatcagggttctgtaatgcaggcgctgggcgaacgtaaaggcgacctgaaaaacatgaatccagacggtaaaggccgcgtacgtctcgactacgtgatcccaagccgtggtctgattggcttccgttctgagttcatgaccatgacttccggtactggtctgctgtactccaccttcagccactacgacgacgtacgtccgggtgaagtgggtcagcgtcagaacggcgtactgatctctaacggtcagggtaaagcggtcgcgttcgcgctgttcggtctgcaggatcgcggtaagctgttcctcggtcacggtgcagaagtttacgaaggtcagattatcggtattcatagccgctctaacgacctgactgtaaactgcctgaccggtaagaaactgaccaacatgcgtgcttccggtactgacgaagccgttgttctggttccgcctatccgcatgactctggaacaagctctggagttcatcgatgatgacgaactggtagaagtgaccccgacctctatccgtattcgtaaacgtcacctgacggaaaacgatcgtcgtcgcgccaaccgcgcaccgaaagacgattaatttcgttttttagtcataaaaaacctgccagcgatggcaggtttttttttgcctgtcgtgagcactcagcaatgcgagtatctcccttataagtctgtggttacgtcaatagagagctttgtcacaattatctgcaaagtcatacgccgttaattgctttcttttttggcgtaagcgtaagatgcctcatctggtttaaaccaaaaggattaaacaatgacgggaaatcaatccaccgtagaaaatgcaaaagagaaactggatcggtggttaaaagatggcatcactacgccgggtggaaaactcccttcagaaagagagctgggagagctgctgggcattaaacgtatgacgctgcgccaggcgttgctgaacctcgaggcagaatccaaaatcttccgtaaggatcgtaaagggtggttcgtgactcagccgcgatttaattacagcccggagctgtcggcgagctttcagcgggccgcaattgagcaagggcgggaaccttcctgggggtttaccgagaaaagccgtaccagcgatattcccgagacgctcgcgccactgattgcagtgacatcatcaactgaactctatcgcatcaccggctggggggcgctggaaggacataaagttttctatcacgaaacatatattaatcctgaagttgctccgggttttattgaacaacttgaaaaccactcattttctgcagtctgggaaaagtgctaccaaaaagagacggtagtaaaaaaattgattttcaaacccgtcagaatgccgggcgatatcagcaagtatcttggcggttctgcgggtatgccagcgatcttaattgaaaagcatcgcgccgaccagcaaggcaatattgtccagatagatattgaatattggcgatttgaggccgtagacctcatcattaatctgtaggtgttttatgatgacaataaataacgcaagaaagattctacaacgtgtcgacactcttcctctttatttacatgcttatgcctttcatttaaatatgcggctggaaagagtgttgcctgctgatttacttgatatcgcaagtgaaaataatctacgtggcgtcaaaatccatgttctggatggcgagcgtttttctcttggtaatatggacgataaagaactctctgcctttggagataaagcccgccgtctgaaccttgatattcatattgaaaccagcgcctcagataaggcatctattgacgaagccgtcgccatcgcgttgaaaactggggcatcgtccgtacgtttttatccacgttatgaaggtaatttgcgcgacgtattatcgattatcgctaacgacattgcctatgtacgggaaacgtatcaggactgcggcctgacttttacgattgagcagcatgaagatttaaaaagtcatgagctggtgtcgctggtcaaagaaagtgagatggagtctctttccttactgtttgattttgcgaacatgatcaatgcaaatgagcatcccatcgacgccttaaaaacgatggcaccgcatattacccaggtccatattaaagatgccttgatcgttaaagaacagggtggcctgggtcataaagcctgtatttcaggtcagggtgatatgccgttcaaagcgttattaacgcaccttatctgccttggtgatgatgagccgcaggtgacggcatatggcctggaagaagaggttgattactatgcgccggcgttccgctttgaagacgaagatgataatccgtggatcccttatcgccagatgagtgaaacacccctaccagaaaatcatttactggatgcgcggttacgtaaagaaaaagaagatgcaattaatcagataaatcatgtgcgtaacgtactacaacaaatcaaacaagaggcaaaccatcttctgaaccactaataagttttaactcatacgcagttaataaaaccattctatatgaatggtcggtatcttattgcctttaaaacagtgattttaaaaatcgcttaggggatgttatgctcacgaaaaagaaatgggcgttatttagtctattaacactgtgtggcggtacaatttataaattaccgtcgctgaaagatgcgttttatatcccgatgcaggaatatttccatttgaccaatggtcaaattggtaatgccatgtcggtaaactcatttgttaccacagtgggcttttttctgtctatttattttgccgataaactaccgcgcagatacaccatgtcattctcactcattgcgacaggattactgggtgtttatttgacgacaatgccggggtattggggcatcctctttgtctgggcgctatttggcgttacttgcgacatgatgaactggccggtcttgctcaagtcggtaagtcgattgggcaatagcgaacaacaaggtcggttgtttggcttcttcgaaacagggcgtggcattgtcgataccgtggtggcattttctgcgttggcagtatttacctggtttggcagtggcttattaggttttaaagcaggcatctggttctattcccttattgtgattgccgtaggcattattattttctttgtcctgaatgacaaagaagaggcaccgtccgttgaggtgaaaaaagaagatggggcatcgcaacacaccagtatgacctcggtgctgaaagacaaaactatctggcttatcgctttcaacgtcttcttcgtttacgcggtttactgtggcctgacattcttcattccattcctgaaaaacatctatctattgcccgttgcgctggtgggggcttacggcatcattaaccaatactgtctgaaaatgattggtggaccgattggtggcatgatttcagataagatcctgaaatcgccgagtaaatatttatgctacacctttatcatcagtaccgctgcgctcgtactgttgattatgctgccgcacgaaagtatgccggtctatttagggatggcatgtacgctgggctttggcgcgatagtctttacacagcgagccgtattttttgcacctatcggcgaagcaaaaattgctgaaaataaaacaggcgcggcgatggcgttgggtagctttattggttacgccccggcgatgttctgcttcagtctgtatggctacattctggatttaaatccggggattattggctacaaaatcgtgtttggcattatggcctgcttcgcattctgtggtgcggtggtttccgtaatgctggttaagcgtattagccaacgtaagaaagagatgctggcggctgaagcttaattaatggccggatgtgcttaatccggccaatgaaaaccgtatcaaccgtaggccggataaggcgtttacgccgcatccggcagtttcacatcagaagaaatacttcgtcccgatacgaatctggttttgctcgcggtggtacggttcgacattacgatctaaccagcgtaattcgaaataaggcagccagtgttcattaatgcgataacggaaggtgttagtgatttcccagtgatgatcttttccattgctgctattaaagtcatttacgcgtataaaataatgtggctcaaatgtataggagaacttatcggtgattttaaaattccagtaggtaccaatttcataggtgtcattattatccagttccccgctcaaatctgttgaactatagttattatggttatagcgatttcgtactgtcagattaaaccatggtacaaatttatagttgacgtccagatacactgcaccacccgaaccgatactcttatcattaattaagccaccgggctggatggttaatttatcggttggtttaaataacggataccaaccttcgatttcgttatatccatgttttagttcatcttctcgctgaaaggtgtaggtattggttaacataatacccgcgcccatatcgaagttataacccacacgtagcataacctcgccctgatcggaggcgagattatatgcctccctgttttcgacgtatgcgccagcgaatactgaggcagaggtcaaagaagataataaaattattgcattaatatttttcataataagtccatttttaaacgtagggaggccgccacccaccaggatggaaatagcggctattgacatttataacgttacggaagccgttttttcttctgtctcaatttctttatttttgcgttggttgatttcctcaataatcaacgcaaaccgtttttcattgagtgtgtaaaagaatcccatcgtcaatgcagcaataattgccagtgcacaaggccagataaaaatgagctgacgcaaaccctgtaatgtcgcatcactttgcgcgatgttgggaacataaccgatttgcgtcagcataatgcctggcaagaagccagcaagtgcggcagaaattttacgaaagaaggtataaccggtataaacagaaccttcggcacgaataccggttttccattcaccgtaatctacggtatctggtaccagcgcccagttcaggctgtttacaaaggccgtgccaaaaaaggcgacacaagagaacatgacgaaagtgaaagagttacttccccagaaataattcaggatatcaccaaccgcccatagcaccatgccagctaaataaacctgttttttaccaaaacattttacagttaatggcaccagtaatacgccgacgaggatgcatcccatactgaagaatcccatccacgacaataaattaatatcattcagcacatactgggtgtaatagacctgaatcgccagtttgatattaaatgccgccagggtacacaagttagcaatgcataaaaccagcaatggcggattccgaaatatcgcgcaaaaagatttgagaatactggctttatgtccggttggtgctgtgtccacataatgctctttgacgcctctgtagcacagcatcataaaaataaagccgccaatggagaacataagtgccgcacaggcataaccgacggttgagtcagaaaaaagcgactgcaacggaataaacgccacggtacaaatcaatagccctatggttgcaccaccctggcggtaagccgcgagctgcgcgcgctcattcgggtttttggtaattgccgggatcatcgcgccatacgagcagttcatcagactgtatgaaagcccaaacatcataaacagcgccgtggcaatcgtcgttttaaccggcaaactaaaagtggtggcgataaactggagcgttgcaattaacgccgccggaaccgctgcatataaaataaagggacgaaatttgcctttaggcccaatatttttccgcgagtcgagtaaaaatccggtgagcatatcggtaaacgcggtaaaaaacttcgccaccagaaagataatcccgccatagtaagctggcatccctaattcatcggtataaaatttgaggagatacagagtaccgatgctaagcattaaattcgaaccaacgtcgcccataccataggcgattttttcccacagattcagttttaatgtcagtggattatggtcagacataatcactccttataacgccccgcagggcgtcgtttattattacgccgtgcgtttacgggcttctatttcttcaacaatgcggacatacatcttctcgttcaggctgtagaagcagcccatcgctacaatggtgactaccgccagtgcgcttgggtagatgaagatcagctggcgcaacccttcaatggtgtggtcagcctgtgcgacgttcggcacatagccaatttgcgtcagcatccagccggggaagaaacctgccagcgcctgagaaactttgcgaaagaaggtgaagccggtgtagaccgtcccttcagaacggacaccggtgcgccactcgccgtactcgacggtgtcagaaaccagcgcccagttcaggctgttaacaaacgccgaaccaaagaacgccaggcaggagaaagccacaaagttgaccgagccgccgccgaagaaatagttgagcagatcgcccagcacccagatcagcagaccgccaatatagaccttcttcttaccaaaacgcctgactgcaccaggcatcaggaacacgccgatgaaaatacagcccatgctgaaaaatcccatatatgacaacaggatgggatcgttaagcacgtactgggtgtaatagacctgaatggcgagcttgacgttaaacgcccctaaggtacagaggttggcaatgcacaaaatgaacagtgggcggttaccggcaattgcgcggaaagattgcaacaggcctggcttttgcgccggattggtaggttgggtttcgacataacgctctttcacgcccgaatagcagatccacataaacagcaggccaaacagtgaaaacagcgtggcggcgaagatatagccaagttgctgattaccctcgataagattcataaccggcacgaatcccaccgtgcacagcagcaggcccagcgtagcgccgccctgacgccatgctgccagcgaggcgcgttcgttggggtttttggtaatggcgggaaccattgcgccgtaggagcagttcatcatgctgaaaaacagtccgtaaagcataaacagaatagtggccatcaccgttttaccggtgacatcgaacggtgtgccgataaagttagcgattgccaataaggtaaccgggaatgacgcatacagaataaaaggacggaatttaccttttggaccgatcttgcgtcgggaatccaacatgatgccggttcccatatcggtaaaggcggtaaagaatttcgagatcaaaaagataatgccgccataggtgccaggcagccccagaacgtcggtataaaacttcaaaagataaagcgtaccaatatccagcaggatgttagaggccagatcgccgataccgtaagagagtttctctttaaagggcaggcgcaaagttgccggatcttccgttgtgatgtgactcatcgttattctccatttgcccgtgagtttccccacgggcgggcatgattagatgttttttaacgaggcgaacagtgcagcccattcgctgtcggcgcgataaaagaccggcggcttgccgatgggcgcattaacggtaacttccccgccccggaacgcttcacccgtccaggcgtggacccagttatcctccggcagatagagcgtccagtcgctacggccttcttcatgcaccggagcgaccagaatgtcgcgacctaacaggtactgatatttcagggtgtaagtgtgcgcatcgtcttcataatgcaggaacagcgggcgcataaccggcaggccggacttcgcattcagcgcgacggcctctttcaggtaaggtttcagggtggtgaagacggtggtcatacgggcgaaatgggcgatggtttctgcgtcgccgtcaaactgccagttgtcgccaggacggttaccttcgtgggtgcgcatcatcggcgtgaaggcgctgaaatcgcaccagcgcagcagcagctctttgctgcgcttcatctcaaacagggtggtgtaaccgccaatgtcgctgtggtgcaggccatgtccggtcattgccagcgacagcgccgccgggacaaccgacgccaggccatcgtcgagactccagtcgacgttctggtcgcccgcccacatcatggtggagtatttctggctaccggtagaaccggcgcgcataaagaaaaggatctcgccgagcttgcccgtttcttcaagggcttcgtagttacacttcgcccacagcgcaggccaggcgttatgcataatttcggcactgacgccgttatgcaggtacgtgtcggtgggcagatactcgccgaagtcagccatccagccgccgcagccgagttcaatcatgttctttttgatcacttccttgaaccaggcgtaggcttctggattagtgagatcgacaacgccgccgtaaaactcgccaaactccaccagatagtcaccgccagaggcatcttttgccagatagccgtgttgtgccgcttcttcgcagagatctttatcgctggcaacatacgggttgatataggccaggaactgcacgccctcctgattccactgcttaatgcgtgaatccagttgcgggtagttttcgctgttccacttccagttccacatcacgcgtttgccaaaagaggtcatacgaataccggaccagtcctgcgcccagatgccgttgaccttcacgcccgcgttacgcatggtgtccagtttcttctggcacacttccgtcccgccctgaatgccgagcgttactccgtcataaatccagtcgggcagttctggctggcgtcccagcagggcggttaatttttccagcagggaaatgtatgtgtcagcacattcaaaacgcagcgttgctttgtcttcccacagcgccagttcatggtattccggggcactaaagtcgaagttcatatagcaactgttatcaacatggcagtaatacttctgcgtgctgacaaacgtaggctgtgggaagaaagtccagtaatagtcgccgcccgcattttctttgcagtcggcctgccaggtgacataggtttgtttgttgcgaccaacgccttgttcactggtccatagcgggaacggtttgccacgcagatcgaagtaggaaaactgttcgccgcagccgtagatatggtcctctggttgagcggcaaggcgcagccagatacggttgtggttaaggttgtcgttttgtagttccagcaataaacgcccctgatcgtcggcagagatattcagcgtggcgctaatgtcagaaccacggctgaaatgaattaaccaaccatccggtgactggctgacgatggcgtcggtaagcgcaattttctcctgtagtttatctttaatgctgaaattaccgcggaacatatcgatatccgctatacctgagccaatccataaacaaggattatctttgctatgggttaaaataagacgttgttgaaaatgtagggtaaaactgtcgttattctgatgaaattgaaaatctaataactgtggacgtggcgtatccataactaatctccatagagttgagaacgagattgttgccttcctgttattacaggcttatgtaaaatgattctcataaaactgatatataaaaactttacagaagctgagctgtttttaacttaataaattgaagatacataatgttgcctttagcgagtgaaatgttcttcaatgattttgactgctaatcaatacaagttattttctctgtccgtaaatattaaaaaacaggcggtgcggttttcctggttccagtaataataagtcgagacctgaattaaaggcgttaggtgggcaactcataggttcaactgccagtccctgacgctgtaatttttcgccgctataaatctgcacccagggttgatcggaacaaaggcttaccgaaagcgcctgttgtggatgggtaatggttatttcccacagatcattagcggttttaaaggtgtggtcgatttttgtcgcggctatttttttcgcctgcgtgaaatttaaatccagctcatcaacgtggtgaagcgttgtcggattagcgtgctcatcgacggcataaacctggtttgccggaagctggaacagatattcatcaacagatgttaagttgcaggttaaataaggatgaatacccacaccatagggtgcggtcacagtaccaatattctgacttgcgatctcaacggaaagacccgtgcgtgcattgagcgaataaacaacctgcgaagccagcataaacggatagccgtaactgggtggcagaaaagctgtcagggtaacgctggtggcggttaattcgctgatttgccagtcacgccaggcgagcagcccatgaatagcggcttttgaaccatgttcattaatgggtaactgatattcctgcccctgatagcgataacagccgttggcgatccggttcggccacggaataaggactttgcccagatgtgccagcggcatctcttcgggtttatgtggaataactaaatgacagccctgaaaggttaattcagccagacctgcaccgacggtcacaatggtcgcgtgataatcccccgcggcaagtgaaacggtctgtccactgcaatgcatgttggtgatttgcatacgaggtacctttattgaataacgacatacccggcgtgcagcctgatatgtcgtttttttttagtcagctatttcgcgttaatatccagcagacccgccgcaactgccggagccaggcctggcgctaacgggatacgcgggatcaccaggcaatgcagcaggtgataaatatcctgtttaccgtcccagactttcgtggtgactttattgtccgcatccagctcctgccaccaggaaccattttcatagtccatcaggtacttaatgcagtagtcccaccatgtctgataccaggtttcatactggcgatcgccggtgacggtgtagagcgcgtaggccgtacccatcgcttcgacgataggccaacgcacacgttcgcggaccaccggttttccttcccagtcaacggtataaacaatcccgtccgcaccatcgggtgcccaggcatcacgcacggtggcgttaaacagacctttggcatcttctagcagccatgctggcggttgttcgcaacgggcttccagggccgcgtggatgtgcagcattaaacggccccattcgatccagtggcctggtgtacctccgaacgcgcggaagcggtgcgccgggttatctttgttgtaatccggcagcggattccactgggtatcgaagtgttcgttaacgcgataatgattatttcttgcgacgtcgtggataatcacggaagccacgcgaatcgcgcgatccagccattttttgtcatgcgttacgtcataaacaattaagaaagcttccactgcgtgcatattggcattgccgccgcggtactcttcggttttgctgaaggcttcgtcccaggactccaggcacatctgctcttcttcgctccagaagtatttctcgataatttcaatggtgtaatcgagcagcttgcgcgcttccggatgaccggtagtgacggcgctggcagcacccagcagagcaaagaaatgttgatagccctgtttggaggcatccaccacgccctcgtcattcacacaggcataccagccgccatattttttatcgcgcagtgcgccgttcatggctttaataccgtgatcaaccaacgagtaagcgccaggtcgacccatcgccgcagcaacggaataaacgtgcaacatccgagctgtgatccacagatgggtgcccatctcttctttgatttgccctttattgcctaaccagccaaatccagtcggtactacggaatttttaccaaaatcaaagatgcgatcggtttcctgttccagccaacggttgtgacttaaagtgttaaaccatttcatttttgtatccccatcttaacggcgtttagccatcatttcgtcgacgatatcgcccagttgttgtaatttcggtgcacaaacgtcacgcagcatcagctcgttgtctggtaaaccgacgaccgatgcccagacggcacgaccagccaggaagcccgatgcacccgctgtcattgccacgcgtacggcacgcgggaacagtttttcgtcgacaccggaagagaggatcacccacggcatattgatatggtcattcagacgttgtgaagcactgagaagctcttgttgcggacctttaccgtaaagcggcatttcaactttgtagaggtcagcgccactgtcgcccagctctttggcagcatcgatgatcgcttgttcgcgatcgaatttatcgccacgacgtggtgggcggacgactggctcaataatgcttaccaggccgtgtgagtggcacagttcgttaaactctttcaccatatccaggcgttgctgcgcatcttcatcactacgccacagcaccagcagttttaaggctttgccaccgtcttgtttgatctgtagcggattgattttgcggtcaatgaccacgctatctaccggaataccgttgccaggaatgaactcatcggcggcgacaatcatggcgcaacttttggcaatcgcgttttgctcaaccacctggcggtaacagaattgttgatctaccagaatcgccgaggcataaggcgagagggtcttcgccgcgttaactttgaaatcagttaaaacgctatcggctaccggagcgggtgccccagccgcggcaaacatcatgcgcatggcttcgcgctgatcgaccgccagcatggcaaaaccgcccgatgcgcgcgtaatgtcgttgatggtgtacttattcattcatttattcctttatccagtcgttacatttttactttggcagtcatcccggcactgacacggacctgttccagaatggcggaccagtcctggcgaccgcgacccgctgcgcgcgcctggctataaacctcccgtgaggcggcccccagcggcattggcacatgcagctggttggcgacatcaagggcgatgccaagatccttatgggcaagatcgatcatgaaggcgggagaaagatctccgctgaggactttgtttggccaggaagtggtgaagtggcctttaccggcggcggtaccgctcatcactttgacggcaacatcgaagggaagattcagggcttcgcacaaaacggcagcttctgccgaaagcgcattgagcgcgatgctcatatagttgttgatgagcttaacgcggatccccatgcccggaccgccagcgttaatcaactcactgcccatcgccatcaggatcggcgtggcacgttcaacttgttcagcggtgccgccagccagcagtaacagagtaccggtaatggcatttgcagaagtacggcctaccggaacatccatcatgctgaagcctttggcttgcatatcggcaatcaatttatcggtttgcagcggatggatggtcgacatatcaatgaccagcgcatcggtagataagctttcgcaaacgccgttttcaccgaacaacacgctgcgcaccagatcgccattcggcaacatggtaatgataaattcggcatctttagcggcctgcgccgggttggcggcgggagtcgcgcctttgtctaccagatgccgcacagcctcggcattcacatcaaagacgcgaagttggtgcccttgctgcaataaattgctcgccattggcgaacccatttgtcctaaaccgataaacgcgattgctgccataaccttctcctgaatacagcgatgtcactttttgtcatttatgacacgctttgattgtctgtttttgatcgtatttgtaatttatagtcaaaaaattgacagccgtcactttttaaacaattggtgaaattaaaatgaacgcatcccaaaatgtttaaggaatgaccatgattcgtgttgcttgtgtaggtataaccgtgatggatcgcatctattacgtggaagggttaccgacggagagcggtaaatacgtggcgagaaattatacggaagttggtggcgggccagcggcgacggcagcggttgcggcggcaaggctgggggcgcaggttgattttattggtcgcgtaggtgatgacgacacgggcaacagcctgctggcagagctggaatcctggggcgttaacacccgttacaccaaacggtataaccaggcgaaatcatcgcaatccgccatcatggtggatgccacaggcgagcggataatcattaactaccccagcccggacctgctgcctgacgcagagtggttggaggaaattgatttctctcagtgggatgttgtgctggcagatgtacgctggcacgacggcgctaaaaaagccttcactctggcccggcaggcgggcgtgatgaccgttctggacggtgatattacgccgcaggatatcagcgagctggtggcattaagcgatcatgcggccttttcagaaccgggtctggcgcgcttaacgggcgtgaaagagatggccagtgcgctaaaacaggcacaaacgctcacaaatggtcatgtctatgtgacccagggcagcgcaggctgtgactggctggaaaatggcgggcgtcaacatcaaccggccttcaaagttgatgtgatagataccacaggtgcgggtgatgtttttcacggcgcattggcggtggcgctggcaacaggtggggatttagcggagtcagtccgcttcgccagcggtgtagcggcgttgaaatgcacgcgtcccggtggacgagccgggatccctgactgtgatcaaacccgatcttttttgtcactttttgtataaaatgccaggatgatggtttttcgaggaattttcatgagccttaccgaactaaccggtaacccgcggcacgaccaactcctcatgctgatcgccgagcgtgggtatatgaatattgatgagctggcaaatctgctggatgtctccacgcagacggtgcgccgggatattcgtaaattaagcgagcaaggcctgattacgcgccatcacggtggcgcgggtcgggcttccagcgtcgttaatacggcgttcgagcagcgtgaggtttcgcaaaccgaggaaaaaaaagcgattgccgaagcagtggcagactatattcctgatggttcaacaatatttatcaccattggtacgaccgttgagcatgtcgcccgggcgttacttaaccataatcatttgcggataatcaccaacagcctgcgtgtggcgcatattctttaccacaacccgcgctttgaagtgatggtgcccggcggtacgttgcgctctcataatagcgggatcattggcccttcagcggcgtcctttgtggccgattttcgtgctgattatctggtaacaagcgtaggcgcaatcgagagcgatggcgcgttgatggagtttgatgttaacgaagctaacgtggtgaaaacgatgatggcgcacgcgagaaatatcctgctggtcgccgatcacactaagtatcatgcttcggcggcggttgaaattggtaacgtggcacaggtcaccgcgctctttaccgacgagctgccgcccgctgcgctaaaatcacgcttacaagacagccaaattgaaatcattcttccccaggaagacgcgtagatttttgtgaccgttgacctggcttcataccttgccacatagccaaacccatcctttcccgctacagttaatttcttgtggcgcgaaaggaggcaaaaatgctctatatctttgatttaggtaatgtgattgtcgatatcgactttaaccgtgtgctgggagcctggagcgatttaacgcgtattccgctggctacgcttaagaagagttttcatatgggggaggcgtttcatcagcatgagcgtggggaaattagcgacgaagcgttcgcagaggcgctgtgtcatgagatggctctaccgctaagctacgagcagttctctcacggctggcaggcggtgtttgttgcgctgcgcccggaagtgatcgccatcatgcataaactgcgtgagcaggggcatcgcgtggtggtgctttccaataccaaccgcctgcataccaccttctggccggaagaatacccggaaattcgtgatgctgctgaccatatctatctgtcgcaagatctggggatgcgcaaacctgaagcacgaatttaccagcatgttttgcaggcggaaggtttttcacccagcgatacggtctttttcgacgataacgccgataatatagaaggagctaatcagctgggcattaccagtattctggtgaaagataaaaccaccatcccggactatttcgcgaaggtgttatgctaaaaaccattcaggacaaagccaggcaccgtacccgtccactatgggcctggctaaaactactctggcaacgcattgatgaggacaacatgacaaccctggcaggtaaccttgcctatgtgtcgttgctctcattagtgccgctggttgccgttgtttttgcgcttttcgccgcttttcccatgttttccgacgtcagcattcagttacgtcactttatttttgccaactttctgcctgctactggcgatgttattcagcggtatatcgaacaatttgttgccaattccaacaagatgaccgccgttggcgcgtgcgggctgatcgtcaccgcgttattgttgatgtactccatcgatagcgcgttgaataccatctggcgcagtaaacgagcgcgaccaaaaatttactcgttcgccgtgtactggatgattttaacgctggggccgctgctggcaggggccagtctggcgatcagttcctatttgctctccctgcgctgggcgagcgatctcaatactgtcatcgacaacgtgctgcgtatttttccgttgctgttgtcgtggatctccttctggttgctgtacagcattgttcctaccatccgcgtacctaaccgcgacgcgattgtcggcgcgtttgtcgccgcactcctgttcgaagcaggaaagaaaggtttcgcgctttatatcaccatgttcccgtcatatcagctcatttacggtgtgctggcggtgatccccattctctttgtttgggtctactggacatggtgtatcgtcttgcttggcgcggaaattactgtcactctcggggaataccgcaaactaaaacaagcagctgaacaagaagaagacgacgaaccatgattgcattaattcaacgcgtaacccgtgccagcgtcaccgtggagggagaagtgacgggcgaaattggcgcgggacttttggtgttattgggtgtcgaaaaggatgacgacgaacagaaagcaaaccgtctgtgcgagcgtgtgctcggctaccgcatctttagcgatgccgaaggcaagatgaatctcaacgtgcaacaggcgggcggcagtgtgctggtggtttcccagtttaccctcgccgcagataccgaacgggggatgcgcccaagtttctccaaaggtgcatcaccggatcgcgcagaggcgttatatgactatttcgtcgaacgctgccgtcagcaagagatgaacacgcaaacaggacgcttcgctgcggatatgcaggtatcgctggtcaatgatggccccgtgacattctggttgcaggtatgagccagcttccagggttgtcacgggaaacaagagagagtatcgctatgtatcaccttcgggttccacaaacagaagaagaattagagcgttactatcagtttcgctgggaaatgttgcgtaagcccctgcatcaaccaaaaggttcggaacgcgacgcgtgggatgcgatggcgcatcaccagatggtcgtcgacgagcagggtaatctggtggcggtaggccgactgtatattaatgccgacaatgaagcgtccattcgctttatggccgttcacccggacgtgcaggacaaagggttaggaacgctgatggcgatgaccctggagtcggtggcgcgtcaggaaggcgttaagcgcgtgacctgtagcgcccgtgaagacgcggtggagtttttcgccaagctggggtttgttaatcagggagaaatcaccacgccaaccaccacgccgattcgccattttttgatgattaagcccgtcgccactctggatgatattttgcatcgcggcgactggtgcgcgcagctgcaacaggcgtggtacgaacatatcccgcttagtgaaaaaatgggcgtgcgcattcagcaatataccgggcaaaaatttatcactaccatgccagaaaccggcaatcagaatccgcaccatacgctgtttgccgggagtttattctcactggcgacgctcaccggttggggacttatctggctgatgctgcgtgaacgccacctcggcggaacgattattcttgcggatgcgcatatccgctacagcaagccgattagcggtaaacctcatgcggtagccgacctcggtgccttaagcggcgatctcgaccgtctggcgcgcggacgaaaagcacgggtgcagatgcaggtcgaaatctttggcgacgagacgccgggtgcagtgtttgaaggcacgtatatcgttctgcccgcgaagccatttggcccgtatgaagagggcgggaacgaagaagagtagctgatggagaggggcggtgctgcctctctcattcaggtcatttatattagtccttggctatttcggttatattaaataagaactctataaatttttattcttcgttggctccatacgtgtcttgctacatcactgttcaggagcatttaaatattatttgtagaactgagtggcaattatcgcagataatgcttaattcatcatcttagttcatgtttgagcgatttttgatagtcaaaaccccctctggtgccatacttttctcataaatatttttaaaatctatagctaacaaatattatgcaaagataatggactagcatcattgtcagtatcattcatttactgctctgtatgttatgaataattatgttgtatgtttgctcttaaaccgtgggaaggaggctataatggttgccaatattaatctcattaaacaagaaagttattctgttgttaatttagaaaaacaactttcccgaactgttaccaacaaaattataacgatgagcaagtaaagaccggttggtggcagtactgaccggtctgtgatgaaagattaatttcaccttaaatcctggtgctgttaggatgctgacgtttttcggctacaccattcagattatgcaaataaatatctctgaatataatatattcatagcacccataattcatcctgggcgataactaaaccatttttgagtaataaatgaaacaactgcaacactcttattatttctggaaaacgcctcgcaaaaaaaaaacaacatgcaaaaatccgctttttttaaatgattttccggcgtaattttcgcacatacattaatgagtaatatatgtaaggtattggtaatggcgatgaatacggtttttcttcatttatcagaagaggcaattaaacggctgaacaagcttcggggctggcgtaaggtttcacgatctgcaattttacgcgaagcggtagagcaatatctgaaacgtcagcaattcccggtgcgtaaagcaaagggaggcaggcaaaagggggaggtagttggtgttgatgatcagtgtaaggagcataaggaatgacaaaaatttttcattcttgaatataaaaaacagatgcccttattctggtattaatacaaggctgttttacttgaacttatagtaactgcaactgttacatcatatctggaaaacgcctcgcaaaaataaaaaatgatgcgtaaatgagctttctttaaagattcggcaagggtacttttctctccatagattcaaaaatgatattggcgagatatttatgaactctctggcaggtatagatatgggcagaattttactcgatttatcgaatgaggtgattaagcaacttgatgatctcgaggtgcagcgtaatcttcctcgtgcggacctattaagggaagcggtagatcaatacctgataaatcaatcgcaaacagcaagaaccagtgttcctggcatctggcaagggtgtgaggaagatggtgtcgaatatcagcgtaagctgcgcgaggaatggtaatgggaaaaaatgatgtcaatcagattgctgacaacgtgcgcgttgttcatgccggatgcggcgtgaacgccttatccggcctacaaagtcgtataaattcaatgtattgcagtttattggtaggcctgataagcgcagcgcatcaggcaatcttacgcttgtcatcagtctcatgcccataaccttattgatgtggtggtgggtaaattgaggccaaaccggcactggcggcatagcttgaggtggtaacgcggaatacgagagatggtgtcgtcacaccctatgagctgtaatccgggcgacctgcgccacccggaaaacgtcagagattactctccttcacccggaaacaggaacgggttgatggaactgcgggcatagccttcttgctccattcgtgcgtccagtaccagagaggcgaggtcatctgctacggcttcgatttttggatctttttcctgatagagaattttcaggtaagtgccgcagtcatcgcagctttcggctttaatcgcggcctgttcgtcatccagcgaccagtaatgcagtttgccgctctgctcgcagttgctgcattttacgcgcactacgtgccattcggtttcacacaggttgcagtgcaggtaacgcagaccctgagtggtgccaatttgcaccatgctggacaccggcatagaaccacaaaccgggcaatattgacgttgctcgccgtattcagcgcgggctttgccggggatcagattggccatctgcgcccagtagagcgacagtgcagcccagataaacggcgctttatcgctgctgacggatgagaaatcagaggcaaacagtgcgctggccatatcttccagctcctgagtcgatgccttctccagattctcaatcactgccagcgccgggccgctcatttcaggtttcagctcagcaatcagcgccatcagcagcttttgccagtgcttatcacgcggcagaacgtgaatatccagcgggggcttgccctgtgcgctggcttctttaatgcgcgcggtcagatccatctccagcggatggtcgtacagcaccacttcctgggcgtgggcgataagcgcagcaaagcgcaggtaatcacccagcggattattttctgccagctcgcgcagacgctcggcgcggcggttgtataaattcttgagccgagggaacaataacggcggaatcatatccgccgtacgtttctcgctcgaacccagctcatcttgcgggattatgcgaatactcattcagctttcttttccgttgtcttgcggacctcacggtaccagcgcgggtgatgtttcttcgcccaggcgctggtaacccatccttccaccatggcggtaatcgtgcctttcacccaaagggcggcgtagatatgcaccatgataaccacaattaacgccactgcggcaaatgaatgcagcattaacgcgaatcggatcaccgggattgagaaagcaggcgcaaaataaggacgccagataatcacgccgctcaccagcagcagaaccaggaaaataatcgccgcccagaaaacgcatttctgaccgaagttataacgcccggtgtcacctacttcctcgttgacgacgatcttacgaatattcttcgcccaaaagatatcatcccgattgattaggttgtgatgccagtaacggaaaaacatgatgatgaacgaggcaaacataaccacgccgacaaacgggtgcagaattcgcgccagctgcggtgtgcccatgatttgcatcaaccagttgaaggacgggaacaaaaagcccagcccgctcaccgccgccaggatgaagcagaaggcggtgatccagtggttgatacgttccggcgcggtgtagcgcacgatggtgtcacgtcgtttcatttgcgctcctcgtctttctcttcgtgcagattattctcttcctcatccgcacggttcggaccgacacccacgtagtggaagatactggccgcaaaggtagccgcaaagccaacagccgcgagcggtttccagatgcctttccagaatttcacggtttcgctgatttccgggttctccggcaagccatgatacagatttggcttgtcagcatggtgcagcacgtacatgacgtgtgtaccaccgacgcctgctggatcgtacagacccgcattgtcgtaaccgcgggttttcagctcagcaacgcgctcgctcgccagcgttttcatcgactctttcgtaccgaagtgaatcgcgcccgttgggcaggtcttcacgcaggctggttcttgcccaaccaccacgcggtcaacgcacagcgtacatttgtagacgcggttgtcttccgggttgaggcgcggaatgtcgaacggacagcccgcaatgcaataaccgcagccaatgcactgctcggactggaagtcgacgataccgttggcatactgaataattgcaccttccgccgggcacgctttcaggcagcctggatcggaacagtgcatacagccgtctttgcggatcagccattccagtttgtcgttctgctccacttccgagaagcgcatcaccgtccacgatttggcgcttaaatcattggggttgtcgtacaccccaatattattgccgacggtatcgcgaatgtcgttccactctgaacacgccacctgacaggctttacagccgatacaggtggtgacgtcgatgagtttcgccacttcttcctggaagtcccgcgcctgaggcgcgggggtcagaccgttagtcgcggaacgacgaatgatatcttgagattgataagccatatgtcgtctccgttacaccttttccacattcacaaggaaggacttaaactccggcgtctgcgtgttcgcatcaccaacgaatggcgttaacgtattggcaataaagccttttttagctacgccttcataaccccagtgaatcggaataccgatggtatcgatatctttgccgttcgctttcagcgtacgaatacgtttggtcaccaccgctttggctttgatatagccacggttggaggagactttcacggtatcgccctgggcaatgccaagtttattcgccagcgactccccgatttccacaaactgctctggttgcaaaatcgcgttcaacagcgcgtgtttggtccagtagtggaagtgctcggtcagacgataggtggttccgacatacgggaacttatcggctttacccaatgcttcggcgtcgtctttaaagatacgtgcagccgggttcgagataacgtttggatgcagcgggttagttcccagcggcgtttcaaacggctcgtagtgttccgggaacggaccttccgccatcttatcgagggcaaacagacgccccatgccttcctgctgcatgataaacggcccgacgccgctgcccggaggcgctgcgctgtagtccggaatatcccagccggtccacttagtgccgtcccatttcagcaactgacgcttcggatcccacgggttaccctgcggatctgcggaggcgcggttatacagaatgcggcggttaagcggccatgcccatgcccagcccagcgtgttaccgaggccagacggatcggcgttatcacgacgcgccatctggttgccttccggcgtccagctaccggcgaaaatccagcagccacaggaggttgtaccgtcatcgcgcaattgggcgaacgagctaagttgttggcctttcttgacgataaccgcaccggttgccggatcggtaatatcggccagcgccttaccgttgctctccatcgctacttcttccgacttcggctcatgcggaatggcgtagttccaggtcatgttcagcacctggtccgggttcgcgccaccctgttcggcatacaacttgcgcaagcgcaggaagataccggagaggatctcgccatcagtcagcgcaatccccggggcgtccgcacctttccagtgccactgcaaccagcgacctgagttaacgattgaaccgttctcttctgcgaagcaggtcgatggcagacggaacacttcggtctggatcttcgacgagtcaacttcgttcagctcaccgtggttctgccagaagttagaggtttcagtgttcagtgggtcgatggtgacgaggaacttcagtttcgacagacaaccgatcactttgtttttgttcgggaatgaggcaacagggttaaagccctggcagatatagccattgaccttgccctctttcatcatctcgaagtactgcaggacgtcgtagcctttatcccacttcggcaaccagtcaaagccccagctattttccgccgtcgctttatcaccaaagaaggccttcatcatagagacgaagaatttcgggtagttgccccagtagtttacctggccttccagcagcggttttggcgtgttggcggtaaggtaggtttgcagatcggtctgcttctcgcttggcagcgtcatgtaacctggcagactctgcgacagtagccccaggtccgtcagcccctgaatattggagtgaccgcgcagggcgttaacgccgccgcctgccatccccatattgccgagcagcagctggatcatcgccatcgtacgaatgttttgcgcaccaacggagtgttgcgtccagccgagggcatacaggaacgaggcagttttatcgtgagcactggtttctgcgatgtattcgcagactttcaggaacgcgtcttttggcgtaccacagatgttttcaaccacatctggcgtgtagcgggaaacgtgctgtttcagcaagttccacacgcagcgcggatgttgcagcgtggtatcgcgtttggcgaagccgttttcgtccagttcgtaagtccaggaggatttatcgtacttgcgtttttccgcgtcatagccggtgaacaggccatcttcaaagccgtaatcctcacgcacgatcaggctggcgttggtataggcttcggtgtattcgcggttgaatttttcattgttcagcaggtacagcaatacgcctgacaggaaagcaatgtcagtaccggaacgaataggggcatagtagtcagccaccgccgccgtacgcgtaaagcgaggatcgatcacaatcagcttcgcgccattgtgaattttggcttccatcgcccagcggaacccgaccgggtgagcttcagcggcgttaccgcccatcaccacgacgaggttggcgttcttgatgtcgacccagtggttggtcatcgcaccgcgaccaaatgttggagcaagacttgctaccgttggtccgtgtcagacacgcgcctggttgtcgaccgcgagcatacccagcgcgcgggagaatttttgcgttaaatagccggtttcgttactcgacgcggaagcacacagcatcccggtggagagccagcggttaacagtcacgccttcggcgttttgcgcaatgtagttagcatcgcggtcttctttcatcagtttggcgatgcgatcaaacgcctcttcccaactgatttgctgccatttatcagaacctggcgcacggtattccggaaacttcagacggctttcggagtggatgaaatccaccaggccagcgcctttcggacaaagtgcaccgcggttgaccgggtgatccggatcgccttcgatatggaagatagatgctttggcgttttttgctccgtcaccgaggctgtacatcaacagcccacagcctacggaacaataggtgcaggtattacgggtttcgcgggtacgcagcagtttatactgccgggtttccgcgagtgctacgctgggtgcaaaacccagtgccgctgccgtggtgcctgccataccgccagcgcagatcttaaagaactgccttctgctgacctgcatggattgctccttgtttcgacattgtcacgtcccatttacattcgcttgctgcgtgtgcagggagtgggggttatttttctttgcggaaggggccgcaaaggtccagaattggctcaatttccctccatccaggaagggtttgtaacagaataccataatgttggtgtgtgtgttcttatctggttaagagaaagtgaaaaaaacacagcgaaaagaaatcgaaaatgtgacaaatatcacaggtgctcgtcaaattgagttatggcggcgtgatgatttacaacacccacggttagatgaggtcgcggaagaagttcccgttgcgctggtctacaacggcatttcgcatgtggtgatgatggcgtcgcccaaagaccttgagtactttgcgctcggtttttcgctttccgaggggataatagaaagtccgcgcgatatcttcggcatggatgtcgttccttcctgtaatggtcttgaagtacaaattgagctttccagccgccgctttatggggttgaaggagcgccgccgggcgctggcgggacgtacgggctgtggcgtatgcggcgtggagcaacttaatgacatcggaaaaccggtgcagccgctaccgttcacccagacgtttgatctcaacaaactggatgatgcattacgtcatctcaacgattttcagccagtggggcaactgactggttgtactcacgccgctgcctggatgttgccatctggcgaactggtcggcgggcatgaagacgtgggtcgccatgtggcgctggacaaactgttaggccgccggtcacaagaaggggaaagctggcagcaaggtgcggtactggtttccagtcgtgccagttatgaaatggtgcaaaagtcggcgatgtgcggcgtagagattttgtttgcggtgtctgccgcgaccacgcttgctgtagaagtggctgagcgttgtaatctgacgctggtgggtttttgtaagccgggtcgggcaacggtttatacccatccgcagcgtttgagcaattaattaaaataagtcctgcgatatatattaaattgcaggacttattcatttcgtgaattttattattttatttataaataaaacgcgtgtagtggcgttttcttttttcatttattatgttcactctcttatctatatatttataaggcaattaaatgaaaaggaatttattatcttccgctattatagtcgccatcatggccctcggtctgacgggttgtgatgataaaaaagccgaaacagaaacgcccccgcctgccaatagtcaacctgccgcaccagctcctgaagctcccgttgcaaaagcagaagctaaacctgaaacacctgcgcaaccggtggtcgatgaacaagcggttttcgacgaaaaaatggatgtctatatcaagtgctataacaagttacagatccctgtacagagcagtctggcgcgttatgctgactggctgaaagattttaaacaggggcctaccggtgaagagcgtactgtttatggcatctacggcattagtgaatccaacctcgctgagtgtgaaaaaggcgtaaaaagtgctgtggcgttaacgcctgcgctgcaacctattgatggcgtggcggtgagttatatcgatgctgccgtggcgttgggtaataccattaacgaaatggataaatattacacccaggaaaattataaagacgatgcgtttgcgaaagggaaaacgctgcaccagacattcttaaaaaatctggaagcctttgaagctgtagcagaatcttatcatgcggcgattcaggaaattaacgataagcgccagcttgcggaactgaaaaatattgaagaaagagaagggaaaacattccactattactctctggcagtcatgatttcagcgaaacaaattaataacctgatatcgcaagataagtttgatgcagaagcggcaatgaagaaagtgtctgaactggaaacgctggtggcgcaggccaaagaagcggataaaggcggcatgaatttctcgtttattaattcggcaggccagtatcaactcgaggctaaaaaatacgttcgccgcgtcagagataaagtcccgtactctgactgggataaagagcaactgcaggacgcaaactcaagctggatggtcgacgactctttcccgagagcattacgcgagtacaacgaaatggttgatgactataatagcctgcgttaaacgtttttgatgataaatgcagtgtcggatgcggcgcatccgacacagttcaccccttgtgaagtaactccataaatgcctcatatcctgttaacccggcaataacctctgccggatgctgacacaatacgcttgccagatagctaaatatttttagctcatgacgcgcatcggcggcggcgcaggcgatcaagacatggttaatgacttcgttattcacctcaactggttgggcgagggtaataaaaaatccacgaaaacgtcgctcctgttcgctccagcaatgtgggatggcgaggcgattaacaatcaggttttcaccttcgccttcgcgggcgatgatgcgttgtgcttcatcggcggtaatatggtgttgtgccactaattgcgcacaaatttgccgggtaatatgttgccagctttcaccgcgtacattcgaataatgaaaacttccgggggcagagaaaaaacgctccggctgttggcgaataaatgccgtcgccagaaaatgttttatttgttcgataccggcagccgtaatgatattttttacggtgatgtaattatttaccgcgtcatccagtaaataatggctgttgttaatgatcaataacggctcaatctcttcgcgaatggcaacaagttcgcttaagctacgggcaataatcacccgacaatgtaaaacatcgcgctcaatggcgagctgattaatagtggcaatcgcgttctggtccgagagcaaaatgatcggctggcgttcgttttgatgccgttccagcgcacaggcaaaatacaaaccgatcagatcgctgtcgaaaagaggaatatcgagctgttcacgcagtagcgtaataaagtgcagactcatatcaaaggccgcaggccaggcggctttcaggttattcatgctgctctggcggtgctcagcaatccacactggtgcggcaaggcaacgtaataaatgcccggtaatattctcaaccagctgcgcatcaataatattcaatgacgcgatgcccggcaccctttgcagcaacccctgcacattatcggctgaaattacctgcgcttgctgatgctgtttctctatcaaacccgtcagggttcttacagcgttatcaccaagaaacagaccgctatgttcaacgatttgttttatctcgtcaccgggatattgcggccactcatcggtcagttgattacgcagggcgtaaatcgccagaatcaggctggagagataatcaccctgcatgagcggccagcggtgttggttgtcgcaggccgtggataaatgctgaaggttgtctcgtgttatgcccgccagcggaattaaaaacggatctttgcgcagcaagttcgccagcaagataacgcgtttctcttctgtctcatcaatgaaatggcccaaaccagggcggctggccaggcaacaagtgcgttcataacgctgttttaaccggggcagacgctctgcgacccacgtttctggcaaattaagcgccgaggcgagttgcgcacggggagtaaaggtattcagtaataacagtgccagcagccgatcgtcgttatcgtgcttttgcagcaactgaaaaaagctgcggcgctcgaagatttccagctgatagcccgcactaccactggcggaaatgcgggctttgccgttaagggtaaagttgagatagtcaatatcacgcaggatggtcctgcctgaaacgccagtctgttgcgccagctcaccaggcgtgcgcggctgttgctccagcagatcgacaatctttaactggcgttcgtttagcattaatccacctgacggaactggctaaacgcgttgactttctccgcggttaaggtggtcagaaaatcccgtatcaacgtgagcagagcatggtaatcggcttttgaaatcatgccgctgttagcgtgcagatagcgggttggcaggcacagcgcaacaaccggacgcccgccgcccatcacgttgtagcgcccgccatccgtcgcaccggttttcatggtggaaaattgcagcggtaaatcgttatgtgcggcacagctttttaacgccgccaccagtttctggttggggaagtagcgcttgtcaaacagcatcagccccggcccctggcccagtttcagcgggtatttaatgttatcaatgcccggaacatcacctgcgacagcggtatccagcacaatcaccacatccggtttaatgtgttccgccgaggtttgtgccccgcgtagcccaacttcttcttccacgctgccgacgccatacagcgtaatttcgggattattcaccgtctgcaatagttcagccatcattgcgcagccgatgcggttatccagcgccttgccgaccactttatcttcgccccagcaggcaaaattggcttccgggctaataaaatcgcccatcgccacaccgcgtttttccacctcatcgcgactgtttgcgccaatatcaatgaacatctcatcaaatgacagcggctgttgcctttgcttttccgttaacgcatgaggcgcgacggaaccaatcacaccagggattttcactcccttgtgtgtgcgtatggttacccggtggttgagcatcgactgattccaccagccgccaatggtggtaaaacgcagaaaaccgctctcgtcgatgtgggtgaccataaagccgacttcatccatatgtccgacaacggcaacttttggacctttattccccttacgggcaacaaagctgcccagaccatcgaaggtgatttcattcacgcaaggttccagcgtgtttatcagaatgtcgcgaacttcctgttcatcgccgctgacttcgcacaactgttgcagtaactcaatgttcatggacaagctcctgttgcgcggctttcgctttgcggcgtaaccacaatcctttcaggacgataatgaatgaaatgttcagcgcgaggccaatcgccagcaccagataaaacgaacccaccggcgacatcaggccgatcagcgggtcaaagatacccaaaccaggtgccagacgtttgattccgaaagcgatcaccagcacgccggtaatgccgcccgccagcgtattggcggtaatcatcggcaacggagctgccagagcgtaaggaatagccggttcggttgcgactgtggcaccgaccacaatggcactactggcagcctctttttcctgtcgggtaaacagtttgggcgcaatgaacgtcgcaagacccgccgcgacgggcggcatcagcgcgacaacgccgacgatggcgtaccagtcataaatgtgtttttccagcagtgagaagcagaagaaccaggcggttttattgatggggccgcccatatcgaacgccagcatcgcaccgaccagaaacgctgccgcaaacttcattgatggaggaatggtattcaggaagtggagcagcccgcccatgaggtcggacatcaccggtccgataacgtagtaagtgagcacgccgaaaaccagcagagtgacgaacgggatcagcatggaaccgagcagcggttgtaatgctttgccaaggcgcactttacggaaccagaagacgaaatagccaatcgccagccccagcaccaccgcgccgagaaatcccgcacccgactgggtgccgagcagggctttgtcgttcgccagatagcaaaccagaaacgccggagcgaaagccggtttatcggcaatcgacgaggcgatataagcgcccatgatggggatcataaaggtgaagccgaggtaaccgatggattcaactacccaggtaaacgacggcgcacctttcgacatatcggtatatggcaaaccgaactgcaccagcatgttggcaagcgccaccagaataccgccgccgatgacaaacggcagcgccgcagagacgcccgccatcaggtggctcatcacgctgccgctttgcacttcctgtttgccaagcttcacgccgctatctgcggcaaaaagctgcgagtttgtcggtaattcgctgaaaatctggtcgatatttttcaacgcctgggagatggcaatctcataaactttcttcccggcaaaccgcgcgcgatcatcaccgctcaggccacgcccggtagcgagaatgacgtaatcggcagcggcaatctcttcgctggataagcggttttcaacgccactggacccttgagtttccacttttatggtatggccgagagaacgggctttctgttccagggcttccgccaccatgtaggtgtgagcgatcccggcggggcagttggtgatcgcgacaatacgtaaggatgactccatcgccacttccttatgagctgagggtttgatttaacaaggcaagcacctggtcggcgtcgccctgttgcagttgatgaataaaatcctggtggataattttgcgacacagtgtgccgatgattttgacctgatcctcttcgccgctttgcggcacgccgaggcagatccagcaattgacgtcttcgccatcgctggctttccagtcaatagcctgcgctttgcgggcgaataatacgaacggttgtttaacgcaggcgcttttaccgtgcggcacggcgacaccggaaccaaatccagtagagtgcattttttcgcgcagcagcagggtttgcaggaactggtgtgagtcggtgataaaaccgttttgtaacgctattgtcgccaactgcttcagaacggaataagcgccattgccctgaatattcaggtcaatacagcttgcagtaagtgctgccattattggactccatgaaaaaatattattgttaattgtaacggcggggcggttttgtgatgagcgcggatatgtcgtgaagtcgtgacaatataaggcagagtgaaggataaattttgcggggtaaggcacatattgattggtaaaataaatgtcgtgaataaaaaatcattctttaatgattttatgaatgtttaactgtcgcggatattttgctgccacgttatttatatttatggcttatgagtcagcgtgaatcatatctaatattttttacgatatttagttaaaaacggcactattgttatattcctcacgttccaggaaatcagcggatttactcatattatgcggcgggatactatccatcggcctgctgaagttggattaaaaattcgaaagtgcacaccttatatttctctatatacgtattccttttggaaagcgtagggcctcctttatttcagggaacgtaaataatgaaaaaatcgacattatctttagccatcggtttattattggcatgtagtaccggtatggcaaaaacacagcatttaacgctggaacaacgcatggcattgctggaagaacgcctggaagcggcagaaatgcgggcggcaaaagcagaggggcaggtaaaacagctgcagacacaacaagccgctgagatccgcgaaattaaggctgcccagggcaatacgccggtaaatggacagacaacggcggaatctgcaaagaaaaatgccacctcacctaatcttttgctttcaggttatggcgatttaaaaatctacggcgacgtagaatttaatatggatgcggaaagtaatcatggcctgctggcaatgaccaacgctgatgtgaatagcgatcccactaatgaacagtggaatctcaatggtcgtattctgttaggttttgatggtatgcgaaaactggataatggttatttcgccgggttctccgcacaaccgctgggggatatgcacggttcagtaaatatcgatgatgcggtattcttctttggcaaagaaaacgactggaaggtcaaagtaggccgttttgaagcctacgatatgttcccgctgaatcaggatacctttgttgaacattccggtaatactgcgaacgatctttatgacgatggcagcggttatatctatatgatgaaagagggccgcgggcgctctaacgctggcggtaatttcctcgtcagcaaacaactcgataactggtattttgaattaaacacgttacttgaagacggaacatctttatataatgacggtaattatcatggacgcgatatggagcagcagaaaaatgttgcttatctgcgtccggtaattgcctggtcgccgacggaagaattcaccgtttccgcagcgatggaagctaacgtggtaaataatgcttatggttataccgatagcaagggtaattttgtcgatcagtccgatcgtaccggctatggtatgagcatgacctggaacggcctgaaaacggatccggacaatggcattgtggttaatcttaataccgcctatttagatgctaataatgagaaagatttcactgccgggattaacgcgctgtggaaacgtttcgagctcggttatatctacgcgcacaataagattgatgaattcagcggtgtagtttgtgataacgactgctggattgatgatgaagggacgtacaccattcacaccattcatgcgtcttatcagttcgctaatgtgatggatatggagaactttaatatttacctcgggacgtattactccattctggatagcgacggtgataaaaaacacggtgatgatactgatgaccgttacggcgcacgcgttcgctttaaatacttcttctgatgaagtcgcggtgctggatattttccggcaccgcaactcattaaggcaggtaaaacacttcttgcagctcgctactcaccgggctgttatccgggttagctggcataacgtcggtcatatatttccaccaacgttggcagatttcagtgctggctaccgcattccagcgttcttcagattcaatctctaccatggcaaacagcagattacgcgctttgtcgaggtaaatggcgtagttatgcgcaccgtgagatttcaacactgcttccagttccggccagatggggttatgccgacgctgatactcttcgtgggcgtcggggttaacctgcatgataaaggctttgcggatcatgtttgctccttacagcgccagcgcactggctagtggtgtaacgccgaagcgcttgccgagcgctatcaactcttcacggctgatggtctgtttcatgccgcccatcgaataaaccttcactaatacttgtgctgatttttctgcggtgtcgattaaaccgaatgtttcatccagcgtcggcccgctgccgaagacgccgtggaagggccacaacaccagcgaatgtttttgcatctcttgtgcggtcgcctggccgatttcgtccgtgccgggcaccatccacggcaaaatgccaacgccatccgggaacactaccagacactcggtgctgccttcccacagttggcgagtaaagaccgcggtgtcgttttccagtacataggtgagggcgattaggttggtggcgtggcagtgcatgatcacccgatctttaccgttggtggctttaatgcgctcgcagtgggagagaaagtgagctggaagttcggaagtggggacggcttcgttggttaacccccaaagaatgtggtagcccgcgccgtcgctgtcgacttttacgatgcctaagttagccgcaggatcaagctggacgttacggaagaatttgcccgagccggtgacaataaacggtgtatttgccagtaaaggcatgggctggctgagcgggatatagcgcggttgttggtggaaattgtcgtgatatggtgcgatatcggcgtcatccaggcgtagcgtcaggttgccgccgttgcgctcatcccagcctttcagccaggcgtcggtggtggctttgatcattccctggacaaaccaggactgagtaatgttttgcatgttctgtgttcctgtaaattcggtgttgtcggatgcacgacccgtaggccggataaggcgctcgcgccgcatccggcaatcaatgcctgatgtgacgctgtcgcgtcttatcaggcctacaactattgccgacctgtaggcctgataaggcacttgtgccgcatccggcaatcaatgcctgatgcgacgctgtcgcgtcttatcaggcctacaactgttgccgacctgtaggccggataaggcacttgtgccgcatccggcaatcaatgcctgatgcgacgctgtcgcgtcttatcaggcctacaactattgccgacctgtaggccggataaggcacttgtgccgcatccggcaatcaatgcctgatgcgacgctgtcgcgtcttatctggcctacaactgttgccgacccgtaggccggataaggcgctcgcgccgcatccggcagtgtttacccgcggcgactcaaaatttctttctcataagcccgcacgctctccagccattcgctacctgctggcgtatcgtgacgttggcaatacatttcccagaccgcctgccacggcaacgatttctgctcttccagcagtgccagacgcgcagtgtaatcgcccgccgcttccagcttgcgtagttcagcggtaggttccagtaacgcacgtagcagggcttttttcatattgcgtgtaccaataacccacgcagcaatgcggttgatagaggcatcgaagaagtcaaggccgatatgcacccggtcaaacagatcgtgacgaacaatctcactggcaatcgcctgggtttcatcatccagcagcactacgtgatcgctgtcccagcgaaccggacggctgacgtgcagcagcaactgcggcacatacagcatggcggcggaaatcttgtcggaaatcacttcagtcgggtggaaatgcccggcgtccaggcacagcgccgtctggcggctggtggcataacctaggtaaaactcattggagccaaccgtgtagctctccgcaccaataccaaataatttgctctcaacggcgtcgatatggtgcgccggatccagcttctcgctgatcacctcatccagagctgccagcagacgctggcgcggagcgagacggtcaacggtgatatctttcatgccatccgggatccagatgttcatcaccgacggtgtgccgagttgctcgccaaaataggccgaaacgcgacggctggccttgcagtgatcaatccagaactggcgaatgctgtcgtcgggatgcgagagcgtaaagccatcggcgcttagcggatgcgaaaaacaggaggggttaaaatccagaccgagctgattggctttcgcccattcaacccagtttttgaagtgctctggtttgatctggtcgcgcgagactggcgtgtctgattccagatagatggcatgtaaattaagccgttttggcccgggaatcagccgcatagcctgttccagatcggcacgtagctcactggcattacgcgctttgcccggataattgccagtagcctgaatcccaccggtcagcgaaccttccgggttttcaaaaccggaaacatcatcgccctgccagcagtgcattgaaacgggtaaacgatcaagttggcgcagcgcctcctcgacatcaatccctactgccgcgaaacgctgtttcgccagctcccaggcctgttccagttgagtggtcatgcgcaaagctcctttgtctgtcgtgtagagtgaatctgcgccacatagtgggcaatttcactgtcaggattaggggtaaaggtggtcagattcgcggtagtgctgacgacctgacggaaatcatccacattgttgagttcatccagcgtcattaactggatgccgatattgccgagcgtcgaggcttcaacaggcccggcgatcacccgaataccgcaggcatcggcacacagctggttgagcagcgtgttctggcagccgccgccgacaatatgcagttgcgagaaatcttcaccacgcagctgcgccaactcatgcaacacatcggcatacagcagcgccagactgtcgaaaatacagcgcgccagttcagcatcactttccgggatcggttgcgccgtttcccgacacgcagcctgaatttcgctgcacatcgcttcaggattaataaagcgatcgtcattgggattgatgatgaagcgacaggccggaagtgcctgtgtcgcggcgataagcgccgggagatcgttgatttgccgctcctgaagcacccgctgaagcagccataagcccataatatttttcagcacccgatagcgaccttccgccccgccttcgttggtgatattggctgccagcgccgtgtcattggtaaatggcgtctggttttcgaagcccatcaatgaccaggtgccagaagagagataagcggcgcgtgaaccgtttaacggcgaggcgataaccgcgctggcggtatcatggctggcaacggcgaccaccggaatctcattaccctgcgggcaaatccagtgacctatgacattacccggatgcgtcgggcgaccaaaccaggctttgttggccccgctccacgccagtagcgactcgtcccagtcgtcgctattgatattgaccagttgcgtggttgtggcattggtgtactcccagttcatcttgccggtcaggcgataactgaagtaatccggcatcagcagagcgtgagcaatgtgtggaataagttcaggttgttgctccgtcagcgcacgcaactgataaagcgtattgaagggcagaaactggatgccgctacgttgataaatatcgcgtttgccgagttgttgctgtgcctgcgccattaggccattggtgcggctatcgcgataagcaacgggcaggcccacacgctgaccctgttggtcgagcagcacaaagtccacgccccaggtatcaatcccaatgctatcgatacgaatcccttcctcgcacaccttgtttaatccaaggcgaatggcactttccaggctatccacattccaggtgacataaccgttctggctatgcaggccattgttaaaacgatggatttcgcgcagcgtcaggctgcggcattcacgctcgtaacgcgccagcatcacgcgcccactggatgcgccgagatcgacggcgacacaattgcgaaaggtcataatgtgatcctgctgaatttcattacgaccagtctaaaaagcgcctgaattcgcgaccttctcgctactgacaggaaaatgggccattggcaaccagggaaagatgaacgtgatgatgttcacaatttgcttcattgtggtgatgtgatgctcaccgcatttcctgaaaattcacgctgtatcttgaaaaatcgacgttttttacgtggttttccgtcgaaaatttaaggtaagaacctgacctcgtgattactatttcgccgtgttgacgacatcaggaggccagtatgaccgtattacatagtgtggatttttttccgtctggtaacgcgtccgtggcgatagaaccccggctcccgcaggcggattttcctgaacatcatcatgattttcatgaaattgtgattgtcgaacatggcacgggtattcatgtatttaatgggcagccctataccatcaccggtgggacggtctgtttcgtacgcgatcatgatcggcatctgtatgaacataccgataatctgtgtctgactaatgtgctgtaccgctcgccggatcgatttcagtttctcgccgggctgaatcagttgctgccacaagagctggatgggcagtatccgtcccactggcgcgttaaccacagcgtattgcagcaggtgcgacagctggttgcacagatggaacagcaggaaggggaaaatgatttaccctcgaccgccagtcgcgagatcttgtttatgcaattactgctcttgctgcgtaaaagcagtttgcaggagaacctggaaaacagcgcatcacgtctcaacttgcttctggcctggctggaggaccattttgccgatgaggtgaattgggatgccgtggcggatcaattttctctttcactgcgtacgctacatcggcagcttaagcagcaaacgggactgacgcctcagcgttacctgaaccgcctgcgactgatgaaagcccgacatctgctgcgtcacagtgaggccagcgttactgacatcgcctatcgctgcggattcagcgacagtaaccacttttcgacgctttttcgccgagagtttaactggtcaccgcgtgatattcgtcagggacgggatggttttctgcaataacgcgaatcttctcaacgtatttgtacgccatattgcgaataatcaacttcgttctctggccgaggtagccacggtggcgcatcagttaaaacttctcaaagatgatttttttgccagcgaccagcaggcagtcgctgtggctgaccgttatccgcaagatgtctttgccgaacatacacatgatttttgtgagctggtgattgtctggcgcggtaatggtctgcatgtactcaacgatcgcccttatcgcattacccgtggcgatctcttttacattcatgctgacgataaacactcctacgcttccgttaatgatctggttttgcagaatattatttattgtccggagcggctgaagctgaatcttgaatggcagggggcgattccgggatttagcgccagcgcagggcaaccacactggcgcttaggtagcatggggatggcacaggcgcggcaggttatcggtcagcttgagcatgaaagtagtcagcatgtgccatttgctaacgaaatggctgagttgctgttcgggcagttggtgatgttgctgaatcgccatcgttacactagtgattcgttgccgccaacatccagcgaaacgttgctggataagctgattacccggttggcggctagcctgaaaagtccctttgcgctggataaattttgtgatgaggcatcgtgcagtgagcgcgttttgcgtcagcaatttcgccagcagactggaatgaccatcaatcaatatctgcgacaggtcagagtgtgtcatgcgcaatatcttctccagcatagccgcctgttaatcagtgatatttcgaccgaatgtggctttgaagatagtaactatttttcggtggtgtttacccgggaaaccgggatgacgcccagccagtggcgtcatctcaattcgcagaaagattaattcgccatgccgatgccgacgatgttagcggcgacaataatcaccacacaaccgaggctcaacaccgttaccggacggcgtcctgcattgttccactctttcagcaccagcccgacgataccaccgcacaatacatagaagctcatatgcagcatccaactgatgtagtcatactgcgccggaatgcgggcgtggccccaggcatagaaaaagaattgcagataccacatcaacccgcccagtgccgagagtaacacattgtgaatgatcagcggttttgccagcgagaagtcggcttttagcgacaaatccttcacttttgccagacgaataaaacagaaaccgaggttgatgatcgcgccgccgcccatgatgacaacatagcttggcagagcgacatacagtggatcgacgcctagtgcggcagcggcttcatgcatcggttttgcggcgttcatcgcaaaggacatcccggcagagaaaatgccgcacatcaccgccagcaccagcccttttttcagattgaactcttcggctttaatgcccatcttgcgctctttcaactgcccggctcgagttacaatccctacgccaatcagcgccaccagaacgccgagcaacgtcatgcgtccgccttcggtgttaatcagcacatcgaaattgccgttgataattggcgtcatcagcgtaccgacaatcaacgtaatgccaatggcgatgccaattcccatcgacatgccgagataacgcatggtcaggccgtagttgatattaccgatcccccacatagcgccgaacagaaaaacaggcagcagcgtagagagactaaacgagctgtaatacgcccagaaattcggtagtaacagggcgctgatggcccacggcagaataatccacgaaacaatcccaccgactgaccacatggtttcccatgaccatttttttacttttttgaacggagcgtaaaaacaggctgcactggccgcgccgatcaaatgccaaaatatccccatcgtaatcgcgttactcatcttcttatcctcatcatttttcgtcgcgtcacatctccgacgagatgagtgtaaaaatcgtgctgtcgattaacctttcgcctgttgccgccgttgtcgatttactggcaatcacggcattaagtgggtgatttgcttcacatctcgggcattttcctgcaaaaccatacccttacgaaaagtacggcattgataatcattttcaatatcatttaattaactataatgaaccaactgcttacgcggcattaacaatcggccgcccgacaatactggagatgaatatgagctataccctgccatccctgccgtatgcttacgatgccctggaaccgcacttcgataagcagaccatggaaatccaccacaccaaacaccatcagacctacgtaaacaacgccaacgcggcgctggaaagcctgccagaatttgccaacctgccggttgaagagctgatcaccaaactggaccagctgccagcagacaagaaaaccgtactgcgcaacaacgctggcggtcacgctaaccacagcctgttctggaaaggtctgaaaaaaggcaccaccctgcagggtgacctgaaagcggctatcgaacgtgacttcggctccgttgataacttcaaagcagaatttgaaaaagcggcagcttcccgctttggttccggctgggcatggctggtgctgaaaggcgataaactggcggtggtttctactgctaaccaggattctccgctgatgggtgaagctatttctggcgcttccggcttcccgattatgggcctggatgtgtgggaacatgcttactacctgaaattccagaaccgccgtccggactacattaaagagttctggaacgtggtgaactgggacgaagcagcggcacgttttgcggcgaaaaaataatcatttgccgcctgctgcaatgaggcgtataggccgcatatcagcttaaaaaatgaaccatcgccaacggcggtggtttttttgtgatcaatttcaaaataaaaacaatgatccgataaaaataaaacagcgcttcaattgatgtggttttgatcacttttattgattaaatgaatgtctatcttcgtttccatcaacactgatgctccattgaggaattacgcatcagcccttaaaaatatgccgacaggtgatggaaatgcagataaaacgctcgattgagaaaatcccgggggggatgatgctcgtcccgctattccttggcacactgtgccacaccttctcgccgggggcggggaaatattttggatcattcaccaacgggatgattaccggtacggtgcccattctggcggtgtggtttttttgcatgggggcgtcaataaaattaagcgcgacgggaacggtactgcgtaaatccggtacgctggtggtaacaaaaattgccgtcgcgtgggtggttgcggcaattgcctcgcgcattattccggaacatggtgttgaagttggattctttgccggactttcaacgctggcgctggtggcggcgatggatatgaccaacggcggactttacgcttccatcatgcagcagtacggcacaaaagaagaagctggggcatttgtgttgatgtcgttggagtccgggccgctcatgacgatgattattctgggcactgccgggattgcctcgtttgaaccgcatgttttcgtcggcgcagtattaccgttcctggtgggctttgccctggggaaccttgaccctgaattacgagaatttttcagcaaagcggtgcagacgctgattccattctttgccttcgcactgggcaataccattgatttgactgtaattgcccagacaggtttgctggggatcctgttgggtgtggcagtaattatcgtgaccggtattccgttgattatcgccgataaattgattggcggtggcgatggcactgccggaattgccgcttccagttccgcaggggccgcggtagcgacacctgtgctgattgcagaaatggtgcctgcgtttaaaccgatggctccggcagcaacttcgctggtagcgacggcagtcattgtgacttcgattctggtgccaattcttacctctatctggtcacgtaaagtcaaagccagagcggcgaaaatcgaaattttaggtacggtgaaataaacctgcttccttaatccccaccgccggatgaactaacgttcgtccggtttgctattgagttcctgcctggatacttaccgcgaaaacagcacgcctgacataaaataaatatggtctaatggggaaatttctcgtggagagggaacagatgcgatatccggttgatgtatacacaggcaagattcaggcttatcccgaaggcaaacccagcgcaattgctaaaatccaggttgatggtgagttgatgctgacggagctggggctggaaggtgacgagcaggcggagaaaaaggttcacggcggaccagacagagcgctgtgtcattatcctcgtgagcattatctctactgggcgcgggaatttccggaacaggcggagttgtttgttgcgcctgcgtttggtgaaaacctctcaaccgacggcctgacggaaagtaatgtttatatgggcgatattttccgctggggagaggcattaattcaggtcagccagccgcgctcgccttgctataaactcaattaccattttgatatcagcgatatagcgcagttgatgcaaaacacaggtaaggtggggtggttgtatagcgtgatagcgccagggaaagtgtctgcggacgcgccgctggagttggtttcccgtgtcagcgatgtgaccgtgcaggaggctgccgccatcgcatggcatatgccgtttgatgacgatcagtatcaccgtttactctccgccgccgggttatcgaaaagctggacgcgaacgatgcaaaagcgccgactgagcgacaagatcgaagatttttcacggcggttgtggggaaaataacccccggagtgtaggcctgataagacgctatcagcgtcgcatcaggcatcctgctcaaatgccggatgcggcgtaaacgccttatcctgcctacaaatgcggagtttaactccgcttatacagcggcaaccaaatcaccagccgtaaaccgcccagcgggctgtcttctgccttcacccagccacgatgctgctgaatggcggtttcaacaatcgccagccccaatcctgtaccgccagattcacgatcgcgtgcttcatcggtccgatagaacggacggaaaatctgttcgcgatcttccgggctaacgccaggaccatcgtcgtccaccgtaatggtgataccgtctttatctaccgcaaagcccacttcaatcttcgtatgggaataacgcagagcattacgaacaatgttttccagcgcactttccagggcgtttgggttgccgtacagcggccacggcccaggcgggaagttaactgtcaacgacttgcccatttgctcggcttcgaacgccgcgttatccagcacttcgccccacaactggttggctttgatggtctcgcttaccagcgcgtttttttgctgattacgtgacatcaccaacagatcgttgatcatgctgtccagacgttgcgcttcggtttcaatacgctccagttccttgctttcaccgctacgacggcgcagtaacgccgtacccagttgcagacgcgtcagtggggtgcgcagctcgtgagagatatcagaaagcagacgctgctgggaggtcatcatacgctccagcgcggtgaccatctggttaaaactggcacccgcggcaaggaattcctgtggccccgcttccagttccgggtgctggcgtaagtttccctgggcaacttcatcggcagcgtttttcagcttacgcgccggttttgccagactccaggccaaccacaacagcagcggcgtactgaccaacatggtgacaatcagcagtaataacgggcggtcgaacagtaagttaatgaaatcggattgagaactgctggccggacgaatcagataaagttggtaattatcttcgccatcacgtacggagaacggaccgaccagttccacgcggccatactttttcttctgcggatgatcggcgttatcggcctgaccaataaagttacgaatgatctgcatttcgctgcgttcagcgccgatcacgcggccttcggtggtcaccaataacaaacgctgtcctggcggtgcccacttatcaatcgcccgaaacagacgccgccaccacattaaatcgttgggcggatcgttcgccagctccgcttcaacatgctgctcaatcatcagcccctgacgctgttcgctatccagaagctcggtcatctggcgtgaatcgagcttgggtaacatcaaaaccaacatcaacaccagcgccagcgtcagccagaagatggcgaagatgcgcgcggttaagctgcctatcatgaagcagaaaccatcagatagccgcgaccacgcagggttttaaaccacgggtgaccatctttacgatccggcagtttacgacgcaggttggaaatgtgcatatcaatagcgcggtcgaaaggcgtcaggcgtttgcccagcacttcctggcttaaatgttcacgggaaaccacctgacccagatgctgtgccagcaaatagagcagggtaaactcagtaccggttaactccagcgtttgcccgtcgaagctggcttcctgacggcctggattcagcactaaggcatcaacttccagtgtcggtgaaccgttgtcgttgttttgctgttgctcgctccagtgcgaacggcgcaggatcgcgcgaatacgtgccaccagctcacgatcattaaacggtttcgggagatagtcatctgcgcccagctcaaggccgagaacgcgatcaagttcgctgccgcgcgccgtcaacataatgacaggcgtctggtgtgtctggcgaagtgcttttaatgtgtcgataccatttttcttcggcatcattacatcaagcaaaagtaaatcaatgctgtcgtccagaagatcaagcgcctgttccccatcgtgggcaacaatcacgttgaagccttccatctcgagcagctcctttaatagggaagtcagctctcggtcatcatcaactaacaggattttattcattgtttaaatacctccgaggcagaaattacgtcatcagacgtcgctaatccatgactttacgttgttttacaccccctgacgcatgtttgcagcctgaatcgtaaactctctatcgttgaatcgcgacagaaagattttgggagcaaatgatgcgcatagttaccgctgccgtcatggcctcaacgctggcagtcagttcattaagccacgctgctgaagtcggttcaggcgataactggcatccgggtgaagaacttacgcagcgcagtacgcagagccatatgttcgacggcataagtttaaccgaacatcagcgtcagcagatgcgagatcttatgcaacaggcccggcacgaacagcctcctgttaatgttagcgaactggagacaatgcatcgccttgtcaccgcagaaaattttgatgaaaacgctgtgcgcgcacaggcagaaaaaatggcgaatgagcaaattgctcgtcaggttgagatggcaaaagtccgcaaccaaatgtatcgcctgttaacgccggagcagcaagcggttttaaacgagaaacatcaacaacgaatggagcagttgcgtgacgtgacgcaatggcaaaaaagttcatcgttgaagctattgagtagtagcaactcacgttcccagtagtaaaccctgttttccttgccatagacaccatccctgtcttcccccacatgatgtgggggttttttttatcctcaatttgcctgctgcttaatgcattgcagatgatttgcttccgttatactagcgtcagttgatagcgggagtatttatgaatcaatcttatggacggctggtcagtcgggcggcgattgctgcgacggcgatggcttcgctgctattgctgattaaaatttttgcatggtggtataccgggtcggtgagtattctcgccgcgctggtggattcgctggtggatatcggcgcgtcgttgacgaatttattggtggtgcgatattccctgcaacctgccgacgataatcactcgtttggtcacggtaaagctgagtccctcgcggcgctggcgcaaagtatgtttatctccggttcggcactattcctgtttttgacgggtattcaacatctgatatctccaacaccgatgacagatccaggcgtcggggttatcgtgacaattgtggcgctaatttgtacgattatccttgtctcgtttcagcgttgggtggtgcggcggacgcaaagccaggcggtgcgggctgatatgctacattaccagtctgatgttatgatgaacggcgcaattctgctggcgctggggttgtcctggtacggctggcatcgcgccgatgctctgtttgcattgggaatcggcatctatattttatatagcgcgttacgcatgggatatgaggcggtacagtcattactggatcgcgcattgcctgatgaggaacggcaagaaattattgatatcgtgacttcctggccgggtgttagcggcgctcacgatcttcgcacgcggcagtcagggccgacccgctttattcagattcatttggaaatggaagactctctgcctttggttcaggcacatatggtggcggatcaggtagagcaggctattttacggcgttttccgggatcggatgtaattatccatcaggacccctgttccgtcgtacccagggagggtaaacggtctatgctttcataatcagtataaaagagagccagacccgcattttgtgtataaaataccgccatttggcctgacctgaatcaattcagcaggaagtgattgttatactatttgcacattcgttggatcacttcgatgtgcaagaagacttccggcaacagatttcattttgcattccaaagttcagaggtagtcatgattaagaaaatcggtgtgttgacaagcggcggtgatgcgccaggcatgaacgccgcaattcgcggggttgttcgttctgcgctgacagaaggtctggaagtaatgggcatttatgacggctatctgggtctgtatgaagaccgtatggtacagctagaccgttacagcgtttctgacatgatcaaccgtggtggtacgttcctcggttctgcgcgtttcccggaattccgcgacgagaacatccgcgccgtggctatcgaaaacctgaaaaaacgtggtatcgacgcgctggtggttatcggcggtgacggttcctacatgggtgcaatgcgtctgaccgaaatgggcttcccgtgcatcggtctgcctggcactatcgacaacgacatcaaaggcactgactacactataggtttcttcactgcgctgagcaccgttgtagaagcgatcgaccgtctgcgtgacacctcttcttctcaccagcgtatttccgtggtggaagtgatgggccgttattgtggcgatctgacgttggctgcggccattgccggtggctgtgaattcgttgtggttccggaagttgaattcagccgtgaagatctggtaaacgaaatcaaagcgggtatcgcgaaaggtaaaaaacacgcgatcgtggcgattaccgaacatatgtgtgatgttgacgaactggcgcatttcatcgagaaagaaaccggtcgtgaaacccgcgcaactgtgctgggccacatccagcgcggtggttctccggtgccttacgaccgtattctggcttcccgtatgggcgcttacgctatcgatctgctgctggcaggttacggcggtcgttgcgtaggtatccagaacgaacagctggttcaccacgacatcatcgacgctatcgaaaacatgaagcgtccgttcaaaggcgactggctggactgcgcgaaaaaactgtattaatgatttcggaaaaaggcagattcctttagcctgaaaccgatgacagaagcaaaaatgcctgatgcgcttcgcttatcaggtctacatgaattctgtaatctattgaatttgcaaacttttgtaggccggataaggcgttcgcgccgcatccggcatggacaaagcgcactttgtcagcaatatgaggcggatttcttccgcctttttaatcccccaacatatacccgcaagttatagccaatctttttttattctttaatgtttggttaaccttctggcacgctttgctcatcacaacacaacataagagagtcgggcgatgaacaagtggggcgtagggttaacatttttgctggcggcaaccagcgttatggcaaaggatattcagcttcttaacgtttcatatgatccaacgcgcgaattgtacgaacagtacaacaaggcattcagcgcccactggaaacagcaaactggtgataacgtggtgattcgtcagtcacacggtggctcaggtaaacaagcgacgtcggtaatcaacggtattgaagctgatgttgtcacgctggctctggcctatgacgtggacgcaattgcggaacgcgggcggattgataaagagtggatcaaacgtctgccggataactccgcaccgtacacttccaccattgttttcctggtacgtaagggaaatccgaagcagatccatgactggaacgatctgattaaaccgggtgtttcggtgatcacgcctaatccgaaaagctctggtggcgcgcgctggaactacctggcagcctggggctacgcgctgcatcacaacaacaacgatcaggcaaaagcacaggattttgttcgggcactgtatataaacgtcgaagttctggattctggcgcgcgtggctccactaacacttttgtcgagcgcggaattggcgatgtactgattgcctgggaaaacgaagctctgctggcagcgaatgaactggggaaagataaattcgaaatcgtcacgccgagtgagtctatcctcgcagagccaaccgtgtcggtggtcgataaagtggtcgagaaaaaaggtactaaagaggtggcggaagcctacctgaaatatctctactcgccagaaggtcaggaaattgccgcgaaaaactactaccgtccgcgcgacgctgaggtggcgaaaaagtacgaaaatgcgtttccaaagctgaagttattcaccattgatgaagagttcggcggctggacgaaagcgcaaaaagagcattttgctaacggcggtacgttcgatcagatcagcaaacgctgatttccccaggataattatcaaacccggtggtttctcgcgaccgggttttttatttgtcacgattttgcgttacccttgcatctctttgaggtacagggaaaaaaagatgaaaaaagcgggtcttctttttttggtgatgatagttatcgccgttgtggctgccggtattggttactggaaattaaccggtgaagagtcgtatacattacgtaagattgtccttgaggaatgtttgcccaatcaacagcaaaatcaaaatccttcgccatgtgcggaagtcaaacccaatgccggatacgtggttttaaaagatcttaatggtccactgcaatatctgttgatgccaacgtatcgtattaacggtactgaaagtcctttgttgaccgatccttcaacgccgaacttcttttggttggcctggcaggcgcgtgattttatgagcaaaaaatacggccagccggttcccgatcgcgcggtttctttggcgatcaactcccgcaccgggcgtacgcaaaaccattttcatattcatatctcttgtattcgtcctgatgtgcgcgaacaactggataacaatctggcgaacatcagcagccgctggttgccactgccaggtggtttgcgcgggcatgaatacctggcgcgtcgggtaacggaaagcgaactggtacaacgcagcccatttatgatgctggcggaagaagtgcctgaggcgcgggaacatatgggaagctacgggctggcgatggtacggcagagtgataactcatttgtattgctggcgacacaacgaaatctactgacgcttaaccgtgcttcagccgaggaaattcaggatcatcagtgtgagattttgcgttaaggcgaagagttaaggaaagtaagtgccggatatgaaatccggcacctgtcagacttaagcctgtttagccgcttctgcagctttaacgattactgcgaaagcgtcagctttcagagacgcaccgccaaccagcgcgccgtcgatgtctggctgagcaaacagttctgcagcgttagacgcgtttacagagccgccgtactgaatgatcacttgttcagcgatgttagcgtcaactttagcgatgtggtcacggatgaatttgtgaacagcctgtgcctgagccggagttgcagatttgccagtaccgattgcccatacgggttcgtaagcgataaccgcaccttcgaatgccgcagcaccctgagttttcagtaccgcgtcgatctgacgtgcgcaaacttcttcagttttgcccgcttcgttttcagcttcggtttcaccgatgcacagaaccggagtcaggccctgctctttcagcaccgcgaattttttcgcgatcagttcgtcagattctttgtggtaagtacgacgttcagagtgaccgatgatgatgtactgtgcgccgatgtctttcagcatagcggcagaagtttcaccggtgaatgcgccggacaggttcaggtccacgttttgcgcacccagcatgatgtggctgccttcagcttcgcgcttcgccatatcgatgtacatttccggtggtgcgattgcaaccgcacagccagcaacacctgccagctctttacgcaggttagaaaccagctcgtgaaccatgtggcggctgccgttcagtttccagttacccatcactaaaggatgtcgcattttaattctccacgcttataagcgaataaaggaagatggccgccccgcagggcagcaggtctgtgaaacagtatagagattcatcggcacaaaggctttgctttttgtcatttattcaaaccttcaagcgattcagatagcgccagcttaatcggttcaacagcgaaggtcagccccttttcgccgttgtccgcgacaacataacgcagtgcaccttctgtctcggtgtaataacgtttgtttttccccgccgttagtagcgactgcagttttttctggctttgtgttttggtcattaatggggtgagtgtgcggatcactgctgccatgtattcctgagctttcgctttcgcggctttttgctctggcccctggatgggtagccaggtcatttgaatgcttttgatttttaaggtaccgcgctccagcgctgtagaagcatacaagttctcgttaattttacttgcagcacgagtgagattggctttgtcgggactgctgtcgatggcacgaaattcgttcagtggcaggctgggattctggctgttaaagtcttctcgaaactggctgatggagagatcgaaagtaggggctccagccagcagataaggcgcggtcgttgccgtatctggtgtttgtgcatgcgccgttgttgtaacggttaatgcagaacataagagaaaaaacagcgtacaccctggcttcattgacagtaccttttgttatgactggctccgattaaaacgatatctgtcgcccttgtcaaaagggtagaatcctggaaaagacaaccatcaaggaacttacatgaccatacagcaatggttattctcatttaaagggcgtattggacgccgtgatttctggatttggataggcctgtggttagcaggcatgctggtgcttttctcactggcgggtaaaaatttactcgatattcagaccgcggcgttttgcctggtgtgcttgctttggccaacagcggcagtaaccgttaagcgcttgcatgatcgcgggcgttccggcgcatgggcatttttgatgattgtggcgtggatgctgctggcgggtaactgggcgattttaccgggtgtctggcaatgggcggtggggcgttttgtcccgacgttgattttggtgatgatgcttatcgatcttggtgcgtttgttggcacacaaggcgaaaataaatatggtaaagatacccaggatgtgaagtataaagccgacaataaatcaagtaattaacctttaatatatctcttactgctattttttccgggattgttatttccacgatgcaaatgacaatacccggaaaatccttctgaactcttcaccttaagcaatatcaaaaaaaatggtaatccataagatcattacttgtttgttcttcccttaacggcgcattattcttaagtcgtaatcgacagagaggcgaatatacagaggtgccctatgaaagatgtcgtagataaatgcagtactaaaggatgtgcgattgatatcggtacggtgattgataacgacaactgtaccagtaagttttcgcgcttttttgccacccgcgaagaagcagagtcttttatgaccaaactgaaagagcttgccgccgctgcatcctctgcagatgaaggggccagcgtggcctataagattaaggatctggaggggcaagttgagcttgatgcggccttcactttctcatgccaggccgagatgattatttttgagttatcactgcgttcgttagcttgatggagttgctttagaaggagttaaacatggcttataaacacattggcgtggcaatttccgggaatgaagaagatgccttactggtgaataaagccctggagctcgccagacataatgacgctcacctgacgttaattcatattgatgatggcttaagcgagttgtatccgggtatctacttccctgcaacagaagatattcttcaattgttgaagaataagtcggataacaagctgtataaactgacgaaaaatattcaatggccgaagacaaaactgcgtattgaacgcggagaaatgccggaaacactgctggaaattatgcaaaaagagcagtgcgacctccttgtctgtggtcatcatcactcatttatcaaccgtttgatgccggcatatcgcgggatgatcaataagatgagtgcggatttgctcatcgtgccgtttatcgataagtaaccgcttaccagtaatgctccgctgtcatatggcccggtcggcgacgtaaatgtttcgtcatctgccgggtctctttcagcaactgttgtgtatcgcgcaccatctgtggattgccgcacagcatcacatggctggtttctttattcatcggcaggccaatcgtgctttccagttccccactttcaattaatgccggtatccgtccggtgagcgaccccgctgccgtttcccgactgaccaccgtctgaatgcgcagttttccttcgtagcgtttttccagttcctgcatcagtggcaaatagcttaagtcggcggcataacgtgcggcgtgcaccaggaccagatttttgaagcgatctaaatctttacctagttgcagaatcgataaataagggccaatcgctgtaccggttgccagcatccatagcgtttcgcagtgcggcacttcatcgagcacaaagaatcctgccgcttcgctaaccacctgcacttcatcgcctggtttcagtgccgccagtcgtgggcttaatttgccatcggggacggtgaccaggtaaaactccagatcgggattatcgggcgagtttacataggagtaggcgcgctggacgcgttcgccgtcgatttcaaggccaagcttggtaaattgcccggcggtaaacggaagcacgggggcgtgaacggtgagactaaacagggcgtcggtccagttctgcactttagtgactttgcctgttacccaatcagccatgtttttctcctgttttgattgacttgccttatcttcgttctccgaacaaaaaaattccagtcccgaaggactggaaggctcaatcgatcaaatcaatcagaggatgtgcacctgcatttccgggtctttgcgatccagatagtggatggactgaatgcggcgaatggtgcgtgacttgccgcggatcagcagcgtttcggtagtcgcgatattgcctttgcggctaatgccttccagcagatcgcctttggtaataccggtggcagagaagatgacgttatcgctgcgcgccatatcgcccaggcgcaatactttaccggcttcgatgcccatcgctttgcagcgtgccagctcctgctcgccaatgcgacgattctcttcgttgtcgcctttgacgtcatgacgcgccagcagacgaccgttcatgtcgccatctaatgcgcggatcaccgccgcagaaactacgccttccggcgcgccaccaataccgtacagcacgtcaacttcgctgtctggcatacaggtgagaattgaggccgcaacgtcgccgtccggaatagcaaatacgcgtacgccgagttgctgcatttcagcgataacggcatcgtggcgtggtttagccagaatcgttaccgtcagttcgctcaacggtttgccgagcgccgccgctacattgcgcaggttatccgccagcggcaggttcagatcaatggtgcctttggctcccggcccgacaatcagcttctccatatacatatccggcgcattgaggaagcagcctttatcgcctactgccagcaccgccagcgcgttagcctggcccatcgtcgtcatgcgcgtgccttcaatcggatcaacagcaatatctaccgcgtcgccgcgaccagtaccgactttttcaccaatgtagagcatcggtgcttcgtcgatttcaccttcaccaatgacgatggtgccgtcaatgttgacctggttgagcataatacgcatggcgtttaccgccgcgccgtccgcggtgtttttatcgccgcgtcctaaccatttgtagccagccagcgccgctgattcggtgacgcgggaaaattcgatggcaagttctcgtctcatagcaaactctaagcagtaaggaatggcgcgaagtgtagcacaggggaagggagggattattgatgtgtgcggggttgcccccgcacgtttcgggactaccggatgcggcataaacgcttcattcggcatttacattattcgtcgtgttcttcccacgccatcgcgcgtttaaccgcttttttccagcctgcgtaacggtaattacgctcagtggtttcgatgcctggacggaactcgcgctcaatcaccgctttctcttgcagctcgtcgaggttctgccagaagccaaccgccaggcctgcgagataggccgcacccaatgcggtgacttcgcgcacttccgggcgctcaacgcgggtgccgagaatatcggactggaactgcatcaggaaattgtttgctactgcgccaccatccacgcgcagggcgtgcagacggataccagagtcggcctgcatcgcttccagcacgtcacgcgtctgataagcaatagactccagcgtcgcgcgtataatgtggttagcgttcaccccacgagtcagaccgaaaatcgccccgcgcgcatacgggtcccagtacggcgcacccagcccggtaaatgccggaaccacatacacaccattggtgttttgcactttggtggcgaaatattcggaatcgtaggcgtcgttaatcaacttcatttcatcgcgcagccactgaatggatgcgcctgccataaacaccgcaccttccaacgcatagttcacttcgccagtcgggccgcaggcgatggtggtcagtaggccgttttctgatttcaccgctttctcgccagtgttcatcagcataaagcagccagtgccataggtgttcttcgccatcccttctttcacgcacaactgaccaaacagcgcggcctgctggtcaccggcgatcccggagattggaatacgcgtgccgcctttgccgccaatgttagtctgaccgtatacttcggaagaacgacgcacttctggcagcatctcgcgcggaatatccagcacttccagcattttgtcgtcccagtccagggtatggatgttgaacaacatggtacgagaggcgttggtgtaatcggtcacatggacacggccctgagtcattttccagataagccacgtatcaaccgtaccaaacagcaattcaccacgacgtgcacgctcgcgagagccttccacatggtcgaggatccacttcactttggtgccagaaaagtacgggtcaatcaccagaccggtattgctgcggatataatcttctaaaccgtcacgttttaaatgctcgcagatttctgcggtacgacggcactgccagacaatggcgttatagataggcttgccggtttctttttcccagacaatagtggtttcacgctggttcgtaataccgatagctgcaatttgatcggaactgatatcggctttcgccagcacttctaccagcgtggagctttgggtggcccagatttccattgggtcgtgttctacccaacctggttttgggtagatttgctcaaattcgcgctgcgacacgctaatgatattggcatcgtgatccattacgaccgcgcgggagctggtggtgccctggtcgagcgcaacgatatattttttttcagtcatgtttaattgtcccgtagtcatattacagcgaagctttttgttctgaaggagttgtggtttccttttcttccacaacacagatatcgcaaggcaaatggcgaccaatcagtttgcggtaggcaaatgcacctacaatcgcgccaacgatagggccgaaaagcggcaccaggaagtaaggaatgtctctgccgccggtaaaggcgacattgccccagcccgccagccaggcaaagactttcggaccgaagtcacgcgctgggttcatggcaaaacctgtcaatgggcccatagatgcgccaatgaccgcaatcagtagaccaatcagcaagggagccaaagggccgcgtggtacaccgttgccatcgtccgttaacgccaggatcagccccatcagaatagcggtaatcaccatctcaactgcgaaagcctgcacaaaattgatatgaggattagggtaagtagagaaagtgccagccagatcaacactttcaacgctgccgcgaacaatgtgatgagtctgctcgaagtcgaaaaataaattgtagtaaagcccgtaaactaaagccgcagcacagaaagcgccggcaacttgtgaaacgataaaaggaataactttgcgcttgtcgaaacaggcaaacagccacaatgcaatggtaacagcgggattaagatgcgcgccggaaacccctgcggtcaggtagatggccattgccacccccagtccccaaatgacactgatttcccactgaccaaaagacgcaccagcgacttttagtgctgcaacgcaacccacaccgaagaaaatcaacaacccggtaccgaggaattcagcaatgcactggcctttcaaggttgatgtttgactcataatcggatcctgaagagttaatgtttgttgtatgcgtgaaagtcacggacctccacgatgcttgtaggcatgctgtaaacttatcgttaacgagcaaaaacgagaaatatcgaacttaaaatgtgtgtgcctcgtcataaaatgagcgttatcgcgccatttattccatctgattgtacatgatgcatgtttgttagatcattcgcgcaacaaatttattaacattttcgattgatgtggattatgtcaccaggagaaggatgaaaagtgtggcaaaccgtaatctgcaaggcgtgccgctggacagcgatggcgcggcttcatacaatcggagctaactaaagtgcgctcgtatttattaaggcgtcaccggtaatcgggacgaggatttttatccatcaacgccttgcaattcaggagaggtatgacaatgtcattagaagtgtttgagaaactggaagcaaaagtacagcaggcgattgataccatcactctgttgcagatggaaatcgaagagctgaaagaaaaaaacaactcactgtcgcaggaagttcaaaatgcccagcatcagcgcgaagagctggagcgtgagaacaaccatctgaaagaacagcagaacggctggcaggaacgtctgcaggccctgctgggtcgcatggaagaggtctgattacgcttcatcttccgcgtaatttctttactgtgtaggccaacaggtaacgcagaaaaaaggcaccttgcggtgcctttcttatcattcaatatccagcggatcttctgaaagaataatcccggtattgtcggcataaagatggtcgccggagaagaaggtgacaccgccaaaattgacgcggacatcgctttcgccaatgccttcgccagcggcaccaaccggaattgccgccatcgcctggatgccgatatccaactcttccaggtcatctacctgacgcaccgcgccgtaaatgaccagaccttcccattcattttgtactgccagacgcgccagttcagcatcgaccagtgcgcgacgaacagaaccaccgccatcgacgacaagaacacgaccacggccattctgttcgagcagatcgtacagcaacccgttgtcctcgaaacattttaccgtgattatttgtccgccaaacgacgcccgtccgccaaagttggagaacagcggttccacgacgttaacatcttcttgatagatgtcacaaagctcggaagtatcgtatttcataggcttaacattcagttgctgcgagaattttcagtatatcgcgctatgtgggctgttggcaaaatcatcaattgttaattgatatttgtcagttatgctgcccactggcttaggaatatccctaaaacaaacagcaggttagtcagtaacgctcccttgacagtacgttccagcattggtcgcatcgccaccgggtccatttcccgcatcacataacgggcttgcttcaccagtaatggtgccgccagcaggaacagccagccccacaggctatgcagcgaaaagagattaaacagcgccagacacaccagcgagcccatcagcaggcaggcatgataacgacgcgcgttcacttcacctaagcgcaccaccagcgtgtttttgccattttcgcggtcgctattgatatcacgcaggttattaatattcagtactgccgttgccagcaggccgcatgcggtcgccggaaggatcagtgccggaatcaatgtatgagcctgtaaataccagctccccatgacactcaaccagccaaagaaaaccagtacggaaatatcacccagaccgatataaccataaggacgattgcccacggtgtaggtgatagcggcaatgatcgacaacccgccaagaatcaggaaaccgacaaaatcggccagcgtatggcatgccactgcaaccagtgccagcccggagagacagatgagcacgacggtaataatgagcgcccgtttcatctcttgctgggtaatgacccctttttgcatgccgcgtagcggcccaatgcggtcaggtttatcgctgccttttaccgcatcgccgtaatcattggcgaggttagaaaggatctgtaatagcccggcggtaattagtgccagcagggcgaccagcggatcgaagtgaccttgccaccatgccagcgctgtcccgacgataattgcagcaaaggcgagggggagggttttaggtcgtaaactttccagccacgcctgagttcggctaatttgttgttcagtcataatacgcgccaataaaaatggggcctttcagccccatcaaacaatgatgaaaatgattgaacgcgattataggataaaacggctcagatcttcatctgccaccaacgcatccagatgtttgctcacataatctgcgtcaatagtgatattttgaccgcttaaatcgctggcgtcgtaggaaatctcttccattaaacgctccagaacagtgtgtaaacgacgagcaccgatgttttcggtagattcgttcacctgccatgccgcttccgcgatgcgtttaataccggagtcggtaaactcgatatttacgccttcagtcgccatcagtgctttgtactgcacggtgatagaggcattcggctcggtcagaatacgctcgaagtcgctggtggtcagcgcctgcagttcaacgcggattggcagacgaccttgcagttccgggatcaggtcagacggtttcgcaatctggaacgcgccagaagcgataaacagaatgtggtcagttttgaccatcccgtgtttggtggaaacggtgcaaccttctaccagcggcagcaggtcacgctgaacgccttcacgagaaacatccggaccggaagactcgccgcgcttacagattttgtcgatttcgtcgataaacacgatcccgtgctgctcaacagcgtcgatagcgtcttgcttcagctcttccgggttcaccagtttcgccgcttcttcttcaatcagcagcttcatggcgtctttgattttcagcttacgcgctttttgcttctggccgcccaggttctggaacatggactgcagctggctggtcatctcttccatgcccggaggagccataatttcaacgcccatcggtgctgcggcaagatcgatctcgatttctttgtcatcaagctggccttcacgcagttttttgcggaatgcctgacgagcagcggacggttcctgctgctgttcggtctgtccccagttgtttttagcaggtgggatcagcacgtcgagaatacgttcttctgccagttcttcagcgcgataacggtttttctcgatagcctggacgcgtaccattttcacggcggcatcggtcagatcgcgaataatagaatccacttccttaccgacgtagcccacttcggtgaatttggtcgcttcaactttgatgaacggcgcattcgccagcttagccagacgacgggcgatttcagttttaccgacaccggtcgggccgatcatcaggatatttttcggggtcacttcatggcgcagctcttcgttgagctgcatgcgacgccagcggttacgcagagcaatcgccacagaacgcttggcgttgtcctggccgatgatgtgcttatccagttcgctgacgatttcgcgtggggtcatttcagacatgggagatccttacgctttgtagcttaattcttcgatggtgtggaaatggttggtatagatgcaaatgtcgcctgcaatatccaacgccttttcagcaatttcacgggcgctaagttcagtgttttctaacagcgcgcgcgccgcagcctgggcgtaagggccgccggagccgatagcaataagatcgttttctggctgcaccacgtcaccgttaccggtgatgataagcgatgcagtttcatccgcgactgccagcagtgcttcaagtttgcgcagcatgcgatcggtacgccagtcttttgccagctcaacggcggctttgaccagatggccctgatgcatttccagtttacgttcaaacagttcgaacagcgtaaaagcatccgcagtaccgcccgcaaagcccgcgatgactttgtcgttgtacagacggcggacctttttcacgttgcctttcattacggtattgcccaacgtggcctgaccatcaccagcgatgaccacatggccgttacggcgtacgcttactatagttgtcacgagctgaccccttggttacgaatacagagtacaaaccccgtacaaaagtacggggcataatgcaattatagatgggggggattttgagggtttcaacccccggcggcgagccgaatgcagtttgtatgacccgccatcttcaaccgattgagggtgctgtctgcgttctctttgcctttcaccgggccaatgaccacacgattccagccattgttggtggtgattttcgagtcaaagccttcgaacgccagctgagcacgtaccgtctctgcctgttccgcgcctctgaacgaaccgcactgcaccatccagcggcgttcgtcttttttctccgccgtcggttttggcgcgtcagcggcacgagcaactggcgcagcttgctgcggcttcgactgcgcagtcgtgtgcgcaggagtttgcagcagatcctggtacggctgctgagaagaagccggtttagactggcgcggttgcgcctgtaccggtgcggcttgcgacgtacgcgtctgctgctgccagctttgttcagtcgtacgcgactgctgagccaggcgttgctgttccgctaattgctgcgcctgacgttggcgctgtagcgtttgctgacgctgttccggcgtctgttcattccacggaacttcaaccagctgcgttggctgctggcgcatatcagcctgcatttgttcaagaagctgacgttgttctggtgtcagttgctccggcgttttcacttcaccaccggcagaaggttctgtgggcgcacgcactcccggctggcgactttccagctctttaatgtagcgccagcgttcttctggttttggtggtagtccgtttccggtcactttctggctttgcagcgtctcggactcttctttcttgtgatgcgtaatgaagtacagaccaccgataaaggtcacaagaacggcggcagcaatagcgaccatagcgggagaaaccgcaggcagatttcgttgctttttccgtgaggtgctcttttttcgccgcgaaggtgccggttggctgcggcgtacataatctcgttgtgccactatcgtttcgctgtatttattcgttcgtcagcccgccatgttacttaagcggcgggcctttgaccagtcacggcagtcttaaaggtttactttaaggtaacgcgcgtgttgatccccggatgataagttcgcagtccattaaacgagagccactgccaacgtgttgcccctgcatttgatcaagcaataacagcatagcttcccgaccgatttcgtaacgcggctgcgcgatggttgtcagcggcggatcacaaaattgcgtcaggtcgatgttatcaaaaccgattatggaaaggtcttccgggactttcagcccctggcgttttgcctgagaaagtgcgccgagcgccatcacatcgctatggcagaagacagcagtaggcggttgtggaagatcaagcagctgctgcatcgctttgcttccggcttcgaaggtgaagtcgccacgggcgatgtattgcggatcaaccataatgccgcagcgacgcagcgcctgaacatagccttgcaggcggtagtgacacagcggcatctcttcgggaccggctatacagccaatccgtttatgcccttgctcatataaataatttactgcatcaaatgcggcggtcagattgtcgatatgaactgtaggcagctccagctccggtgcaaattcgttcgccatcaccatcggcggcagattacgctgttcctcaatgctggcatcaaacggcagccttgaacccagcaacaacatgccatcaatttgcttggtgatgatcaaatcgataaaggttttttcctgctgattttgatgcgcacagtcgccaatcagcaccagatatccgtgatttgccgccgtaacttcgataccgcgaataatttcgctaaagaagggatcgcagatatccgggacaatcaccagaatggtgcgggattcattacgcttgacgttgcgccccataggctgcggtaaataacccacttcccgggccgctttttcaacccgattacgggtggcctgggagactttatcgggattcattaatgctcgggagacggtcgctgtagagacttttgccttgagggcaacgtctttcatggtcgcggcagtttcctgcttcttcgctttcacactcactcctcgcctggcacgtcaggcgtactacatccatgtttacttcacatcggcaacatttttagcagatagcgcgtgaaaacggttacagaattttcatgaaaagtgtgatgaatattgaatttttcgatccgcctcgcatcgtgagcggtttaaccctcaatcggatcaacatccagcacccatttcaccttacgggaatccggtattgtattgatgagcgccagcgtaccgttaatgatgtgttgcaagcgcacgcgggaagggtgctgcaacaatatctgccagcgccagcgaccgccacgtttaggtgccagagccggaaccggaccgagaacccacagtttctcgtctgccagtgggctggagaggatcagattacgcagttgttgcaggaacaatggcgcgtgctgattgttatgatcttccgcacgcacaatcacatggctggtccacggcggtagctgcatcattcgccgctcagccagcgcctgttcggcaaaggcgtcgtagcctttatagagcaacgtttgcaacagaggatgttccggatggtgcgtttgcagcaccacttcgccctgtttacccgcacgcccggcacgaccggcgacctgggtgtaaagctgagcgaaacgctctgccgagcgaaaatcggcagaaaacagcgcgccgtccacgtccagtaatgcaaccagcgtcacatccgggaaatggtgacctttcgccagcatttgtgtaccaatcaaaatccgcgcgccgccgcgatgtacttctgccagttgctgttccagcgcccctttgcggctggtggtatcgcggtcgatacgagaaatgggcacgccggggaacaacggcgcgagcgtctgttcaagctgttcggtgcccagccccacggggaccaggtgcgtggaaccgcaggaagggcactggcgcggcaccggacgctgactgtcacagtggtggcagcgcagatggtgctgcgcctgatgcagcgtgtagtagtgatcgcaacgtgggcattcggcaatccagccacagtcgtggcacagcagtgcaggcgcaaagccacggcggttaagaaagagaatgacctggttatcagcctgtaaatgctggcgcatacgagtgattaacgccggagccagacctgcctgcaccttctgaccttttaaatccagcacatgttgaattgccggacgcgcattccctgcccgacgggtcaggcgcagcaggcggtattttttctgctggacgttgcataacgtttccagcgcgggcgttgcggagccaagaataatcgggatttgctcgctgtgcgcacgatacaccgccaggtcgcgggcatgatagcgccagccttcctgctgcttgtaggagctgtcgtgctcttcatcaatgacaatcacgccgagatttttaaacggcgtaaacagcgcggagcgggtgccgatcacaatcgccgcctcaccatttttcgctttcagccacgccgaaagacgctcgctgtcgttcaggccggaatgcagaacttccacgggggcattaaaacgttcacgaaaacgggcgatagtttgcggtgtcaggccgatttccggcaccatcaccagcgcctgtttgccctgagcgagcacgttttccagtacgctgagataaacctccgttttaccggaaccggtaacgcccgccagcagccaggcagaaaaagtatctgccgcgctatgaattgcgccaacggcggtggcctgttcggtattcaatcgcaaccgctcaccagaaacggcatagttcgttcgccagtcgctaaactctggtgtttcacttgctaaatcacacagaccttttttgcgtagcgcctgcaacgcggcatcattaaattcgagcgtggcgacctggtcgcgccagattttgccttgccgtaacgccgccagcgcctgttgttgcttgggggagcgtttcaggctgttcagatccaccgcctggccttgttcagtggcaaaccagtaccacatcggcgcgttcgccgcaggccgcccctggcgtagtaaaatcggcaaggcatgaaacagcacatcgccaatcggatgatgatagtaatctgccgcccatagcagcaatcgccagacggagtgagtaaacaccggctcactatccagcacttcgactaccgcttttagctcattgagcggcagttcgctggcatcgctaactgataccacaatcccgatgcgctcctgctgtgtgccaaacggcacgcgcacgcgacacccagctttaaccgtcatgccttctggcagcagatagtcaaaggtacgaggaagcggaacgggcaaggcaacgtgggcaacgggcatagcatcatcctgacttgaaattcggtgggttagtatacacattgccgtagaagagtgcggatcagtttgcatacgctggttaatttctgtatgatttcgcgccttcgtacgaaatgatcgtattgaagctatacttttaacatcgcgtggtgtctggcgttagggctggaagagcgacgcggccttaaaccgaggttttcccatgaaaaaagatattcacccgaaatacgaagaaattactgctagctgctcttgcggtaacgtaatgaaaatccgctccaccgttggtcatgacctgaacctcgacgtgtgcagcaagtgccacccgttcttcactggcaaacagcgtgatgttgctaccggtggccgtgttgaccgcttcaacaagcgtttcaacatcccgggcagcaaataagaccggatttccgaaaaaagcgccgcacggcgctttttttgtgcctgaattttggtcgtattaccacgaaaacagcggccattctttggcgactgtggtgagttgtggcgcatcgaaaacggcttgtggcgagaccaccgtttcctcaagcggaatattcttgccgtaacgttctttgagctttgcctgaacttgtgggctgctcaggtcgaactctttcaacttctgctgctcgcccacgcgcattcccagcgcgttctggtaaaccttccacaccacttccgaacagtactggcgatcgtcgctccatgagaagctgaaatcatacggtttaccgagataacgttttgccgtttgcgccagtttttgctgttgttcaacactcagtccgccttcaacgcggcgaacaacgtatttgcccttttcaccatgggcgatccactgcttgagcggggtgtatttcaccgggccgactgcttcaaaaacgtagggctttttgttgcgtatcaccagcataccggtgtggctataatcggtatgggtcgccagttggatcgctttactttgcgatgagcgagagatctgaaagatgatgtcgccggtttgtggctgccaggcaaaggcaggtacagaaaccagcaggctgaggatcagcagcctgtttttcatagttaaacgtccatgtataaaaagcggtgggtcgcagacaacgtgctcgttgtttatgccggatgcggcgtgaacgccttatccggcctacaagttcgtgcaaattcaataaattgcaatatgacgtaggcctgataagcgtagcgcatcaggcgattccactccgcgccgctcttttttgctttagtattcccacgtctccgggttaatccccatctcacgcatgatctcttttgccgcttccgggatttcgtcgctgcgctctttacgcagatcggcatcatccggcaaaggttgcccggtaaaggcatgcagaaacgcttcgcacagcagctcgctgttggtagcgtgacgcaggttgttcacctgacgacgcgtgcgttcatcggtgaggatttttaacaccttaagaggaatggaaaccgtaatctttttgacttgttcactcttcttgccgtgctcagcgtatgggctgatatattcgccgctccattcagccatgagatacttaatcctcttcgtcaataaattgagaccagaccacacagttgatgtgggtactgaccgtaaacccgcatagtttaccgtacaggcgttaccgtgacatcgtgtaatgcacctgtcggcgtgataatgcatataattttaacggctatttgggatttgctcaatctatacgcaaagaagtttagatgtccagatgtattgacgtccattaacacaatgtttactctggtgcctgacatttcaccgacaaagcccagggaacttcatcacatgacgcgtaaacaggccaccatcgcagtgcgtagcgggttaaatgacgacgaacagtatggttgcgttgtcccaccgatccatctttccagcacctataactttaccggatttaatgaaccgcgcgcgcatgattactcgcgtcgcggcaacccaacgcgcgatgtggttcagcgtgcgctggcagaactggaaggtggtgccggtgcagtgctcaccaataccggcatgtcagccatccatctggtaaccaccgtctttttgaaacctggcgatttgctggttgcgccgcacgactgctacggcggtagctatcgcctgttcgacagcctggcgaaacgtggttgctatcgcgtgttgtttgttgatcaaggcgatgaacaggcattacgggcagcgctggcagaaaaacccaaactggtactggtagaaagcccaagtaatccattgttacgcgtcgtggatattgcgaaaatctgccatctggcaagggaagtcggggcggtgagcgtggtggataacaccttcttaagcccggcattacaaaatccgctggcattaggtgccgatctggtgttgcattcatgcacgaaatatctgaacggtcactcagacgtagtggccggcgtggtgattgctaaagacccggacgttgtcactgaactggcctggtgggcaaacaatattggcgtgacgggcggcgcgtttgacagctatctgctgctacgtgggttgcgaacgctggtgccgcgtatggagctggcgcagcgtaacgcgcaggcgattgtgaaatatctgcaaacccagccgttggtgaaaaaactgtatcacccgtcgctgccggaaaatcaggggcatgaaattgccgcgcgccagcaaaaaggctttggcgcaatgttgagttttgaactggatggcgatgagcagacgctgcgtcgtttcctgggcgggctgtcgttgtttacgctggcggaatcattagggggagtggaaagtttaatctctcacgccgcaaccatgacacatgcaggcatggcaccagaagcgcgtgctgccgccgggatctccgagacgctgctgcgtatctccaccggtattgaagatggcgaagatttaattgccgacctggaaaatggcttccgggctgcaaacaaggggtaaaaatgagtgtgattgcgcaggcaggggcgaaaggtcgtcagctgcataaatttggtggcagtagtctggctgatgtgaagtgttatttgcgtgtcgcgggcattatggcggagtactctcagcctgacgatatgatggtggtttccgccgccggtagcaccactaaccagttgattaactggttgaaactaagccagaccgatcgtctctctgcgcatcaggttcaacaaacgctgcgtcgctatcagtgcgatctgattagcggtctgctacccgctgaagaagccgatagcctcattagcgcttttgtcagcgatctggaacgcctggcggcgttgctcgacagtggtattaacgatgcggtgtatgcggaagtggtgggccacggtgaagtgtggtcggcgcgcctgatgtctgcggtacttaatcaacaagggctgccagcggcctggcttgatgcccgcgagtttttacgcgctgaacgcgccgcacaaccgcaggttgatgaagggctttcttacccgttgctgcaacagctgctggtgcaacatccgggcaaacgtctggtggtgaccggatttatcagccgcaacaacgccggtgaaacggtgctgctggggcgtaacggttccgactattccgcgacacaaatcggtgcgctggcgggtgtttctcgcgtaaccatctggagcgacgtcgccggggtatacagtgccgacccgcgtaaagtgaaagatgcctgcctgctgccgttgctgcgtctggatgaggccagcgaactggcgcgcctggcggctcccgttcttcacgcccgtactttacagccggtttctggcagcgaaatcgacctgcaactgcgctgtagctacacgccggatcaaggttccacgcgcattgaacgcgtgctggcctccggtactggtgcgcgtattgtcaccagccacgatgatgtctgtttgattgagtttcaggtgcccgccagtcaggatttcaaactggcgcataaagagatcgaccaaatcctgaaacgcgcgcaggtacgcccgctggcggttggcgtacataacgatcgccagttgctgcaattttgctacacctcagaagtggccgacagtgcgctgaaaatcctcgacgaagcgggattacctggcgaactgcgcctgcgtcaggggctggcgctggtggcgatggtcggtgcaggcgtcacccgtaacccgctgcattgccaccgcttctggcagcaactgaaaggccagccggtcgaatttacctggcagtccgatgacggcatcagcctggtggcagtactgcgcaccggcccgaccgaaagcctgattcaggggctgcatcagtccgtcttccgcgcagaaaaacgcatcggcctggtattgttcggtaagggcaatatcggttcccgttggctggaactgttcgcccgtgagcagagcacgctttcggcacgtaccggctttgagtttgtgctggcaggtgtggtggacagccgccgcagcctgttgagctatgacgggctggacgccagccgcgcgttagccttcttcaacgatgaagcgattgagcaggatgaagagtcgttgttcctgtggatgcgcgcccatccgtatgatgatttagtggtgctggacgttaccgccagccagcagcttgctgatcagtatcttgatttcgccagccacggtttccacgttatcagcgccaacaaactggcgggagccagcgacagcaataaatatcgccagatccacgacgccttcgaaaaaaccgggcgtcactggctgtacaatgccaccgtcggtgcgggcttgccgatcaaccacaccgtgcgcgatctgatcgacagcggcgatactattttgtcgatcagcgggatcttctccggcacgctctcctggctgttcctgcaattcgacggtagcgtgccgtttaccgagctggtggatcaggcgtggcagcagggcttaaccgaacctgacccgcgtgacgatctctctggcaaagacgtgatgcgcaagctggtgattctggcgcgtgaagcaggttacaacatcgaaccggatcaggtacgtgtggaatcgctggtgcctgctcattgcgaaggcggcagcatcgaccatttctttgaaaatggcgatgaactgaacgagcagatggtgcaacggctggaagcggcccgcgaaatggggctggtgctgcgctacgtggcgcgtttcgatgccaacggtaaagcgcgtgtaggcgtggaagcggtgcgtgaagatcatccgttggcatcactgctgccgtgcgataacgtctttgccatcgaaagccgctggtatcgcgataaccctctggtgatccgcggacctggcgctgggcgcgacgtcaccgccggggcgattcagtcggatatcaaccggctggcacagttgttgtaatttcagaaatttaataatgcccggtactcatgttttcgggtttatggtttctaatgaaatatattgaattatcataggattaggccggattaagcgtttacgacgaatccggcaagaagcaataagtacatggttagtttatatttgcagtccggtttgctttgcataccggattttctttttcttaccatcctgaagttttttcatcttccctgatttttcctcaccatcattggtcatttttcggttgacgcccttcggcttttccttcatctttacatctggacgtctaaacggatagatgtgcacaacacaacatataactacaagcgattgatgaggtaaggtatgagcttttttcacgccagccagcgggatgccctgaatcagagcctggcagaagtccaggggcagattaacgtttcgttcgagtttttcccgccgcgtaccagtgaaatggagcagaccctgtggaactccatcgatcgccttagcagcctgaaaccgaagtttgtatcggtgacctatggcgcgaactccggcgagcgcgaccgtacgcacagcattattaaaggcattaaagatcgcactggtctggaagcggcaccgcatcttacttgcattgatgcgacgcccgacgagctgcgcaccattgcacgcgactactggaataacggtattcgtcatatcgtggcgctgcgtggcgatctgccgccgggaagtggtaagccagaaatgtatgcttctgacctggtgacgctattaaaagaagtggcagatttcgatatctccgtggcggcgtatccggaagttcacccggaagcaaaaagcgctcaggcggatttgcttaatctgaaacgcaaagtggatgccggagccaaccgcgcgattactcagttcttcttcgatgtcgaaagctacctgcgttttcgtgaccgctgtgtatcggcgggcattgatgtggaaattattccgggaattttgccggtatctaactttaaacaggcgaagaaatttgccgatatgaccaacgtgcgtattccggcgtggatggcgcaaatgttcgacggtctggatgatgatgccgaaacccgcaaactggttggcgcgaatattgccatggatatggtgaagattttaagccgtgaaggagtgaaagatttccacttctatacgcttaaccgtgctgaaatgagttacgcgatttgccatacgctgggggttcgacctggtttataaatagtgtggcttttgtgaaaatcacacagtgatcacaaattttaaacagagcacaaaatgctgcctcgaaatgagggcgggaaaataaggttatcagccttgttttctccctcattacttgaaggatatgaagctaaaacccttttttataaagcatttgtccgaattcggacataatcaaaaaagcttaattaagatcaatttgatctacatctctttaaccaacaatatgtaagatctcaactatcgcatccgtggattaattcaattataacttctctctaacgctgtgtatcgtaacggtaacactgtagaggggagcacattgatgagcacgtcagacgatatccataacaccacagccactggcaaatgcccgttccatcagggcggtcacgaccagagtgcgggggcgggcacaaccactcgcgactggtggccaaatcaacttcgtgttgacctgttaaaccaacattctaatcgttctaacccactgggtgaggactttgactaccgcaaagaattcagcaaattagattactacggcctgaaaaaagatctgaaagccctgttgacagaatctcaaccgtggtggccagccgactggggcagttacgccggtctgtttattcgtatggcctggcacggcgcggggacttaccgttcaatcgatggacgcggtggcgcgggtcgtggtcagcaacgttttgcaccgctgaactcctggccggataacgtaagcctcgataaagcgcgtcgcctgttgtggccaatcaaacagaaatatggtcagaaaatctcctgggccgacctgtttatcctcgcgggtaacgtggcgctagaaaactccggcttccgtaccttcggttttggtgccggtcgtgaagacgtctgggaaccggatctggatgttaactggggtgatgaaaaagcctggctgactcaccgtcatccggaagcgctggcgaaagcaccgctgggtgcaaccgagatgggtctgatttacgttaacccggaaggcccggatcacagcggcgaaccgctttctgcggcagcagctatccgcgcgaccttcggcaacatgggcatgaacgacgaagaaaccgtggcgctgattgcgggtggtcatacgctgggtaaaacccacggtgccggtccgacatcaaatgtaggtcctgatccagaagctgcaccgattgaagaacaaggtttaggttgggcgagcacttacggcagcggcgttggcgcagatgccattacctctggtctggaagtagtctggacccagacgccgacccagtggagcaactatttcttcgagaacctgttcaagtatgagtgggtacagacccgcagcccggctggcgcaatccagttcgaagcggtagacgcaccggaaattatcccggatccgtttgatccgtcgaagaaacgtaaaccgacaatgctggtgaccgacctgacgctgcgttttgatcctgagttcgagaagatctctcgtcgtttcctcaacgatccgcaggcgttcaacgaagcctttgcccgtgcctggttcaaactgacgcacagggatatggggccgaaatctcgctacatcgggccggaagtgccgaaagaagatctgatctggcaagatccgctgccgcagccgatctacaacccgaccgagcaggacattatcgatctgaaattcgcgattgcggattctggtctgtctgttagtgagctggtatcggtggcctgggcatctgcttctaccttccgtggtggcgacaaacgcggtggtgccaacggtgcgcgtctggcattaatgccgcagcgcgactgggatgtgaacgccgcagccgttcgtgctctgcctgttctggagaaaatccagaaagagtctggtaaagcctcgctggcggatatcatagtgctggctggtgtggttggtgttgagaaagccgcaagcgccgcaggtttgagcattcatgtaccgtttgcgccgggtcgcgttgatgcgcgtcaggatcagactgacattgagatgtttgagctgctggagccaattgctgacggtttccgtaactatcgcgctcgtctggacgtttccaccaccgagtcactgctgatcgacaaagcacagcaactgacgctgaccgcgccggaaatgactgcgctggtgggcggcatgcgtgtactgggtgccaacttcgatggcagcaaaaacggcgtcttcactgaccgcgttggcgtattgagcaatgacttcttcgtgaacttgctggatatgcgttacgagtggaaagcgaccgacgaatcgaaagagctgttcgaaggccgtgaccgtgaaaccggcgaagtgaaatttacggccagccgtgcggatctggtgtttggttctaactccgtcctgcgtgcggtggcggaagtttacgccagtagcgatgcccacgagaagtttgttaaagacttcgtggcggcatgggtgaaagtgatgaacctcgaccgtttcgacctgctgtaatctgaccccgttcagcggctgcttgctggcagtcgctgaacgttctttaccagcgtatagtgggcgaacgaaaactacacactggatctctcatgtctgccgcaggaaagagcaacccactggcaatcagtggcctggttgtgctcacacttatctggagttatagctggattttcatgaagcaagtcaccagttacatcggtgccttcgactttaccgccttacgctgcattttcggcgctctcgttttattcatcgtccttttattacgtggtcgcggaatgcgcccgacaccgtttaaatacaccttagccattgccctgttacaaacctgcgggatggttggtctggcgcagtgggcgttggtcagcggaggtgcggggaaggtggcgatcctgagctataccatgccgttctgggtggtgattttcgccgcgttgtttctcggtgaacgcctgcgacgtgggcaatatttcgcgattctgattgccgctttcggtttatttttggtgttgcagccgtggcaactcgatttctcttcgatgaaaagcgccatgctggcgatcctctccggtgtcagttggggggcgagcgccattgtcgctaaacgcctttacgcccgtcatccgcgcgtggatttattgtcgttaacatcctggcagatgctgtatgcggcgctggtgatgagtgtggtcgctttactggtaccgcaacgtgaaattgactggcaacccaccgtgttctgggcgctggcctacagtgcgattctggcgacggcgctggcgtggagcttatggttgtttgtattgaaaaacttgcctgccagtattgccagcttaagcacactggccgttcccgtttgcggcgtactcttttcctggtggctgctcggtgagaatcctggcgcggttgagggtagcggtattgtgctgattgtgctggcactggcgctggtgagccgtaagaaaaaagaagccgtcagtgtaaaaaggatctgaattttttcttcatgtggggcgatctcttatttaacaaaataacgataatgccccaccatccgccagttaaacagcacatcttcttcctgcgcgcctgcgccaatgttatgtatcaccagcggcgtaccgtcgcgggcgaagccatctgaaaccaccccaatatgtgccagcccgttatccagtcgccaggagacaatatcgcccgcttgatagtcactggggttcttgctggtggggcgtgttttatcatggcggctaaaccaggtttccagattaggcacccgacggtgatcgatgttgctgtccgggcgctttaacttccatttttgcgggtactcagcaaaattcttcgccatatcttcgtgaaccagtttctgcaaatcgaccttctggctgcgcaatgcgcggatcaccacatcggaacatacaccgcgttcttgcggaacatcaccgccaggataagtaagctgcacatacgccggatcgtaaaatagcgtgctgccaatttgctgtctggcaccgtctgcgatggcaaggttggtattggcctggatttgtaccacggttggtggaacggcgggagattttaaggagtggctggtaaatgccgttagcaggctgagcagcgccagtgaagctttcatctggttcgtccgtgaaaataagagtcacagattcgaccttccgggctaacgattgttctgtagagaaaatgtccagaagcggataaaaaattcctgaacaacgtgggagtttcagattactggcacagagtgccggatgcggagtgaacgccttatccggcctacaaaagcacgcaaattcaatatattgcagagattgcgtaggcctgataagcgtagcgcatcaggcaattttgcgttcaaactcccggacaagccgggagtttggagtaggttattcccactcttgcaggaaacgctgaccgtactggtcggctaccagcagagcggcgtaaacctgatctggcgtcgcgccgccaggcatgttgtggatggtttcaccttctgcacatgccgcttctgccacaattcgcattttcgccgggacatcttctttaatatccagttgagcgagagttattggcaaacctaccgcatggctaagtgcagctacggtttcgatttcctcaaccggtgcgttttccagaaccagctgcgtcagcgtaccaaatgccactttttcaccgtgataatagtgatgcgcgtccgggatagcggtcaggccgttatgcactgcgtgcgccgcagccagaccaccactttcaaagcctacaccgcttaaataggtgttcgcttcaatcacgcgctccagcgccggagtcactacatgctgttcggcagcaagcatcgctttttcgccttcttccagcagagtgttgtagcacagttctgccagtgccagcgccgcctgggtacacttgccgcccgccatagtggtagcgccgctacgggaacaggcgcgtgcttcaaaccaggttgccagcgcatcgccgatacccgccgctaacagacgtgcaggtgcgccagcgacgattttggtgtcgacaatgaccatattcgggttatttggcaacagcagatagcggtcaaactcaccctcatcggtgtagataacagacaatgcgctgcacggtgcatcggtagaggcgatagtcggtgcgatcgctaccggaacacccatgaaatgtgccagtgctttggcagtatcgagggtttttccgccaccgataccgagaattgcgccacactgcgcagtctccgcgatgccacgcagacggtcgatctcattttgcgaacattcaccgccaaacggcgcaatttctactaccagtccagcatctttaaagcttttctcgacagtggattgagcaaaacctaaaacaaatttgtcacccaccactaaccagcgttctgccagcggcttcaggtattcgcccagacgattaatcacatcagcgccctggatgtatttacccggtgattgaataatgcggtccataattgctcctttagagatgagtaatgccaaatgcggcattccagtcgtgttcgaacttctctatagctgactctaccgcaggggtgttgagcatttgttgcgctacatctaagggcagggtgatggattcacatcctgccagtaaacagtccagcgcctgacgcggcgttttaaagctggctgccagcaccatgctttctggcgcgtgcatttctaacagcgtttgcagctcctgaaccgtacgaatgccgtctccgccctgggcatctacgcggttaacatacggagcaacgtattttgcccctgccagtgcggctaataacccttgtgcggcgctatatacagcagtgccaagtgtagtaataccctcttttttcagtattttaattgctgccagaccttcggaagtcaccgggattttcaccacaatacccggaatagcgtcgcgcaggcgcttcgcttcttccaccatcccctgcgcgtcgcggctcatggtctgagcaaacagaatgccctcatcaccaatcgctttttgcagacgcggcagcacttcccatatggactccttgctggcagcgataatgctcgggttagttgtcaccccggcaatggggaatatgcgtgccagacgttcgacttctgcgacgttagcggtgtccagatacagttccatgatgtttccttttacagttccagttcatgttgcagcaggctggcgatagcgtcggcagaggcggcgttaaccagcgcgttacggaattcttcgtgcatgatgcggcgagcgaggcgcgagaaaatgcgcatatgctgatcgcccgcagcgtgtttgttcagggttaacataatgatgaattgcgcttcatcatcgccccagcgcaccggcgcttgcagacgcgctacgctgatggtggattgctcaatgtgttctgatttgctgtgtggaatggcaaaactaaagcccagaccggtagagaaaacggcctcgcgcgcccacaagtcggcttccagtttacgcggatagcggcagcgccctgccagcagcaggttatcggtcatgcctttgagcacttcttctttgctgcgccagtcgctttccagcgtgatgcactcggcggtgaccagtggtgcgtcctgttgggtcatgcggaattgcgccagcagatgttccacttccagcgaagtacggcaggccattgcctggttgagcaactggcggcactcacggctatcaagttgcgccattcgcgctttcgccgccggaattgacggtgcgctcatgctgagttcatccagccctaaaccgaccagcaacggcagcacggaacctttcgctcccagctcaccgcacagaccaatccatttgccctggcgatgcaccgcctgcacggcgtaatcgagcgcccgcaagaatgccggattcaggctgttgtagtgacgagtaaccttagcgttatcgcgatccaccgccagcagatactgcgtcaggtcattactaccaatactaaagaaatcaatctcttcgcagcattgatcgatgatgaacatcaccgacggcacttccagcataatgccgagctggatcttctcatcaaacggaatgtgttcgttacgtagttgctgtttggcttccgccagtttttctttcacccataagatctcttccattgaagagatcatcgggatcatgattttcaggctgccgtgagcggaggcgcgcaggatcgaccgtagttgtgtggtaaataacgacgcgtactcttcataaatacgcaccgcgcgataaccgaggaacgggttagcttctgccggaatgttcagataatcaacgggtttgtcgccgccaatgtccatagtgcgcacaataatgctgcgtccgttggcagactccagcgcctgacaaaaaatgttgtacagctcgctttcgcccggtgcactggtgcgatccatatagagcatttcagtgcggaacaaaccaacgccttccgcaccattgccgaatgcggcctgcgcttccacggagtgagcgatgttagcggcaatttcaatgcggataccgtcagcggtacgggcttgttgggtcagccagacatgctgttgctcacgaagggcgtcctgtacgcgggcttcttgctgataataacgagctacggcttcccctggctcaaccacaatcgccccggcgttgccgtcgatataaatcgtttgatgctgccacggagtaagggcatcaatatccacaccaaccagtgtcggaatgttgaacgaacgggcaagaattacggtatgtgaggtggtgccgccacttttcagtaacagacctttgaggtgatttttatccagttcgaggaactggctgggggtcagttcatcagccatacaaatggcgggctgcgtcagtttgcccggtgccgggaagcgttgctcaccgtagatttgctggagtaactggaagcagacgtcgcgtacgtccagggcacgttcttgcaggtagctgctgctggaacgggcgaactcttcgcaaaagtgattcgcactggtgacaatcgcttcggcgcagcttaatccggcgctgacgcctgccagtaaatgttcgcgcagggaagtatcgccagccagggatcggtgcgcttccagaatcgcgctggtagcaccgtcgctatccagcagacgaaactcaatgtttttcagtaccagcgtcaggccgttttccagtgcggattgctcggcgtcaacgcctttggcagcaggaagattacccagcgcattgagatctaaagaagagatcggcgtcagaatgccgcctgcgctaccgctgcacacggtgcgggcgcggataatttgcggattcagattggtcagtgaaaccggcagtggttccagttcgtcagatttaacttccgccagcggcgcatcgcagtgggggaattcatcacgtaaccactggctcaagcgctggtgtgctgcttgttcgtcagccccggaaatcagtaactggcagttatcgcccaccagtgtatcggtgccaatcagcgccagggcgcttttggcgttgcccttgcggtcagtgcgcaggttatgccactcaatttgagatgaaaaagtattacacagcgtttcaacgtggcttgccggacgcgcatgtacgccgttaggcagctcacaaataaattccacaatcagggccattgcctctctcccggtacggttttctgtttacaggataagagcgcacggcaacggcctgccatgtgacaaatctgccaaaagctggacaaatgtaatgtaaccgtcaatttgcgacgcgtctcacaagacgctgttttgcggcatgcttccggtttatcgcaagttatgaggcggatcgcatttttgtactgatattacaaaagtccagtaaatggcctttttatccactgtttgctccgcctgcgattgcctattgtttcctccatcaaaaatatggacatgggctttcgcaagcccgggagcagcttatgaatgagttggtgcagatcctgaaaaatacccgtcagcatttaatgacgggcgtttcacacatgattcccttcgtggtatcgggcggtattttgctggcggtttccgtcatgttgtatggcaaaggcgcagtgccggatgccgtagccgatccaaatctgaaaaaactgtttgatatcggcgttgcgggcttgacgctgatggtgcctttcctcgcagcgtacatcggttattccattgcagagcgttctgcgctggctccgtgcgctatcggtgcctgggttggtaacagctttggtgcgggcttctttggtgcactgatcgccgggattatcggcggcatcgtggtgcattacctgaagaaaattccggtgcataaagttctgcgctcggtgatgcctatcttcattattcctatcgtcggcacactgattaccgcaggcatcatgatgtggggcttgggcgagcctgtaggggcgttgaccaacagcctgactcagtggcttcaggggatgcagcagggcagcattgttatgctggcggtgatcatgggtctgatgctggcgttcgatatgggcggtccggttaacaaagtggcctatgccttcatgctgatttgcgttgctcagggtgtttataccgtggtggccatcgctgccgtgggtatttgtatcccgccgctggggatggggctggcgacgctgattggtcgtaaaaatttctccgcagaagagcgcgaaaccggcaaagcggcactggtgatgggctgtgttggcgttactgaaggggcgattcctttcgccgctgccgatccgctgcgtgtcattccttccatcatggtcggttcagtttgtggtgcagtaactgcggcgctggtcggtgcgcagtgctatgcaggctggggtggtctgattgtgctgccggtggttgaaggcaagctgggttatatcgcagcagtggctgtcggagcagtggtgacggctgtttgtgtgaacgtgctgaaaagtctggcgcgtaaaaatgggtcttcgactgatgaaaaagaagacgacctggatttggattttgaaattaattaattgaggaacgagccatgacgaaaattattgcagtaaccgcatgtccttcaggtgttgcccatacctatatggcagcagaggcgctggaaagtgccgcgaaagcgaaaggctgggaagtgaaagtagaaacccaggggtcaattggtctggaaaatgaactgactgcggaagatgtggcgagcgctgatatggtgattctgaccaaagatatcggcatcaagtttgaagagcgttttgctggcaagaccatcgtgcgcgtcaacatcagcgatgcagtaaaacgtgctgacgccattatgagcaaaattgaagctcacctggcgcaaaccgcttaagttcttctcccgctcgcaagggcgggttcgctttcccacaggagttcctcatgacgaatcgtatctctcgcctcaaaactgcactgtttgccaatacccgtgaaatctcgctggagcgggcgctgctttataccgccagccatcggcaaaccgaaggcgaaccggtgatattgcgccgggcgaaagcaacagcgtatatccttgaacatgttgaaatttcgattcgtgatgaagaactgattgccggtaaccgcaccgtaaaaccgcgcgccgggattatgtcgccggaaatggacccttactggctgctgaaagagctggatcaattcccgacgcgtccgcaggaccgctttgctatcagcgaagaagataaacgtatctaccgtgaagagttgttcccgtactgggaaaaacgttcgatgaaagatttcatcaacgggcagatgacagatgaagtaaaagccgcgaccaacacgcagattttcagcatcaaccagacggataaaggccaggggcacattattattgattacccacgcctgttgaatcacgggctgggtgagctggtggcacagatgcagcaacattgtcagcaacagccggagaatcacttttatcaggccgcgttgttactgctggaagcctcgcagaaacacattttgcgttacgccgaactggcggaaacgatggcggcaaactgcacagatgcccagcgtcgcgaagagctgctgactattgcagagatctcccgccataacgcgcaacataagccgcagacgttctggcaggcgtgccagttattctggtacatgaacatcattctgcaatacgaatccaacgccagttcgctatcgttggggcgcttcgaccagtatatgttgccgttctatcagacatcattaacccagggcgaagatgcggcgttcctgaaagaactgctcgaatctttatgggtgaaatgcaacgacatcgtgctgttgcgctccaccagtagcgcgcgttatttcgccggtttcccgaccggctataccgcactgctcggcgggttaaccgagaacggacgtagcgcggtgaacgtgctttcgttcctttgccttgacgcctatcaaagcgtgcaattaccgcaaccgaacctcggcgtgcgcactaacgccttgatcgacacgccgttcctgatgaaaaccgccgaaaccattcgcttcggcaccggtattccgcaaatctttaacgatgaagtggtggtgccagcgttcctcaaccgtggcgtttcgctggaagatgcgcgcgactattccgtagtgggctgtgtggaattatctattcccggcagaacctacggcttgcatgacatcgcgatgtttaatctgctgaaagtgatggaaatctgcctgcatgaaaatgaaggcaatgctgcgctgacttatgaaggtttactggagcagatccgcgccaagatcagccactacatcaccctgatggttgagggcagcaatatttgtgatatcggccatcgcgactgggcacctgtaccgctgctctcatcgtttatcagcgattgtctggaaaaaggccgcgatattaccgatggcggcgcgcgttataacttctccggcgtacaggggatcggtatcgccaacctgagcgattctctccatgcgttgaaagggatggtttttgagcaacagcgtttaagttttgacgaattgctgtcggtattaaaagccaacttcgcaacgccagaaggcgaaaaagtccgcgctcgcttaattaaccgcttcgagaaatacggtaacgatatcgacgaggtggataacatcagcgccgaactgttgcgccactactgcaaagaagtggaaaaataccagaacccgcgcggcggctacttcacgccgggatcgtataccgtttctgctcacgtcccgttgggatcggtggttggcgcgacgccagacggtcgttttgccggagaacagctggcagacggcggcttgtcacccatgctgggccaggacgcacaagggccaacagcggtactgaagtcagtcagtaagctcgataacacgctgctgtctaacggtacgttgctgaacgtgaaattcactccggcgaccctggaaggtgaagcaggattacgcaaactggccgacttcttacgggcgtttacccagcttaagttacaacatattcagtttaacgtggtgaacgccgacacgttgcgggaagcgcaacagcgcccacaagattatgccgggctggtggtgcgcgttgccggatacagcgccttctttgtcgaactgtcgaaggagatccaggatgacatcatccgccggacagcgcatcagctgtaacgttgtggaaacgcgccgcgatgatgtggcgcgcattttcaacattcagcgttattcactgaatgacggcgagggcattcgtacggtggtcttttttaaaggctgtccgcatctttgcccgtggtgtgctaatccggagtcgatctccggcaaaatccagacggtacgcagagaggcgaaatgtctgcactgtgcgaaatgtttgcgtgatgcggatgaatgcccctccggggcgtttgaacggattggtcgcgatatcagccttgacgctctggaacgggaagtgatgaaagatgacattttctttcgcacgtccggcggcggcgtcacgctttctggcggcgaagtgttaatgcaggcggagtttgctacccgttttttacagcgactgcggctgtggggtgtctcatgcgccattgaaactgccggagacgcgccagcaagcaagctgttaccgctggcgaaattgtgcgatgaagtgctgttcgatttaaaaattatggacgcgactcaggcgcgggatgtggtgaagatgaacctgccacgcgtgctggagaatctgcgtttgctggtgagtgagggtgtcaacgtgatcccgcgtttgccgctgatccccggtttcacactcagccgggagaatatgcagcaggcgctggacgtgctgatcccgctgaatatcaggcagatccatctgttaccgtttcatcagtacggcgaaccgaaataccgcctgctggggaaaacatggtcgatgaaagaggtgcctgcgccgtcgtcagccgatgtggcaacgatgcgcgaaatggcagaacgggccggatttcaggttaccgtgggaggttaaaatggcatacctggtggcagtaaccgcctgcgtaagcggcgtggcgcatacatatatggcggcggaacggctggaaaagttgtgccagttagagaagtggggcgtcagcattgaaactcagggcgcgttgggaacggagaatcgtttagcggacgaggatatccgccgggcggatgttgcgctgttaattacggatatcgagcttgccggtgccgagcgatttgaacattgccgctatgtgcaatgcagcatctacgcattcctgcgtgagccgcagcgggtaatgagcgcggtgcgcaaagtgctttctgcgccgcagcaaacccatcttattctggagtagtcggtttttctgtcagttggctgtggtactgccggcgatattccgacggcgagcgttcggtgtttttacgaaacagacggcagaagtagttgctgtcgacaaagccgcaggcgtgcgccacttcttttaccttcaggtcatagcctttcaataacgtcttagcgtgctccagtcgcgtgtgattcaggtattcgttaaaaccaatggcccccgttttttgaaacaggtgcgagagatagtttggtgaaatatagaatgcctgtgcgacagattcgcgggtaagcgcggaggcatagcgttcgtcgatataatcgcgaatagcttcaaatagtgcctggctgcgtgaggcggtctggatttggctgccgagcaaatcgcggcagtggctaagcaggctggctacgataagccttgccgtttgctgctcctgcggctgcatttgcatttcattgagcgtttgtagcagaaaagaacctatacgtgggccgcgtcgggcgacgtgttgcttcgccagattttgatattgtttgccatcccattgcacgacgctgaagccgagttgctgtttgccaaacagcacgctaaaggtggtagcgggtgttttccattgtgggaaattccagccaccagcggcaacgtacagcacatcgccgggaactaacgttgctccagcgccggtatcaacaaactcaccttccagcacaatttccagccgtggaaaatcgacctgatacgcaagatcgggcaccgggccgttactgctggcaaagtaaatctggcgcagggacagcgggccgttgatcaggcgggagagcaggtagctgacgtcgtgatacatgttattcccttaggtatgtagacgggaaaacagtaactggcattattaaaaaaggccacctgaaaagtgtggcctgaggggagttcgatgtaaacattgcggcagttgtattgccggatgtggcgtaaacgccttatccagcctaccgccgcgatctgtaggccggataagacgcgtcaagcgtcgcatccggcaaatagcgcctggctgataattactgattacctacctggtcgccatacggcagagtgtcgtaatcgatcagcgcgtttttcttgtacgggttaccaatccagcgggtagtttctttgaactgcggattcaccactgaacgggttggatcgtaaccgtcgtaagataagcccgccaaatctgaccaggtgtggatcagttccgccaggctgtatttacgatcgacatcctgtgagaaatcacggggatgagtcgcttgccatttttccgacgtccacagcaggaacggaatggtgtacatgtggcgcgtcgggttgtcttcgttacgcccctgagttttgtgcggcggcgtgtcgtaaacctcttcaccgtggtcagagaagtaaaccaggaatccgttcgggtctgccgctttaaagtctttaatcaggctggcaaccacatgatcgttatacaggttagcgttgtcataatcgttatatgattccagctcttctgcgcttaatcctggcggaacatgatcggtattgccatcaaacttgccctgattttccgggtagcggtatttgtatttgatatgcgtacccagcagatgaacgatgatcagtttcttcggcgcagggtcattcagcacatcctggaacggcttcagcacgttggtgtcgtattcacgcgcactctgcgtacgttgctggttcatgtagtactgcttgtcggtctggcgcgaaaataccgtcagcatggtattgcgggcggtcatcgtctgctggttggtgatccagaaggttttataacccgcctgtttcatcatgttcatcagcgacggctgcgtcagatacaggtccgggttcttttcattggcaaaggtcagcgcctgttgcaggatttcaatggtgtacggacgagacgtaaccacgttattaaacacggtcagattcggatcggttttatgcagcgcatccagctccggcgtggtttcacgcggataaccgtacagactcatgcgtccacgctgggttgactcgccaatcaccagcactaaggtgcgcggttcgttacccgattcatctttgaaattagccagcggcggcaaggcattattttcattcagtagctttgttagcgagtttagttgctgacgatactgataatagccggtcaggaattgccacggtgcggcaggctccatacgcgaggccaggttgtccaacgttttctcaaacggcttgtttttgataaacgtattcatggcgatcggatgcagaatcaagccataaagcagggcaaaagagacaacataacgccacggctttggaatatagaccgggcgcaggcgtgtccacagcagaactgccaccgccgtataggccagcgcgataagcacaattttcaggctgaaatactggattaaatactcgctggcttcgttggtgttggtttcgaacatcacaaacagaacgctctgcgagaactcctgaccgtagatgacgtagtagcacagcgccgccagagaggccgcccatagcaccacgccgattactgcggcaataattttaatccgcttcggaaagaggaataccgggatcaaccacagcgaactgaataacagcgagtcgcgaatgccgttagtgccactataaccactgatgtaaataatggcctgtagcagagtagagaaaaaccaaaagtagagcagtgcccaacccagggctttccagctaaaaagaggtttagcctggacttctgtggaatgcatagtaagaacctgtcttgaaaaaatatcgccgaatgtaacgacaattccttaaggatatctgaaggtatattcagaatttgaataaaatgcagacagaaatatattgaaaacgagggtgttagaacagaagtatttcagaaaaccctcgcgcaaaagcacgagggtttgcagaagaggaagattagccggtattacgcatacctgccgcaatcccggcaatagtgaccattaacgcttgttcgacgcgaggatccggttcctggccttctttttctgcctggcgggagcggtgcagcaactcggcctgcaatacgttcagcgggtcggtgtaaatattccgtagctgaatagactctgcaatccacggcagatcggccatcagatgggaatcgttggcaatcgccagcaccactttgatgtcttcttcttgcaggttgcgtaactctttacctaacggccacagtgctttgtctaccaggcgttggtcatagtattccgccagccacaggtctgctttggcgaagaccatctccagcatgccgagacgcgtcgagaagaatggccaatcgcggcacatagcctccagctcgctctgtttgccgtcttcgaccactttttgcagcgccgtacctgcacccagccaggcggggagcatcagacggttttgcgtccaggcgaagatccacggaatggcgcgtagtgactcgacgccgccggttgggcgacgtttcgccggacgtgaacccaacggcagtttgcccaattcttgttccggcgtagcggagcggaagtaaggcacaaaatctttgttttcacgtacgtagccacggtagagatcgcaggagatgactgacagttcatccataatgcgacgccagctctctttcggctcaggtggtggcagcaggttggcttccagaatcgccccggtgtacagcgacaggctgctgacggtgatttctggcagaccatatttaaagcggatcatctcgccctgttcagtcacgcgcaggccacctttcaggcttcctggcggttgtgacagcagcgccgcatgagcaggtgcgccgccgcgaccaatggaaccgccgcgaccgtggaacaacgtcagctcaatacccgctttttcgcaggttttgattaatgcatcctgtgcctgatattgcgcccaggaagctgccatcactcccgcatcttttgctgagtcggaatagccaatcatcaccatctgtttgccctgaatcaggccacgataccagtcaatattgagcagctgggtcatgacatcgttggcgttgttcagatcatcgagggtttcaaacagcggagcaaccggcatcgcaaacccgatacccgcttctttcagcagcaggtggacagccagtacgtcggacggcgttttcgccatcgagatcacgtaggcggcaatggagccttgcggtgcttcggcaatcacctggcaggtatcgagcacttcgcgcgtttcggcgcttggttgccagttgcgcggcagaagcggacgtttggagttcagttcgcggatcaggaacgcctgtttgtcggcctctgaccagctttcgtagtcgccgataccgaggtagcgggtcagctcgcccagcgcttcggtatgacgcgtgctctcctgacggatatcaatacggaccagcggtacgccgaaacatttcacgcggcgcagggtgtcgagcagatcgccgttggcgataatacccatgccacacgcctgaagtgactggtagcaagcgtagagcggttcccacagttcttcgttttgtgtcagcaggccttctggttttggcagttcttcgcctttcaggcgcgcttccagccatgcctgtgtcgccatcaggcgagaacgcaggtttttcatcagatagcgatacggttctgcggcaccttcttcgccaaccagcgccagcagttcaggggtcgcttcaaccatcgacagttcagaaaccagcacctgaatatctttcaggaacaaatcggtggctttccagcggctgagtagcaggacgtggcgggtgatatcggcagtgacgttcgggttgccgtcgcggtcgccgcccatccacgaagtaaaacggaccggaacaaattcgacgggcagtttgtagccgaggttctcttccagttgttcgttcagttcgcgcaggtaatttggtacgccttgccacaggctgttttccactacggcaaagccccatttggcttcatctaccgggcttggacgcagcttacggatttcatcggtatgccatgactgggcgatcaactggcgcaggcgacgcatcagctggttgtgttcgtagtcagcgatatctttgttatcgagctgttttaaacaggcgttcacttccaccattttgtggatcagtgtacgacgggtaatttcggttgggtgagccgtgaggaccagttccagcgacagcgattccactgcttttttgatggtgtcttcgctcagttccggctggtttttcagtttacgcagggtgcgggcgatcacttccgggttgctggcagcttcgcctttcggcgaaatgctgtggtattgctcggcggtgttggccaggttcaggaactgactaaacgcacgcgcaacgggcagcagctcgtcgttcgacaaattttgtaaggtggtgagcaactcctggcggttagcatcattgccagcgcgtgaagatttcgacaacttacggatagtttctacgcgttcaagaatgtgttctcccaacgcatccttgatggtttctcccagcactttgccgagcatactgacattactacgcaatgcggaatattgttcgttcatattaccccagacaccccatcttatcgtttgatagccctgtatccttcacgtcgcattggcgcgaatatgctcgggctttgcttttcgtcgtcttttataaagccacgtaaaagcggtgacgtcaaatgctgcgaaatcgcttcagcaaacgaataaatagcaggaatttacgccattaaattcacgacgctttaaataagcgtaacttatggaaatgttaaaaaatcgccccaagtaacaccaaaggtgtaggtcggataagatgcgcaagtatcgcatccgacattattgcggcactggagtttggcaacagcgccggatgcggcgcgagcgccttatccggcctacagttgggcatcgtttgagtcactgtcggtcggataagatgcgcaagtatcgcatccgacattattgcggcactggagtttggcaacagcgccggatgcggcgcgagcgccttatccggcctacggttgggcatcgtttgagtcactgtaggtcggataagatgcgcaagcatcgcatccgacattattgcggcactggagtttggcaacagcgccggatgcggcgcgagcgccttatccggcctacgttttaatgccagcaaaaatggtgaattacctgggttatcagttcgcgggtgggcttgataaaccgtgtttccagatattcatcaggttgatgagcctgattaattgagccaggccccaacaccagcgtcgggcataacgtttgaataaacggcgcttcggtacagtagttcaccacttcggtttttgctccgagcaatttctcaaccacttcaaccagttgatgattcggtgggcattcatagccagggatcggcggatgcagctcgtcgaccgtcagacgacccggccagcgttcgctcaccggagccaatgcatcgttgagcaaaccattaagttcattgagtgtcatgccaggcagcggacgaatatccatatgcaactcacagcaagcgcaaatacggttagaagcgtcgccaccgtgaatatgcccgaggttgagcgtagggtatggcacggtaaacgcttcgtagtgataacgttctttcaggttatcgcgcaattgcaaaatatgcccgatggcgtcgtgcattagttcgatagcgttaactccgcgtgctggatcgctggagtgccccgactggccctgaatacggatggcgttagagatatgacctttatgtgcgcgtaccggttgtagtgacgtcggttcgccaatgatggcgcaatccgggcgcagggcggtagtttcggcaaaataacgcgctccggccatactggtttcttcatcagcagtcgccagaatgtagagcggttttttcagtttcgtgacgtcgacatcgcgtagcgcatcaaggataaacgcaaaaaagcctttcatgtcggcggtgcctaagccgtaaagcttgccgtcatgctccgtcagtgtaaacggatcgcgcgtccagcgaccgtcatcaaatggcaccgtatcggtatgccccgccagcaacaagccgccagccccctgtccgatacttgccagcatattgaatttgttgcgagttcctggaacaggctgcacttccacattgaagcccaaatctttaaaccagtccgccagcagagtgattaaatctgcattgctttgatcgagtgcctcttccgtggcgcttattgaaggtgtggcaatcagagcgcggtaaatctcgataaatggcggtaatttgtttttcattgttgacacacctctggtcatgatagtatcaatattcatgcagtatttatgaataaaaatacactaacgttgagcgtaataaaacccaccagccgtaaggtgaatgttttacgtttaacctggcaaccagacataagaaggtgaatagccccgatgttgaatacgctgattgtgggtgccagcggctacgctggcgcagagctagtgacctatgtaaatcgccatccgcatatgaacataaccgctttgactgtttcagcgcaaagcaatgatgcgggaaagttaatctccgatttgcatccgcagctaaaaggcatcgttgatctgccgttgcagccgatgtcggatatcagcgagtttagcccaggggtggacgtagtgtttctcgccaccgcccatgaagttagccacgatttagcgccgcagtttcttgaagcgggctgcgtggtgttcgacctttccggcgcgtttcgtgttaacgacgccaccttctatgaaaaatattacggctttacccatcaatacccggaactgttggaacaggcagcctacggtctggcggagtggtgcggtaataaattaaaagaagcgaatttgattgcggtgccgggctgttatccgacggcggcacagctggcgctgaaaccgttgattgatgccgatcttcttgacctcaatcagtggccggtgatcaacgccaccagcggcgtgagcggtgcagggcgtaaagcggccatttcaaacagcttttgtgaagttagcctgcaaccgtatggcgtctttactcatcgccatcaaccagagatcgccacacacctcggtgctgacgttatcttcaccccacatctgggcaatttcccgcgcggcattctcgaaaccattacctgccgcctgaaatcgggtgtgacccaggcgcaagtcgcgcaagtgttacagcaggcgtatgcccataaaccgctggtgcggctgtatgacaaaggcgttccggcgctgaaaaatgtcgttgggctgccattttgcgatatcgggtttgccgttcagggcgagcatctgattattgtggcgaccgaagacaacttactgaaaggcgcggcggcacaagcggtacagtgcgccaatattcgtttcggctatgcggaaacgcagtctcttatttaagggtgcaatgatgaatccattaattatcaaactgggcggcgtactgctggatagtgaagaggcgctggaacgtctgtttagcgcactggtgaattatcgtgagtcacatcagcgtccgctggtgattgtgcacggcggcggttgcgtggtggatgagctgatgaaagggctgaatctgccggtgaaaaagaaaaacggcctgcgggtgacgcctgctgatcagatagacattatcaccggagcactggcgggaacggcaaataaaaccctgttggcatgggcgaagaaacatcagattgcggccgtaggtttgtttctcggtgacggcgacagcgtcaaagtgacccagcttgatgaagagttaggtcatgttggactggcgcagccaggttcgcctaagcttatcaactccttgctggagaacggttatctgccggtggtcagctccattggcgtaacagacgaagggcaactgatgaacgtcaatgccgaccaggcggcaacggcgctggcggcaacgctgggcgcggatctgattttgctctccgacgtcagcggcattctcgacggcaaagggcaacgcattgccgaaatgaccgccgcgaaagcagaacaactgattgagcagggcattattactgacggcatgatagtgaaagtgaacgcggcgctggatgcggcccgcacgctgggccgtccggtagatatcgcctcctggcgtcatgcggagcagcttccggcactgtttaacggtatgccgatgggtacgcggattttagcttaagttttgttggccggaggcgcagctttccggcattgaatttcaaaataaggaaacagagttatggcactttggggcgggcgttttacccaggcagcagatcaacggttcaaacaattcaacgactcactgcgctttgattaccgtctggcggagcaggatattgttggctctgtggcctggtccaaagccctggtcacggtaggcgtgttaaccgcagaagagcaggcgcaactggaagaggcgctgaacgtgttgctggaagatgttcgcgccaggccacaacaaatccttgaaagcgacgccgaagatatccatagctgggtggaaggcaaactgatcgacaaagtgggccagttaggcaaaaagctgcataccgggcgtagccgtaatgatcaggtagcgactgacctgaaactgtggtgcaaagataccgttagcgagttactgacggctaaccggcagctgcaatcggcgctggtggaaaccgcacaaaacaatcaggacgcggtaatgccaggttacactcacctgcaacgcgcccagccggtgacgttcgcgcactggtgcctggcctatgttgagatgctggcgcgtgatgaaagccgtttgcaggatgcgcttaagcgtctggatgtcagcccgctaggctgtggcgcgctggcgggaacggcctatgaaatcgaccgtgaacagttagcaggctggctgggctttgcttcggcgacccgtaacagtctcgacagcgtttctgaccgtgaccatgtgttggaactgctttctgctgccgctatcggcatggtgcatctgtcgcgttttgctgaagatctgattttctttaacaccggcgaagcggggtttgtggagctttctgaccgcgtgacttccggttcatcattaatgccgcagaagaaaaacccggatgcgctggagctgattcgcggtaaatgcggccgggtgcagggggcgttaaccggcatgatgatgacgctgaaaggtttgccgctggcttacaacaaagatatgcaggaagacaaagaaggtctgttcgacgcgctcgatacctggctggactgcctgcatatggcggcgctggtgctggacggcattcaggtgaaacgtccacgttgccaggaagcggctcagcagggttacgccaacgccaccgaactggcggattatctggtggcgaaaggcgtaccgttccgcgaggcgcaccatattgttggtgaagcggtggtggaagccattcgtcagggcaaaccgctggaagatctgccgctcagtgagttgcagaaattcagtcaggtgattgacgaagatgtctatccgattctgtcgctgcaatcgtgcctcgacaagcgtgcggcaaaaggcggcgtctcaccgcagcaggtggcgcaggcgattgcttttgcgcaggctcggttagggtaagaacatttatatgtataaatttgagcctggcttatcgccgggcttttttatggcaaaaaaaagcggatcctggagatccgcaaaagttcacgttggctttagttattcgagttgagaaactctcgaaacgggcagtgacttcaagggttaaaagaggtgccgctccgtttctgtgagcaattatcagtcagaatgcttgatagggataatcgttcattgctattctacctatcgccatgaactatcgtggcgatggaggatggataatgaatattcgtgatcttgagtacctggtggcattggctgaacaccgccattttcggcgtgcggcagattcctgccacgttagccagccgacgcttagcgggcaaattcgtaagctggaagatgagctgggcgtgatgttgctggagcggaccagccgtaaagtgttgttcacccaggcgggaatgctgctggtggatcaggcgcgtaccgtgctgcgtgaggtgaaagtccttaaagagatggcaagccagcagggcgagacgatgtccggaccgctgcacattggtttgattcccacagttggaccgtacctgctaccgcatattatccctatgctgcaccagacctttccaaagctggaaatgtatctgcatgaagcacagacccaccagttactggcgcaactggacagcggcaaactcgattgcgtgatcctcgcgctggtgaaagagagcgaagcattcattgaagtgccgttgtttgatgagccaatgttgctggctatctatgaagatcacccgtgggcgaaccgcgaatgcgtaccgatggccgatctggcaggggaaaaactgctgatgctggaagatggtcactgtttgcgcgatcaggcaatgggtttctgttttgaagccggggcggatgaagatacacacttccgcgcgaccagcctggaaactctgcgcaacatggtggcggcaggtagcgggatcactttactgccagcgctggctgtgccgccggagcgcaaacgcgatggggttgtttatctgccgtgcattaagccggaaccacgccgcactattggcctggtttatcgtcctggctcaccgctgcgcagccgctatgagcagctggcagaggccatccgcgcaagaatggatggccatttcgataaagttttaaaacaggcggtttaaaccgtttaacgcagctacccgataggcttccgccatcgtcgggtagttaaaggtggtgttgacgaagtactcaatagtgttgccgccacctttctgttccataatcgcctgaccgatatgaataatttcggcagcgcgctcgccaaagcagtgaatacccagaatctcttttgtttcccgatggaacaaaattttcagcgtgcccacgttcatgccgacgatttgtgcgcgtgccagatgtttaaactgggcgcggcccacttcatatggcactttcattgcggtcagctgctgttcggttttgcccacagagctgatttccgggatggtgtaaataccggtagggatatcttcaatcagatgtgcggtggcttcgccttttaccagcgcctgcgcggcaatgcgcccctggtcataggccgccgacgccaggctcggataaccaatcacgtcgcccaccgcgtaaacgtgtggctgtgcggtctgatacatgctgttgaccttcagctgtccgcggctgtcagtttctagcccaatgttctgtaacgccagcgaatcggtattaccggtgcgaccgttggcatagagcaggcagtcagctttcagttttttacccgacttcagatgcatgatcacaccatcgtcacagccttcgatcttctcgtactcttcgttgtgacgaatcactacgccactgttccagaagtgataggagagagaatctgacatctcttgatcgagaaatgccagcaggcgatcgcgggtgttgatcagatccacttttacatccataccgcggaagatcgacgcatattcacagccgatcactccagcaccatagataagtacatggcgcggttcgtggtgcatgctgagaattgagtcgctgtcgtaaatgcgtggatgggtgaaatcaacatctgttggatgatatggacgagagccgcaggcaataacaaatttttcagcggttagtgtttcaacgctgccgtccgggcaatccagcgccaacgtatgctcgtcaacaaagcgagcgtttccctgcaatatttcacagtgattacgttcgtaaaatccctgacgcatgcgcgtttgttgattaatcacgttatcggcatggttaaggatatcggcaaaagaagagcggagcagtcgggaatggtcgctgtaaagtgggttttgattgaattctataatgcggctgacggcgtgacggagagctttcgacgggatggtgccccagtgggtgcaaccgccgccaacattttgataacgctcgataactgcgacgcgcgcaccttgcttaaccaggcccattgcagcgccttcgccgccggggccggaacctattactatggcatcgtaatcgtaggaatgtggcatggtagggcttacctgttcttatacataaaagcaacagaatggtaacattttatcgcgggtaagccaattgatccccgtcatttatctggctatatcctgagcggcctttgctttgtctgtttcttacttttgccctgacgttttattggatttttatcgacgatactctccgtttaagcggcaggtttccgctgtacgtaaaagaaccggccaaagaattgcagtaaatatgttttattgcgttaccgttcattcacaatactggagcaatccagtatgttcattctctggtatagtgccagcagtacttttggcaaggattcagacatcgtgatgggcgtaagagcgcaacaaaaagaaaaaacccgccgttcgctggtggaagccgcatttagccaattaagtgctgaacgcagcttcgccagcctgagtttgcgtgaagtggcgcgtgaagcgggcattgctcccacctctttttatcggcatttccgcgacgtagacgaactgggtctgaccatggttgatgagagcggtttaatgctacgccaactcatgcgccaggcgcgtcagcgtatcgccaaaggcgggagtgtgatccgcacctcggtctccacatttatggagttcatcggtaataatcctaacgccttccggttattattgcgggaacgctccggcacctccgctgcgtttcgtgccgccgttgcgcgtgaaattcagcacttcattgcggaacttgcggactatctggaactcgaaaaccatatgccgcgtgcgtttactgaagcgcaagccgaagcaatggtgacaattgtcttcagtgcgggtgccgaggcgttggacgtcggcgtcgaacaacgtcggcaattagaagagcgactggtactgcaactgcgaatgatttcgaaaggggcttattactggtatcgccgtgaacaagagaaaaccgcaattattccgggaaatgtgaaggacgagtaatgaaacaagcaaatcaagatagaggtacgctgctgctggcgttagttgctggcttatcgattaatggtactttcgcagcgctgtttagctccattgtgccattttctgtattcccgattatttccctggtgctgacggtttactgcctgcatcaacgttatcttaatcgcactatgccggtaggcttgccgggtctggcagctgcctgttttattctcggcgtactgctgtacagcacggtagttcgtgcggaatatccggatatcggctctaacttcttcccggcagtactctccgtcattatggtgttctggattggcgcgaagatgcgtaaccgtaagcaggaagttgctgagtaatcggtattatgccggatgctggcgcatccggcatgggttttacttcgcggtcagtaatacgccgcactccatatggtgcgtgtaggggaactgatcaaacagagccagacgttcgaccttgtgcgtctggcttaatgtttccagattcttgcataacgtttccgggttacaggagatgtacaaaatacgcggatacgcctgcaccattttctcggtttcactgtccagaccgctgcgcggtgggtcgacaaaaatggtttcgcactgataactctttaagtcgatcccttgcaggcggttaaactcgcgcacaccattcatcgcctgagtaaattcttctgccgccatacgaataatttgtacgttatcaatatggttagctgcgatgttgtattgcgcagcagcaaccgacggcttagcgatttcggtggctaatacccgatcaaaattacgcgccagcgctaatgaaaagttaccgttgccgcagtacagctccagtaaatcgccttttgagcctttggttacgtccagcgcccattccagcatctgaatattcatcgccgcgttcggctgggtaaagctgttttctacctgacggtagatcatctctttccctgcgaccggcagacgttcatcgatgtaatcctgatccagctcgattttggttttcgttgcccgaccaatcagatgcacattcagattctgcgcgcgcagtgcatcgcgcagggcctccgcttcctgacgccactcatcatccagcttcttatggtatagcagggaaaccaccgcctgattactcagcgtagtgaggtaatcaatctggaacaacttgtggcgcagaacgggattattacgcacacccgcaatcatcgccgtcatcaactggttgataagttcactggcggcggggaagctatccacgcggatgcggcttttggtttgttgatcgaaaatgatgtgatacaggtcatcgccatcgtgccagatgcggaactccgcgcgcatccggtaatgactgaccggcgagcgaaacacttccggaaccaggtcagaaaacggtgccatcatactttgcaaacgtaccactttttcggctaactgcgcttcatactgttctgttggaaggtgttcgggggtcatgatgtatcctgaaaaattaaagtacgcggcgattgtagggattgctcatcagatgtccagatcttgatgaattcctatttgtgagctacgtctggacagtaacttgttacaacctgtagcatccacttgccggtcctgtgagttaatagggaatccagtgcgaatctggagctgacgcgcagcggtaaggaaaggtgcgatgattgcgttatgtggacactgccattcggtgggaagtcatcatctcttagtatcttagatacccctccaagcccgaagacctgccggccaacgtcgcatctggttctcatcatcgcgtaatattgatgaaacctgcggcatccttcttctattgtggatgctttacaatgattaaaaaagcttcgctgctgacggcgtgttctgtcacagccttttccgcttgggcacaggataccagcccggatactctcgtcgttactgctaaccgttttcagcagccagtaaatactgtccttgcacctactgatattgttacccgtgaggatattcaacgctggcagtcgaaagacctcaacgatgttatgagtcatctccccggtgtaaatatctctcaaactggtggaatggggacgagttcttctctttatgttcgtggcactgaatcgcgccatgttttagtgttgattgacggagtgccgatggctcgtgccggtatcgacaatgcaattgatattagccagttcccggtatcacttgtacagcgtgttgaatatattcgtgggccgcgttctgccgtttatggttctggtgccatcggaggtgtggtgaacattattacaatgagtaatgatgagaaagctcagatcaacgcaggaatgggtacaaatggttatcaagcctatgatggggtaataaataaacgttttggcgatacgatggtaacagcagcaggtgcttaccagacgaccaaaggttttaacattcagcctggctcaccatacagtggtgatagcgatcgcgatggatatcgcaacaaacttttctggggggggctgcagcataagtttaacgataacttctcggggttcttccgtggttacagctacacagctaataatgattacgaccagggctcgatgtatggttctgctactggcaacgaagaagctcagaattacaaccagtcctgggatactggcctacgctataactccggcatctattcgtctcagttaattgctaactatcaacgactcaagaattataactacacaaataatcttggtcgttatgcgggagatgccaccctggatgacatggaacagcgttatattcagtggggtaatagcattgaggtagggcatggtgcaattagcggcgggatcgattggaaacaggaaaaactgacgtccagcagcattacaaaatcagatgattacgaacgcgataccaccgggttatacctgactggacagcaacagatttccaatgtgactttggaagcttctggccgagaagatcatgatgaacagtttggctggcatggtacctggcagacagctgctggctgggagtttattgatggctaccaggcaacactttcttacggtaccagttttctttcgccttctcttggacagcaatacggggctgctcgctttgcttcaatttatggtcctggtattgcagccaacccaaatttgaagccagaagaatctaaacagtgggagattggaattgagggggtaactgggactctggattggcggctctcaggatatcgttatgaaattcagaacctgattgattataaaaacataaataatgtcaaccagtacattaatgtgaaatcagccacgattaaagggctggaatggacgggaaatattacaaccggtcctgttgaacatcgcttgacgttacaatatgttgacccgcgcgatgatgaaacagataaagtgctgtaccgtcgggcaaaacagcaggttaagtacgagttgactggacaagcttatggtttcgaatgggacgtttcttaccaatatataggtcaacgatacgacaacgcttatgacgagacctctggctcatcacatacagttaaattaggcggtgtgagcttgtgggatcttgcggttgcatatccggtcacctctcatctgacagttcgtggtaaaatagccaacctgttcgacaaagattatgagacagtctatggctaccaaactgcaggacgggaatacaccttgtctggcagctacaccttctgaaccacgtcccaccgtgctggtgtttgactccggcgtcggtgggttgtcggtctatgacgagatccggcatctcttaccggatctccattacatttatgctttcgataacgtcgctttcccgtatggcgaaaaaagcgaagcgtttattgttgagcgagtggtggcaattgtcaccgcggtgcaagaacgttatccccttgcgctggctgtggtcgcttgcaacaccgccagtaccgtttcacttcctgcattacgcgaaaagttcgacttcccggttgttggtgtcgtgccggcgattaaacctgctgcacgtctgacggcaaatggcattgtcggattactggcaacccgcggaacagttaaacgttcttatactcatgagctgatcgcgcgtttcgctaatgaatgccagatagaaatgctgggctcggcagagatggttgagttggctgaagcgaagctacatggcgaagatgtttctctggatgcactaaaacgtatcttacgtccgtggttaagaatgaaagagccgccagataccgttgtattgggttgcacccatttccctctactacaagaagaactgttacaagtgctgccagagggaacccggctggtggattctggcgcagcgattgctcgccgaacggcctggttgttagaacatgaagctccggatgcaaaatctgccgatgcgaatattgccttttgtatggcaatgacgacagaagctgaacaattattgcccgttttacagcgttacggcttcggaacgctcgaaaaactggcagttttaggttgatttggttgaatgttgcgcggtcagaaaattattttaaatttcctcttgtcaggccggaataactccctataatgcgccaccactgacacggaacaacggcaaacacgccgccgggtcagcggggttctcctgagaatctcaacagagaaaagcaaaaaaatgcttgactctgtagcgggaaagcgtattatgcacaccccgcgccgctgagaaaaagcgaagcggcactgctctttaacaatttatcagacaatctgtgtgggcactcgaagatacggattcttaacgtcgcaagacgaaaaatgaataccaagtctcaagagtgaacacgtaattcattacgaagtttaattctttgagcatcaaacttttaaattgaagagtttgatcatggctcagattgaacgctggcggcaggcctaacacatgcaagtcgaacggtaacaggaatcagcttgctgattcgctgacgagtggcggacgggtgagtaatgtctgggaaactgcctgatggagggggataactactggaaacggtagctaataccgcataacgtcgcaagaccaaagagggggacctacgggcctcttgccatcggatgtgcccagatgggattagctagtaggtggggtaacggctcacctaggcgacgatccctagctggtctgagaggatgaccagccacactggaactgagacacggtccagactcctacgggaggcagcagtggggaatattgcacaatgggcgcaagcctgatgcagccatgccgcgtgtatgaagaaggccttcgggttgtaaagtactttcagcggggaggaagggagtaaagttaatacctttgctcattgacgttacccgcagaagaagcaccggctaactccgtgccagcagccgcggtaatacggagggtgcaagcgttaatcggaattactgggcgtaaagcgcacgcaggcggtttgttaagtcagatgtgaaatccccgggctcaacctgggaactgcatctgatactggcaagcttgagtctcgtagaggggggtagaattccaggtgtagcggtgaaatgcgtagagatctggaggaataccggtggcgaaggcggccccctggacgaagactgacgctcaggtgcgaaagcgtggggagcaaacaggattagataccctggtagtccacgccgtaaacgatgtcgacttggaggttgtgcccttgaggcgtggcttccggagctaacgcgttaagtcgaccgcctggggagtacggccgcaaggttaaaactcaaatgaattgacgggggcccgcacaagcggtggagcatgtggtttaattcgatgcaacgcgaagaaccttacctggtcttgacatccacagaactttccagagatggattggtgccttcgggaactgtgagacaggtgctgcatggctgtcgtcagctcgtgttgtgaaatgttgggttaagtcccgcaacgagcgcaacccttatcctttgttgccagcggtccggccgggaactcaaaggagactgccagtgataaactggaggaaggtggggatgacgtcaagtcatcatggcccttacgaccagggctacacacgtgctacaatggcgcatacaaagagaagcgacctcgcgagagcaagcggacctcataaagtgcgtcgtagtccggattggagtctgcaactcgactccatgaagtcggaatcgctagtaatcgtggatcagaatgccacggtgaatacgttcccgggccttgtacacaccgcccgtcacaccatgggagtgggttgcaaaagaagtaggtagcttaaccttcgggagggcgcttaccactttgtgattcatgactggggtgaagtcgtaacaaggtaaccgtaggggaacctgcggttggatcacctccttaccttaaagaagcgtactttgcagtgctcacacagattgtctgatgaaaatgagcagtaaaacctctacaggcttgtagctcaggtggttagagcgcacccctgataagggtgaggtcggtggttcaagtccactcaggcctaccaaatttgcacggcaaatttgaagaggttttaactacatgttatggggctatagctcagctgggagagcgcctgctttgcacgcaggaggtctgcggttcgatcccgcatagctccaccatctctgtagtgattaaataaaaaatacttcagagtgtacctgcaaaggttcactgcgaagttttgctctttaaaaatctggatcaagctgaaaattgaaacactgaacaacgaaagttgttcgtgagtctctcaaattttcgcaacacgatgatgaatcgaaagaaacatcttcgggttgtgaggttaagcgactaagcgtacacggtggatgccctggcagtcagaggcgatgaaggacgtgctaatctgcgataagcgtcggtaaggtgatatgaaccgttataaccggcgatttccgaatggggaaacccagtgtgtttcgacacactatcattaactgaatccataggttaatgaggcgaaccgggggaactgaaacatctaagtaccccgaggaaaagaaatcaaccgagattcccccagtagcggcgagcgaacggggagcagcccagagcctgaatcagtgtgtgtgttagtggaagcgtctggaaaggcgcgcgatacagggtgacagccccgtacacaaaaatgcacatgctgtgagctcgatgagtagggcgggacacgtggtatcctgtctgaatatggggggaccatcctccaaggctaaatactcctgactgaccgatagtgaaccagtaccgtgagggaaaggcgaaaagaaccccggcgaggggagtgaaaaagaacctgaaaccgtgtacgtacaagcagtgggagcctcttttatggggtgactgcgtaccttttgtataatgggtcagcgacttatattctgtagcaaggttaaccgaataggggagccgaagggaaaccgagtcttaactgggcgttaagttgcagggtatagacccgaaacccggtgatctagccatgggcaggttgaaggttgggtaacactaactggaggaccgaaccgactaatgttgaaaaattagcggatgacttgtggctgggggtgaaaggccaatcaaaccgggagatagctggttctccccgaaagctatttaggtagcgcctcgtgaattcatctccgggggtagagcactgtttcggcaagggggtcatcccgacttaccaacccgatgcaaactgcgaataccggagaatgttatcacgggagacacacggcgggtgctaacgtccgtcgtgaagagggaaacaacccagaccgccagctaaggtcccaaagtcatggttaagtgggaaacgatgtgggaaggcccagacagccaggatgttggcttagaagcagccatcatttaaagaaagcgtaatagctcactggtcgagtcggcctgcgcggaagatgtaacggggctaaaccatgcaccgaagctgcggcagcgacgcttatgcgttgttgggtaggggagcgttctgtaagcctgtgaaggtgtgctgtgaggcatgctggaggtatcagaagtgcgaatgctgacataagtaacgataaagcgggtgaaaagcccgctcgccggaagaccaagggttcctgtccaacgttaatcggggcagggtgagtcgacccctaaggcgaggccgaaaggcgtagtcgatgggaaacaggttaatattcctgtacttggtgttactgcgaaggggggacggagaaggctatgttggccgggcgacggttgtcccggtttaagcgtgtaggctggttttccaggcaaatccggaaaatcaaggctgaggcgtgatgacgaggcactacggtgctgaagcaacaaatgccctgcttccaggaaaagcctctaagcatcaggtaacatcaaatcgtaccccaaaccgacacaggtggtcaggtagagaataccaaggcgcttgagagaactcgggtgaaggaactaggcaaaatggtgccgtaacttcgggagaaggcacgctgatatgtaggtgaggtccctcgcggatggagctgaaatcagtcgaagataccagctggctgcaactgtttattaaaaacacagcactgtgcaaacacgaaagtggacgtatacggtgtgacgcctgcccggtgccggaaggttaattgatggggttagcggtaacgcgaagctcttgatcgaagccccggtaaacggcggccgtaactataacggtcctaaggtagcgaaattccttgtcgggtaagttccgacctgcacgaatggcgtaatgatggccaggctgtctccacccgagactcagtgaaattgaactcgctgtgaagatgcagtgtacccgcggcaagacggaaagaccccgtgaacctttactatagcttgacactgaacattgagccttgatgtgtaggataggtgggaggctttgaagtgtggacgccagtctgcatggagccgaccttgaaataccaccctttaatgtttgatgttctaacgttgacccgtaatccgggttgcggacagtgtctggtgggtagtttgactggggcggtctcctcctaaagagtaacggaggagcacgaaggttggctaatcctggtcggacatcaggaggttagtgcaatggcataagccagcttgactgcgagcgtgacggcgcgagcaggtgcgaaagcaggtcatagtgatccggtggttctgaatggaagggccatcgctcaacggataaaaggtactccggggataacaggctgataccgcccaagagttcatatcgacggcggtgtttggcacctcgatgtcggctcatcacatcctggggctgaagtaggtcccaagggtatggctgttcgccatttaaagtggtacgcgagctgggtttagaacgtcgtgagacagttcggtccctatctgccgtgggcgctggagaactgaggggggctgctcctagtacgagaggaccggagtggacgcatcactggtgttcgggttgtcatgccaatggcactgcccggtagctaaatgcggaagagataagtgctgaaagcatctaagcacgaaacttgccccgagatgagttctccctgactccttgagagtcctgaaggaacgttgaagacgacgacgttgataggccgggtgtgtaagcgcagcgatgcgttgagctaaccggtactaatgaaccgtgaggcttaaccttacaacgccgaagatgttttggcggatgagagaagattttcagcctgatacagattaaatcagaacgcagaagcggtctgataaaacagaatttgcctggcggccttagcgcggtggtcccacctgaccccatgccgaactcagaagtgaaacgccgtagcgccgatggtagtgtggggtctccccatgcgagagtagggaactgccaggcatcaaataaacgaaaggctcagtcgaaagactgggcctttcgtttatctgttgtttgtcggtgaacgctctcctgagtaggacaaatccgccggggagcggatttgaacgttgcgaagcaacggcccggagggtggcggggcaggacgcccggccataaactgccaggcatcaaatttagcgaaaggccatccgtcaggatggcctttttgcgtttctacaaactcttcctgtcgtcatatctacaagccatccccccacagatacggtaaactagcctcgtttttgcatcaggaaagcagctatgaaccactccttaaaaccctggaacacatttggcattgatcataatgctcagcacattgtatgtgccgaagacgaacaacaattactcaatgcctggcagtatgcaaccgcagaaggacaacccgttcttattctgggtgaaggaagtaatgtactttttctggaggactatcgcggcacggtgatcatcaaccggatcaaaggtatcgaaattcatgatgaacctgatgcgtggtatttacatgtaggagccggagaaaactggcatcgtctggtaaaatacactttgcaggaaggtatgcctggtctggaaaatctggcattaattcctggttgtgtcggctcatcacctatccagaatattggtgcttatggcgtagaattacagcgagtttgcgcttatgttgattctgttgaactggcgacaggcaagcaagtgcgcttaactgccaaagagtgccgttttggctatcgcgacagtatttttaaacatgaataccaggaccgcttcgctattgtagccgtaggtctgcgtctgccaaaagagtggcaacctgtactaacgtatggtgacttaactcgtctggatcctacaacagtaacgccacagcaagtatttaatgcggtgtgtcatatgcgcaccaccaaactccctgatccaaaagtgaatggcaatgccggtagtttcttcaaaaaccctgttgtatctgccgaaacggctaaagcattactgtcacaatttccaacagcaccaaattacccccaggcggatggttcagtaaaactggcagcaggttggcttatcgatcagtgccagctaaaagggatgcaaataggtggggctgcggtgcaccgtcaacaggcgttagttctcattaatgaagacaatgcaaaaagcgaagatgttgtacagctggcgcatcatgtaagacagaaagttggtgaaaaatttaatgtctggcttgagcctgaagtccgctttattggtgcatcaggtgaagtgagcgcagtggagacaatttcatgaaggataacaccgtgccactgaaattgattgccctgttagcgaacggtgaatttcactctggcgagcagttgggtgaaacgctgggaatgagccgggcggctattaataaacacattcagacactgcgtgactggggcgttgatgtctttaccgttccgggtaaaggatacagcctgcctgagcctatccagttacttaatgctaaacagatattgggtcagctggatggcggtagtgtagccgtgctgccagtgattgactccacgaatcagtaccttcttgatcgtatcggagagcttaaatcgggcgatgcttgcattgcagaataccagcaggctggccgtggtcgccggggtcggaaatggttttcgccttttggcgcaaacttatatttgtcgatgttctggcgtctggaacaaggcccggcggcggcgattggtttaagtctggttatcggtatcgtgatggcggaagtattacgcaagctgggtgcagataaagttcgtgttaaatggcctaatgacctctatctgcaggatcgcaagctggcaggcattcttgtggagctgactggcaaaactggcgatgcggcgcaaatagtcattggagccgggatcaacatggcaatgcgccgtgttgaagagagtgtcgttaatcaggggtggatcacgctgcaggaagcggggatcaatctcgatcgtaatacgttggcggccatgctaatacgtgaattacgtgctgcgttggaactcttcgaacaagaaggattggcaccttatctgtcgcgctgggaaaagctggataattttattaatcgcccagtgaaacttatcattggtgataaagaaatatttggcatttcacgcggaatagacaaacagggggctttattacttgagcaggatggaataataaaaccctggatgggcggtgaaatatccctgcgtagtgcagaaaaataagaaaggggagtattcgctcccctgcaaattatttgcgtagtctgacctcttctaccgcatgattagcacttttcgtcaggattaaactggcgcgctcacgagtaggtagaatattttgctttaagttcagccagttgatctctttccacaatgtcatggcagtcttaatcgcttcttctttagttaatttcgcgtagttatgaaaataggaatccgggtcggtaaaagccccttcgcggaatttcagaaaacggttgatataccatgtctgaagtaagtcttccggtgcatcaacatatatcgaaaaatcgacaaaatcagaaacaaatacatgatgtggatcgtgtggataatccatcccgctctgtaagacatttaacccttcaagaattaaaatatcaggctgaacaaccgttttatctccatccgggatcacatcataaataagatgtgagtaaacaggtgctgtaacgtttggcacgccggatttgagatcggaaacaaacttcaccaggcgatgcatatcatacgattccgggaagcctttcttcttcatcagaccacgttctttcagaacctgattagggtgaaggaagccatctgtagtgatcagttcaacacgacgatgttccggccaacggcttaatagcgcctgcaatacacgggcggttgtacttttccccaccgcgacactgccagcaatactgataatgtaaggaatgcgttgcccgttggtaccaagaaactgttccagaactgcctgacggcgcagattcgagcttatatagaagttcagcaaacgtgacaaaggtaaatagatctcggcaacttcttctaacgagagatcttcattaatacctttgagacgggcgatctcatcttccgataacgtcataggtacggaatcacgcagagctgcccactggttgcggtcaaactgtaggtaaggcgtcattaacgtttgctcttttatactcataagcatgtttctggcggtcatagctctatcggcaaagcgatatttgccatggcgcgtcacagttctgttgaatgggttaatgggcaggagggtaacaccagatggggaggaataataagaaaaaatctctgccaggaagctatcgttgaaaagcaatgtgacagatattccatctgataaaaagaattatggtttagcaggagcgcattgttgagcacaatgatgttgaaaaagtgtgctaatctgccctccgttcggctgtttcttcatcgtgtcgcataaaatgtgaccaataaaacaaattatgcaattttttagttgcatgaactcgcatgtctccatagaatgcgcgctacttgatgccgacttagctcagtaggtagagcaactgacttgtaatcagtaggtcaccagttcgattccggtagtcggcaccatcaagtccggtggggttcccgagcggccaaagggagcagactgtaaatctgccgtcacagacttcgaaggttcgaatccttcccccaccaccaatttcggccacgcgatggcgtagcccgagacgataagttcgcttaccggctcgaataaagagagcttctctcgatattcagtgcagaatgaaaatcaggtagccgagttccaggatgcgggcatcgtataatggctattacctcagccttccaagctgatgatgcgggttcgattcccgctgcccgctccaagatgtgctgatatagctcagttggtagagcgcacccttggtaagggtgaggtcggcagttcgaatctgcctatcagcaccacttcttttctcctccctgttttttccttctgtttattgcattcaacaagtcgggcatgttgcctggttgatgtggtgatatcaccgatttatccgtgtcttagagggacaatcgatgtctaaagaaaagtttgaacgtacaaaaccgcacgttaacgtcggtactatcggccacgttgaccatggtaaaacaacgctgaccgctgcaatcactaccgtactggctaaaacctacggcggtgctgctcgcgcattcgaccagatcgataacgcgccggaagaaaaagctcgtggtatcaccatcaacacttctcacgttgaatacgacaccccgacccgtcactacgcacacgtagactgcccggggcacgccgactatgttaaaaacatgatcaccggtgctgcgcagatggacggcgcgatcctggtagttgctgcgactgacggcccgatgccgcagactcgtgagcacatcctgctgggtcgtcaggtaggcgttccgtacatcatcgtgttcctgaacaaatgcgacatggttgatgacgaagagctgctggaactggttgaaatggaagttcgtgaacttctgtctcagtacgacttcccgggcgacgacactccgatcgttcgtggttctgctctgaaagcgctggaaggcgacgcagagtgggaagcgaaaatcctggaactggctggcttcctggattcttacattccggaaccagagcgtgcgattgacaagccgttcctgctgccgatcgaagacgtattctccatctccggtcgtggtaccgttgttaccggtcgtgtagaacgcggtatcatcaaagttggtgaagaagttgaaatcgttggtatcaaagagactcagaagtctacctgtactggcgttgaaatgttccgcaaactgctggacgaaggccgtgctggtgagaacgtaggtgttctgctgcgtggtatcaaacgtgaagaaatcgaacgtggtcaggtactggctaagccgggcaccatcaagccgcacaccaagttcgaatctgaagtgtacattctgtccaaagatgaaggcggccgtcatactccgttcttcaaaggctaccgtccgcagttctacttccgtactactgacgtgactggtaccatcgaactgccggaaggcgtagagatggtaatgccgggcgacaacatcaaatggttgttaccctgatccacccgatcgcgatggacgacggtctgcgtttcgcaatccgtgaaggcggccgtaccgttggcgcgggcgttgtagcaaaagttctgagctaattgccgataacatttgacgcaatgcgcactaaaagggcatcatttgatgccctttttgcacgctttcgtaccagaacctggctcatcagtgattttctttgtcataatcattgctgagacaggctctgttgagggcgtataatccgaaaagctaatacgcgtttcgatttggtttgcctcgcgatcgcggggtgaaaatgtttgtagaaaacttctgacaggttggtttatgagtgcgaataccgaagctcaaggaagcgggcgcggcctggaagcgatgaagtgggtcgttgtggtggcattgctcctggtggcgattgtcggcaactatctttatcgcgacattatgctgccgctgcgtgcgctggccgtagtaattctgattgctgcagcgggtggtgtcgcgctgttaacgacaaaaggtaaagctaccgttgcttttgcccgtgaagcgcgtaccgaagtccgtaaggtcatttggccgactcgccaggaaacattgcacaccacgctgattgtggctgcggttaccgcagtaatgtcactgatcctgtggggactggatggtattctggttcgcctggtatcctttatcactggcctgaggttctgagatgtctgaagctcctaaaaagcgctggtacgtcgttcaggcgttttccggttttgaaggccgcgtagcaacgtcgctgcgtgagcatatcaaattacacaacatggaagatttgtttggtgaagtcatggtaccaaccgaagaagtggttgaaatccgtggcggtcagcgtcgcaaaagcgaacgtaaattcttccctggctacgtcctcgttcagatggtgatgaacgacgcgagctggcacctggtgcgcagcgtaccgcgtgtgatgggcttcatcggcggtacttccgatcgtcctgcgccaatcagcgataaagaagtcgatgcgattatgaaccgcctgcagcaggttggtgataagccgcgtccgaaaacgctgtttgaaccgggtgaaatggtccgtgttaatgatggtccgttcgctgacttcaacggtgttgttgaagaagtggattacgagaaatctcgtctgaaagtgtctgtttctatcttcggtcgtgcgaccccggtagagctggacttcagccaggttgaaaaagcctaacccagcgatcaaaaaagcggcgatttaatcgttgcacaaggcgtgagattggaatacaatttcgcgccttttgtttttatgggccttgcccgtaaaacgattttttatatcacggggagcctctcagaggcgttattacccaacttgaggaatttataatggctaagaaagtacaagcctatgtcaagctgcaggttgcagctggtatggctaacccgagtccgccagtaggtccggctctgggtcagcagggcgtaaacatcatggaattctgcaaagcgttcaacgcaaaaactgattccatcgaaaaaggtctgccgattccggtagtaatcaccgtttacgctgaccgttctttcactttcgttaccaagaccccgccggcagcagttctgctgaaaaaagcggctggtatcaagtctggttccggtaagccgaacaaagacaaagtgggtaaaatttcccgcgctcagctgcaggaaatcgcgcagaccaaagctgccgacatgactggtgccgacattgaagcgatgactcgctccatcgaaggtactgcacgttccatgggcctggtagtggaggactaagaaatggctaaactgaccaagcgcatgcgtgttatccgcgagaaagttgatgcaaccaaacagtacgacatcaacgaagctatcgcactgctgaaagagctggcgactgctaaattcgtagaaagcgtggacgtagctgttaacctcggcatcgacgctcgtaaatctgaccagaacgtacgtggtgcaactgtactgccgcacggtactggccgttccgttcgcgtagccgtatttacccaaggtgcaaacgctgaagctgctaaagctgcaggcgcagaactggtaggtatggaagatctggctgaccagatcaagaaaggcgaaatgaactttgacgttgttattgcttctccggatgcaatgcgcgttgttggccagctgggccaggttctgggtccgcgcggcctgatgccaaacccgaaagtgggtactgtaacaccgaacgttgctgaagcggttaaaaacgctaaagctggccaggttcgttaccgtaacgacaaaaacggcatcatccacaccaccatcggtaaagtggactttgacgctgacaaactgaaagaaaacctggaagctctgctggttgcgctgaaaaaagcaaaaccgactcaggcgaaaggcgtgtacatcaagaaagttagcatctccaccaccatgggtgcaggtgttgcagttgaccaggctggcctgagcgcttctgtaaactaatgcctttacgtgggcggtgattttgtctacaatcttacccccacgtataatgcttaatgcagacgtatatccgagatattcgggttgtggcaaggcggcaactgagtgagtcgccaggagcatagctaactatgtgactggtgcaaatgaaggaagccaacgccgtcacaagctgaatagcgacggatagaaaagatttgttcgttggagcctggcctatccaggcctccgtcgaagaccgcaggagtttcgcaagaaacttaatcccctgcgtagacggtgacagaacgctaagattattcttttatattctggcttgtttctgctcaccgtaattaagacgctctctccgtttggaggagtgaagtgagttccagagattttctctggcaaacatccaggagcaaagctaatggctttaaatcttcaagacaaacaagcgattgttgctgaagtcagcgaagtagccaaaggcgcgctgtctgcagtagttgcggattcccgtggcgtaactgtagataaaatgactgaactgcgtaaagcaggtcgcgaagctggcgtatacatgcgtgttgttcgtaacaccctgctgcgccgtgctgttgaaggtactccgttcgagtgcctgaaagacgcgtttgttggtccgaccctgattgcatactctatggaacacccgggcgctgctgctcgtctgttcaaagagttcgcgaaagcgaatgcaaaatttgaggtcaaagccgctgcctttgaaggtgagctgatcccggcgtctcagatcgaccgcctggcaactctgccgacctacgaagaagcaattgcacgcctgatggcaaccatgaaagaagcttcggctggcaaactggttcgtactctggctgctgtacgcgatgcgaaagaagctgcttaatcgcagttatctttttaacgcattcgcttacgtataaacttattctgatattcaggaacaatttaaatgtctatcactaaagatcaaatcattgaagcagttgcagctatgtctgtaatggacgttgtagaactgatctctgcaatggaagaaaaattcggtgtttccgctgctgctgctgtagctgtagctgctggcccggttgaagctgctgaagaaaaaactgaattcgacgtaattctgaaagctgctggcgctaacaaagttgctgttatcaaagcagtacgtggcgcaactggcctgggtctgaaagaagctaaagacctggtagaatctgcaccggctgctctgaaagaaggcgtgagcaaagacgacgcagaagcactgaaaaaagctctggaagaagctggcgctgaagttgaagttaaataagccaacccttccggttgcagcctgagaaatcaggctgatggctggtgactttttagtcaccagcctttttgcgctgtaaggcgccagtagcgtttcacactgtttgactactgctgtgcctttcaatgcttgtttctatcgacgacttaatatactgcgacaggacgtccgttctgtgtaaatcgcaatgaaatggtttaagcgtgatagcaacaggcattgcggaaagtgttccattttccggtcaacaaaatagtgttgcacaaactgtccgctcaatggacagatgggtcgacttgtcagcgagctgaggaaccctatggtttactcctataccgagaaaaaacgtattcgtaaggattttggtaaacgtccacaagttctggatgtaccttatctcctttctatccagcttgactcgtttcagaaatttatcgagcaagatcctgaagggcagtatggtctggaagctgctttccgttccgtattcccgattcagagctacagcggtaattccgagctgcaatacgtcagctaccgccttggcgaaccggtgtttgacgtccaggaatgtcaaatccgtggcgtgacctattccgcaccgctgcgcgttaaactgcgtctggtgatctatgagcgcgaagcgccggaaggcaccgtaaaagacattaaagaacaagaagtctacatgggcgaaattccgctcatgacagacaacggtacctttgttatcaacggtactgagcgtgttatcgtttcccagctgcaccgtagtccgggcgtcttctttgactccgacaaaggtaaaacccactcttcgggtaaagtgctgtataacgcgcgtatcatcccttaccgtggttcctggctggacttcgaattcgatccgaaggacaacctgttcgtacgtatcgaccgtcgccgtaaactgcctgcgaccatcattctgcgcgccctgaactacaccacagagcagatcctcgacctgttctttgaaaaagttatctttgaaatccgtgataacaagctgcagatggaactggtgccggaacgcctgcgtggtgaaaccgcatcttttgacatcgaagctaacggtaaagtgtacgtagaaaaaggccgccgtatcactgcgcgccacattcgccagctggaaaaagacgacgtcaaactgatcgaagtcccggttgagtacatcgcaggtaaagtggttgctaaagactatattgatgagtctaccggcgagctgatctgcgcagcgaacatggagctgagcctggatctgctggctaagctgagccagtctggtcacaagcgtatcgaaacgctgttcaccaacgatctggatcacggcccatatatctctgaaaccttacgtgtcgacccaactaacgaccgtctgagcgcactggtagaaatctaccgcatgatgcgccctggcgagccgccgactcgtgaagcagctgaaagcctgttcgagaacctgttcttctccgaagaccgttatgacttgtctgcggttggtcgtatgaagttcaaccgttctctgctgcgcgaagaaatcgaaggttccggtatcctgagcaaagacgacatcattgatgttatgaaaaagctcatcgatatccgtaacggtaaaggcgaagtcgatgatatcgaccacctcggcaaccgtcgtatccgttccgttggcgaaatggcggaaaaccagttccgcgttggcctggtacgtgtagagcgtgcggtgaaagagcgtctgtctctgggcgatctggataccctgatgccacaggatatgatcaacgccaagccgatttccgcagcagtgaaagagttcttcggttccagccagctgtctcagtttatggaccagaacaacccgctgtctgagattacgcacaaacgtcgtatctccgcactcggcccaggcggtctgacccgtgaacgtgcaggcttcgaagttcgagacgtacacccgactcactacggtcgcgtatgtccaatcgaaacccctgaaggtccgaacatcggtctgatcaactctctgtccgtgtacgcacagactaacgaatacggcttccttgagactccgtatcgtaaagtgaccgacggtgttgtaactgacgaaattcactacctgtctgctatcgaagaaggcaactacgttatcgcccaggcgaactccaacttggatgaagaaggccacttcgtagaagacctggtaacttgccgtagcaaaggcgaatccagcttgttcagccgcgaccaggttgactacatggacgtatccacccagcaggtggtatccgtcggtgcgtccctgatcccgttcctggaacacgatgacgccaaccgtgcattgatgggtgcgaacatgcaacgtcaggccgttccgactctgcgcgctgataagccgctggttggtactggtatggaacgtgctgttgccgttgactccggtgtaactgcggtagctaaacgtggtggtgtcgttcagtacgtggatgcttcccgtatcgttatcaaagttaacgaagacgagatgtatccgggtgaagcaggtatcgacatctacaacctgaccaaatacacccgttctaaccagaacacctgtatcaaccagatgccgtgtgtgtctctgggtgaaccggttgaacgtggcgacgtgctggcagacggtccgtccaccgacctcggtgaactggcgcttggtcagaacatgcgcgtagcgttcatgccgtggaatggttacaacttcgaagactccatcctcgtatccgagcgtgttgttcaggaagaccgtttcaccaccatccacattcaggaactggcgtgtgtgtcccgtgacaccaagctgggtccggaagagatcaccgctgacatcccgaacgtgggtgaagctgcgctctccaaactggatgaatccggtatcgtttacattggtgcggaagtgaccggtggcgacattctggttggtaaggtaacgccgaaaggtgaaactcagctgaccccagaagaaaaactgctgcgtgcgatcttcggtgagaaagcctctgacgttaaagactcttctctgcgcgtaccaaacggtgtatccggtacggttatcgacgttcaggtctttactcgcgatggcgtagaaaaagacaaacgtgcgctggaaatcgaagaaatgcagctcaaacaggcgaagaaagacctgtctgaagaactgcagatcctcgaagcgggtctgttcagccgtatccgtgctgtgctggtagccggtggcgttgaagctgagaagctcgacaaactgccgcgcgatcgctggctggagctgggcctgacagacgaagagaaacaaaatcagctggaacagctggctgagcagtatgacgaactgaaacacgagttcgagaagaaactcgaagcgaaacgccgcaaaatcacccagggcgacgatctggcaccgggcgtgctgaagattgttaaggtatatctggcggttaaacgccgtatccagcctggtgacaagatggcaggtcgtcacggtaacaagggtgtaatttctaagatcaacccgatcgaagatatgccttacgatgaaaacggtacgccggtagacatcgtactgaacccgctgggcgtaccgtctcgtatgaacatcggtcagatcctcgaaacccacctgggtatggctgcgaaaggtatcggcgacaagatcaacgccatgctgaaacagcagcaagaagtcgcgaaactgcgcgaattcatccagcgtgcgtacgatctgggcgctgacgttcgtcagaaagttgacctgagtaccttcagcgatgaagaagttatgcgtctggctgaaaacctgcgcaaaggtatgccaatcgcaacgccggtgttcgacggtgcgaaagaagcagaaattaaagagctgctgaaacttggcgacctgccgacttccggtcagatccgcctgtacgatggtcgcactggtgaacagttcgagcgtccggtaaccgttggttacatgtacatgctgaaactgaaccacctggtcgacgacaagatgcacgcgcgttccaccggttcttacagcctggttactcagcagccgctgggtggtaaggcacagttcggtggtcagcgtttcggggagatggaagtgtgggcgctggaagcatacggcgcagcatacaccctgcaggaaatgctcaccgttaagtctgatgacgtgaacggtcgtaccaagatgtataaaaacatcgtggacggcaaccatcagatggagccgggcatgccagaatccttcaacgtattgttgaaagagattcgttcgctgggtatcaacatcgaactggaagacgagtaattctcgctcaaacaggtcactgctgtcgggttaaaacccggcagcggattgtgctaactccgacgggagcaaatccgtgaaagatttattaaagtttctgaaagcgcagactaaaaccgaagagtttgatgcgatcaaaattgctctggcttcgccagacatgatccgttcatggtctttcggtgaagttaaaaagccggaaaccatcaactaccgtacgttcaaaccagaacgtgacggccttttctgcgcccgtatctttgggccggtaaaagattacgagtgcctgtgcggtaagtacaagcgcctgaaacaccgtggcgtcatctgtgagaagtgcggcgttgaagtgacccagactaaagtacgccgtgagcgtatgggccacatcgaactggcttccccgactgcgcacatctggttcctgaaatcgctgccgtcccgtatcggtctgctgctcgatatgccgctgcgcgatatcgaacgcgtactgtactttgaatcctatgtggttatcgaaggcggtatgaccaacctggaacgtcagcagatcctgactgaagagcagtatctggacgcgctggaagagttcggtgacgaattcgacgcgaagatgggggcggaagcaatccaggctctgctgaagagcatggatctggagcaagagtgcgaacagctgcgtgaagagctgaacgaaaccaactccgaaaccaagcgtaaaaagctgaccaagcgtatcaaactgctggaagcgttcgttcagtctggtaacaaaccagagtggatgatcctgaccgttctgccggtactgccgccagatctgcgtccgctggttccgctggatggtggtcgtttcgcgacttctgacctgaacgatctgtatcgtcgcgtcattaaccgtaacaaccgtctgaaacgtctgctggatctggctgcgccggacatcatcgtacgtaacgaaaaacgtatgctgcaggaagcggtagacgccctgctggataacggtcgtcgcggtcgtgcgatcaccggttctaacaagcgtcctctgaaatctttggccgacatgatcaaaggtaaacagggtcgtttccgtcagaacctgctcggtaagcgtgttgactactccggtcgttctgtaatcaccgtaggtccatacctgcgtctgcatcagtgcggtctgccgaagaaaatggcactggagctgttcaaaccgttcatctacggcaagctggaactgcgtggtcttgctaccaccattaaagctgcgaagaaaatggttgagcgcgaagaagctgtcgtttgggatatcctggacgaagttatccgcgaacacccggtactgctgaaccgtgcaccgactctgcaccgtctgggtatccaggcatttgaaccggtactgatcgaaggtaaagctatccagctgcacccgctggtttgtgcggcatataacgccgacttcgatggtgaccagatggctgttcacgtaccgctgacgctggaagcccagctggaagcgcgtgcgctgatgatgtctaccaacaacatcctgtccccggcgaacggcgaaccaatcatcgttccgtctcaggacgttgtactgggtctgtactacatgacccgtgactgtgttaacgccaaaggcgaaggcatggtgctgactggcccgaaagaagcagaacgtctgtatcgctctggtctggcttctctgcatgcgcgcgttaaagtgcgtatcaccgagtatgaaaaagatgctaacggtgaattagtagcgaaaaccagcctgaaagacacgactgttggccgtgccattctgtggatgattgtaccgaaaggtctgccttactccatcgtcaaccaggcgctgggtaaaaaagcaatctccaaaatgctgaacacctgctaccgcattctcggtctgaaaccgaccgttatttttgcggaccagatcatgtacaccggcttcgcctatgcagcgcgttctggtgcatctgttggtatcgatgacatggtcatcccggagaagaaacacgaaatcatctccgaggcagaagcagaagttgctgaaattcaggagcagttccagtctggtctggtaactgcgggcgaacgctacaacaaagttatcgatatctgggctgcggcgaacgatcgtgtatccaaagcgatgatggataacctgcaaactgaaaccgtgattaaccgtgacggtcaggaagagaagcaggtttccttcaacagcatctacatgatggccgactccggtgcgcgtggttctgcggcacagattcgtcagcttgctggtatgcgtggtctgatggcgaagccggatggctccatcatcgaaacgccaatcaccgcgaacttccgtgaaggtctgaacgtactccagtacttcatctccacccacggtgctcgtaaaggtctggcggataccgcactgaaaactgcgaactccggttacctgactcgtcgtctggttgacgtggcgcaggacctggtggttaccgaagacgattgtggtacccatgaaggtatcatgatgactccggttatcgagggtggtgacgttaaagagccgctgcgcgatcgcgtactgggtcgtgtaactgctgaagacgttctgaagccgggtactgctgatatcctcgttccgcgcaacacgctgctgcacgaacagtggtgtgacctgctggaagagaactctgtcgacgcggttaaagtacgttctgttgtatcttgtgacaccgactttggtgtatgtgcgcactgctacggtcgtgacctggcgcgtggccacatcatcaacaagggtgaagcaatcggtgttatcgcggcacagtccatcggtgaaccgggtacacagctgaccatgcgtacgttccacatcggtggtgcggcatctcgtgcggctgctgaatccagcatccaagtgaaaaacaaaggtagcatcaagctcagcaacgtgaagtcggttgtgaactccagcggtaaactggttatcacttcccgtaatactgaactgaaactgatcgacgaattcggtcgtactaaagaaagctacaaagtaccttacggtgcggtactggcgaaaggcgatggcgaacaggttgctggcggcgaaaccgttgcaaactgggacccgcacaccatgccggttatcaccgaagtaagcggttttgtacgctttactgacatgatcgacggccagaccattacgcgtcagaccgacgaactgaccggtctgtcttcgctggtggttctggattccgcagaacgtaccgcaggtggtaaagatctgcgtccggcactgaaaatcgttgatgctcagggtaacgacgttctgatcccaggtaccgatatgccagcgcagtacttcctgccgggtaaagcgattgttcagctggaagatggcgtacagatcagctctggtgacaccctggcgcgtattccgcaggaatccggcggtaccaaggacatcaccggtggtctgccgcgcgttgcggacctgttcgaagcacgtcgtccgaaagagccggcaatcctggctgaaatcagcggtatcgtttccttcggtaaagaaaccaaaggtaaacgtcgtctggttatcaccccggtagacggtagcgatccgtacgaagagatgattccgaaatggcgtcagctcaacgtgttcgaaggtgaacgtgtagaacgtggtgacgtaatttccgacggtccggaagcgccgcacgacattctgcgtctgcgtggtgttcatgctgttactcgttacatcgttaacgaagtacaggacgtataccgtctgcagggcgttaagattaacgataaacacatcgaagttatcgttcgtcagatgctgcgtaaagctaccatcgttaacgcgggtagctccgacttcctggaaggcgaacaggttgaatactctcgcgtcaagatcgcaaaccgcgaactggaagcgaacggcaaagtgggtgcaacttactcccgcgatctgctgggtatcaccaaagcgtctctggcaactgagtccttcatctccgcggcatcgttccaggagaccactcgcgtgctgaccgaagcagccgttgcgggcaaacgcgacgaactgcgcggcctgaaagagaacgttatcgtgggtcgtctgatcccggcaggtaccggttacgcgtaccaccaggatcgtatgcgtcgccgtgctgcgggtgaagctccggctgcaccgcaggtgactgcagaagacgcatctgccagcctggcagaactgctgaacgcaggtctgggcggttctgataacgagtaatcgttaatccgcaaataacgtaaaaacccgcttcggcgggtttttttatggggggagtttagggaaagagcatttgtcagaatatttaaggaatttctgaatactcataatcaatgtagagatgactaatatcctgaaactgactgaactaattgagtcaaactcggcaaggattcgatactattcctgtgtaactttcttaaggaacgagaatgaaacaggaagtggaaaagtggcgaccttttggacatccggatggtgatattcgtgatttatcatttcttgatgctcatcaggctgtctacgttcagcatcatgagggcaaagagcctttagagtatcgcttttgggttacctactctcttcactgcttcacaaaagattatgaacatcagacgaacgaagaaaaacaatcgttaatgtaccacgcgcctaaagaatctcgtcccttctgccagcaccgttataacttagcgcgcacacacttaaaaagaactattttggcgctgccagaaagcaacgttattcatgccgggtatggtagctatgccgtgattgaggtggacttagacggaggagataaggcattttactttgttgcgttcagggctttcagggaaaagaaaaaactccgtttgcatgtaactagcgcttatcccatttctgaaaaacagaaaggtaaatcagtgaaatttttcaccattgcctacaacttattgagaaataagcagcttcctcagccctcaaaataacaaaacccaccttaaggtgggtttcgccagagaattatctctggtattcagaacgccattaccggactttgccttgaccttgcgataatcgcaggttgcgggatgtctgaatttcttcagtctgctgcatcctggaagatgagaacatgtgttcttattttcgtctctatcatagttgagtatttactctcttacaatcagatctctttcattgctcaacaggcgatggcttcagactttgcattacggaatttttaagaaaggcagggcgaaacgaggaagaagcttttcgccctggacaacattcctgctgacggcactaccataaaaaaacacaacgctttcaacaaccttgcgtttttcatcttccgtagcggctcggaataaatttacgttcttacattccgtctcatagtctttgcgaggcgcgtcccagatagctgtcccagtctttccataccggctgcaaaccctgagcggttaacgcggcagcaaccgcttccggtctgcgatcgtcgtgcggtgagaactgttccaactcggggtgattatcggcatagccacctggctgcgttttcgagaaggcgctgacgttattgatcgccagcggaataacgcgatcgcgaaaccacggtgattcccgcgtggagagtgacagttcaatctccggtgcaagcagtcggaaggcgcagatggtttgcactaactggcgttcatccataatcgacgcaggctcaatgccgccagtacacgggcgcaggcgcggaaaggagacagagtaacggctttgccagtaatgctgttgcagccatagcaaatgttcggcaaccatatagctgtcaacgcgccagttgtcggaaaggccaattagcgcgccgaggcctatcttatcaatccccgcacgccccagccgatccggcgtttccagccgccagaagaagtcctgttttttgcctttcagatgatggcgggcataagtcgcctcgtgatatgtctcctgataaaccatcacgccatccagaccaagttgctttaactcggcgtattccgtctccgccagcggttgcacttccatctgtagtgaagagaactgttcacgaagggcagggagatgacgacgaaagtaatccatccccactttcgcctgatgttcaccagtgactaacagcagatgttcaaagcccatctcccgtatagcggcactttccctggcaatatccgcttcatccagcgttttgcgcttgatgcgattactcatggaaaatccacagtacgtgcagtcgttagcgcaaagattggaaagataaagcgggacgtagaaactaactgtgttgccaaatcgctgacgggtcagacgctgcgcccgttgggccagttgttccagatagccactggcggcaggcgataacagcgccatcatgtcgtcgcgggtgagttgcgaggcatttagcgcccgctctacgtcagcagccgttttgccgttgatacgcaggcggatgtcgtcccagtccagttgtcgccagcgatcgctgaaggttttcatgccgatgcctccagaaatccggtcagcgggctggtggcatgagcaaaataactgcggctgcccggtccggactgacgtgccagtaggcctgcttctaccgccagacgaaatgccttcgccatgttgacgggatcgtccgcgacggcaatcgccgtattcactaacaccgcgtcggcccccatttccagcgcctgcgcggcatggctgggaacgccgatgccagcatcgacaaccaccggcactgtggcctgctggataataatctccagcatggcgcgggtttccagtccctgattcgagccaatcggcgcgccgagcggcatcaccgctgcacagccgacttcttccagacgtttacacaataccggatcggccccgcagtaaggcagcacgacaaatccctgttgtaccagcgtttcggcggctttcagggtttcgatgggatcgggcaacagccagcgggcgtcagggtgaatctctaattttaaccagtttgtgcctaacgcttcacgagccagatgggcggcgaaaatggcttcttccgctgttttcgccccggatgtatttggcagcagggtcacacccgccgcgataagcggttcgaggatagcgtcgttgtgctggcgcaagtcgacacgtttcatcgccagtgtcaccagctggctgccggaagcgcggatcgcctccaccatcagttgtgaagaagcgaatttccctgtgccggtaaacagatgtgaatcaaacgttttgtccgcaatacgtaacatttcaaccccctgcaataacctgaaaaagcaggatctggtcgccatcctgcacgatatgttgcgcccactgctcacgcgggacgatttgctgattaatcgccagagccgcgcccgcttgtcgttggtcgagttgctccagtagttcgtgaacagtttgcccggcggcgcactgcatcgcttgatcgttaaacaggatctgcattgcttcctccgcataccgggcaaccactggcgcggcgcaacgccaggctgcgccactggctcgatttaccgtcgaacagtcggagttctcccgcaggtgtctctataccgcttaataacttaatggcttccagtgcctgcaaagtgcccataaccccgaccaccgggccaaccacgcccgccgtgcggcagttgcgttctggctcctggttatctggccacaggcagcggtaacacccctgctcccagggcggcgtcagtaccatcaactgaccgccaaatccgaccgcgctggcggtgataagcggcgtgttgagtgccacgcaggcggcattaatctcctggcgagtcgccatattgtcggtacagtcgagcaccacatcggcccgtgcaaccgcatcttttaacgcctcacccgttaaccgttgttgtaatgctgtcagttgaatgtcgggattcaactgtgtcagtcgctgttggctgacctgcgatttcgggcgatcgatatcttcagtggtaaagaggatttgtcgttgcagattgcttaaatgcacatcgtcgtcatctgccagtaccagcgtcccgacgccagcgcccgccaggtacagcgcagcaggtgtacccagcccgcccagaccgataatcagcacctggctgtcgagcagtttttgctgcccgtccagagcgatatcgtcgagcaggatttggcggctataacgcataaagtcacggtcattcatcgccaactcctgcaatttccagcaactgtgccgttgccaaacgccagtctgcggcttgagtaatggcgctgacgacggcgatactgccgacacccgttgctatcaccgcaggcgcgcgtgccagactgataccgccaatcgccacggtgggataatccgccagtcgctcaacatgccgtgccagctgttccagcccctgcggtgcagaaggcatctgtttggtttgcgtcgggaacacatgtcccagcgcgatataagaggggcgtgctgccagcgcgacgtcgatttccatatcgtcatgtgtcgaaacgcccagccgcaggcctgccgcgcggatggcattgagatcggtggcttgcaaatcttcctgccccaaatggacgccatacgcctgatgcttgatcgccagccgccagtaatcgttgataaacaatcgcgcgttatagcggcggcccagcgcaattgccgccacgacatcggcttccacctcttcatcgcgccgatctttgatgcgtagctggagagtacgtacgcctgcatccaacagacgttcgatccactgtacgctgtccaccaccgggtacagtcctgaacgaaaaggtacaggaggaaaatcaggctgatacatcacgcttcctccttacgcaggtagatttctccgcctctggcacggaagttctccgacatatccgccattcccatttcaatagtttgcgtggcggcgtaatcacgcacttcctggctgattttcatcgagcagaatttcggcccacacatggagcaaaaatgggcgactttacctgactcttgcggcagggtttcatcgtgataagcgcgggcggtaaacgggtcgagggccagattaaactggtcttcccagcgaaattcgaagcgggctttcgacatggcgttatcgcgaatttgcgcgcccggatgccctttcgccaggtcagcggcgtgggcggcaatcttataggtgataagcccctgcttaacatcttctttattgggcagacccagatgctcttttggcgttacgtaacagagcatcgcgcagccaaaccagccaatcatcgccgcaccaatccccgacgtgaagtggtcatagcccggcgcaatatcggtagttagcggccccagagtgtaaaacggcgcttcgtggcagtgctctaactcctcggtcatattgcggcggatcatctgcatcggcacgtggcctgggccttcaatcatcacctgcacgtcatattcccaggcaattttggtcagttcgcccagcgtatgcagctcggcaaactgcgcttcatcgttggcgtcctgaatagaaccggggcgcagaccgtcgcccagcgacagcgaaacgtcataagcggcacagatttcacaaatttcgcggaagtgttgatagaggaaattttcctgatgatgggagaggcaccatttcgccataatcgaaccgccgcgagagacgataccggtcaggcgtttcgcggtcatcggcacatagcgcagcagtacgcccgcatggatagtgaagtaatccacaccttgctcggcctgttccagcagcgtgtcgcggaacgcttcccaggtaagatcttcggcgatcccgttaaccttctccagcgcctggtagatcggcactgtaccgatcggcaccgggctgttacgcaaaatccactcgcgggtttcgtgaatatagcgaccggtggagagatccatcaccgtatccgctccccagcgcgtggaccataccagcttttccacttcttcttcgatggaagaggtgaccgccgagttgccgatattggcgttaacttttaccaggaaattgcgaccaataatcatcggctccgattccggatgattaatgttggccgggataatcgcacgtccggcagcaacttcatcacggacaaattccgcagtgatattttccggcagatgtgcgccaaagctcattcccggatgctggtggcgtaaaacctcgctacggatgcgctcgcggcccatattctcgcggatggcgatgaattccatttccggcgtgatgatgccctggcgggcgtagtgcagttgggtgacacggcgtcctgctttggcgcgttttggtgttagtacgccgctaaaacgcagttcgtcgaggccatcatctgccagccgcgctttagtgtaatcggaactgcgcacggtaagttcttcggtatcgccgcgcgcatcgatccacggctggcgtagttttgccagcccttgctgcacgttaatggcaatctgcggatcaccatacgggccggaggtgtcgtagaccggaatcgcttcgttttcttcgtactgcggctgttctttgctaccgccaattagcgtcgggctaagctggatctcacgcatcggcacgcgcacgccggggtgtgtgccagtgatataaatgcgttttgagttgggaaaggcggtgccttccagggtgtcgataaaatgttgggcccgggcgcgttgttcgcggcgggtcagttttgttgcagacatagctcattccaaaaagttaaggacgtggcttgtcagacgacggatgaagcaagagacgatcgccgcaggggcgatgcgatagcagattaactcttgttcccttcgcaggtattagcctgatcaggttccgcggatcccgaataaacggtctcagccagttaaggcactccgacaagaaattagccccgcaaatggggcattgaatgtaaattacgcgttaacagcgcagaactcaagcaggatgtttgacgcgggcggcgtcaagcaccagcagaatcagcttatcttccagcacaaagcgcgcttccagcgcctcgccgatgtcagataaaacctgttgaaactcaaggtaattatcatgatcgatggcggtttccagactggaatcgtagtaatccataatctgttgagtattggcttcgagttgcggccaaatcttcgcggcgcgcgcgagttgcccgttgccttccagcttatgaagaatgcgctcataaatactgaaatgtccggcagacaagtaatcgaccaggctctgacaaaaatcatcaagggctttttcgtttagcctcatgtacgattctttgccaggcttaatgccaaccagattgtagtaagccacgagcagatgcttacgtacatgtagccagcgatcaaccagtttgttacttcctctgacgcgctccgtcaggttatcgagctggttaagcatgattgactccgcaagtttgtattcaaaaactgctcagtgagaaatgtaaaaaccatgttaaacatgccagtgatgcaaaggtagtgcaagagctatggatcgtataattgaaaaattagatcacggctggtgggtcgtcagccatgaacaaaaattatggttgccgaagggagaattgccatatggcgaagcggcaaatttcgatcttgtgggtcagcgcgcactacaaatcggcgaatggcagggggaacctgtttggttagtacaacagcagcggcgtcacgatatggggtcggtacgtcaggtcattgatctcgatgttgggctgtttcaactggccggacgaggcgtacaactggcggagttttaccgatcgcataaatactgtggttactgcgggcatgaaatgtatccgagcaaaaccgaatgggcgatgctgtgcagccattgccgtgagcgttactacccgcaaatcgccccctgcattattgttgccatccgtcgcgatgattcgatcctcctcgcccagcatacccgccatcgtaacggtgtccatacggtacttgccggattcgtcgaagtgggcgaaaccctcgagcaggcggtcgcgcgggaagtgatggaagagagcggaattaaagttaaaaacttgcgttatgtgacttcccagccgtggccgtttcctcagtctttaatgaccgcgtttatggcggaatatgacagcggcgacatcgtgatcgacccgaaagaattgcttgaggcgaactggtatcgctatgacgatttgccgttactcccgccgcccggcaccgtagcgcgccgtctgatagaagatactgtggcgatgtgtcgggcagagtatgagtgatgatacactgaccgcctgacgcactaaggaacagccaaaatgaccgaacttaaaaacgatcgttatctgcgggcgctgctgcgccagcccgttgatgtcactccagtatggatgatgcgccaggcgggtcgctatctaccggaatataaagccacgcgcgcccaggcgggcgattttatgtcgctgtgcaaaaacgccgagctggcgtgcgaagtgactttgcaaccgctgcgtcgctacccgctggatgcggcgatcctcttttccgatatcctcaccgtgccggacgcgatggggttagggctctattttgaagccggagaaggtccgcgttttacctcgccagtcacctgcaaagccgacgtcgataaactgccaattccggacccggaagatgagctgggttacgtgatgaacgcggtgcgtaccattcgtcgcgaactgaaaggcgaagtgccgctgattggtttttccggcagcccgtggacgctggcgacctacatggtggaaggcggcagcagcaaagcgttcaccgtgatcaaaaaaatgatgtatgccgatccgcaggcgctgcacgctctactcgataaactggcgaaaagcgtcactttgtatctgaatgcgcagattaaagccggtgctcaggcagtgatgattttcgacacctggggcggtgtgcttaccgggcgcgattatcaacagttctcgctctattacatgcataaaattgttgatggtttactgcgtgaaaacgacggtcgccgcgtaccggtcacgctgtttaccaaaggcggcggacagtggctggaagcgatggcagaaaccggttgcgatgcgttgggcctcgactggacaacggatatcgccgatgcgcgccgccgtgtgggcaataaagtcgcgttgcagggtaatatggatccgtcgatgctgtacgctccgcctgcccgcattgaagaagaagtagcgactatacttgcaggtttcggtcacggcgaaggtcatgtctttaaccttggtcacggcattcatcaggatgtgccgccagaacatgctggcgtgttcgtgaaggcagtgcatcgactgtctgaacaatatcaccgctaaggagtgattatggatctcgcgtcattacgcgctcaacaaatcgaactggcttcttctgtgatccgcgaggatcgactcgataaagatccaccggatctgatcgccggagccgatgtcgggtttgagcagggcggagaagtgacgcgagcggcgatggtgctgctgaaatatccctcgcttgagctggtggagtataaagttgcccgcatcgccaccaccatgccttacattccaggttttctttccttccgcgaatatcctgcgctgctggcagcgtgggagatgctgtcgcaaaagccggatttagtgtttgtcgatggtcatgggatctcgcatcctcgccgtcttggcgtcgccagccattttggcttattggtggatgtgccgaccattggcgtggcgaaaaaacggctctgcggtaaattcgaaccgctctccagcgaaccgggcgcgctggccccactgatggataaaggcgagcagctggcctgggtctggcgcagcaaagcgcgctgtaacccgttgtttatcgctaccggccatcgggtcagcgtggacagcgcgctggcgtgggtacaacgctgcatgaaaggctatcgtctgccggagccaacgcgctgggcggacgcggtggcctcggaacgtccggcgttcgtgcgctatacagcaaatcagccctaattcaggtaaactgcggataatttccgtatttgagaactcaacatgttacaaaacccaattcatctgcgtctggagcgcctggaaagctggcagcatgtcactttcatggcttgcttatgcgaacgcatgtaccccaattacgccatgttctgccagcaaaccggttttggtgatgggcaaatttaccgtcgcattctcgatctcatctgggaaacgctgaccgttaaagacgcaaaagtaaatttcgacagccaactggagaaatttgaagaagcgattccttcagccgacgatttcgatctgtacggcgtttatccggcaatcgatgcatgcgtggcgttaagtgaactggtccattcgcgtttgagtggtgaaacgctcgaacacgcggtggaagtgagtaagacctccatcacgaccgttgcgatgctggaaatgactcaggctggtcgcgaaatgagcgatgaagagcttaaagaaaacccagctgtagagcaagaatgggacattcagtgggaaatattccgacttttagctgagtgcgaagaacgcgatatcgagctgataaaaggccttagggcagacctgcgtgaggcgggtgagagcaatattggtataatttttcagcaataagaccagaaaacgtgatttaacgcctgatttgtcgtacctggagtcttccctttcgccccccgtctggtctacatttggggggcgaaaaaaagtggctatcggtgcgtgtatgcaggagagtgctattctggcatttccgtcgcactcgatgcttagcaagcgataaacacattgtaaggataacttatgaacaagactcaactgattgatgtaattgcagagaaagcagaactgtccaaaacccaggctaaagctgctctggagtccactctggctgcaattactgagtctctgaaagaaggcgatgctgtacaactggttggtttcggtaccttcaaagtgaaccaccgcgctgagcgtactggccgcaacccgcagaccggtaaagaaatcaaaattgccgcagctaacgtaccggcatttgtttctggcaaggcactgaaagacgcagttaagtaagattgcgtggcagtgaacagttttaacgaaggggtggtttcaccccttttgtctttctggcgtcgatcattgatgctggcaggtgcgctgtttctcactgcctgtagccacaactcttcacttcctccctttaccgccagtggatttgctgaagaccagggcgcggtacgcatctggcgaaaagacagcggcgataatgtgcatctgcttgccgtgtttagcccgtggcgcagtggcgataccacgacgcgagagtatcgctggcagggcgataacctcacgctcatcaatatcaatgtttacagcaaaccgccggtgaatattcgcgcgcgttttgacgatcgcggtgatctgagctttatgcaacgtgaatccgatggggaaaagcagcagctttctaacgaccaaatcgatttataccgttatcgtgctgatcagatccgccagattagcgatgccttacgtcaggggagagtcgtgctgcgccaggggcgctggcatgcgatggaacagaccgtgaccacctgcgaagggcaaaccattaaacctgatttagattcgcaggcgatagcgcatatcgagcgccgccagagccgctcttctgttgatgtcagcgtggcatggctggaagcgcccgaaggttcgcaattactgttggtggcaaactctgatttctgtcgctggcaacccaacgagaaaacgttctgatttaccagtggcccatacccatatgaccgccaccaccgcagccgccgtaacccattccggtaccgcgcggaatacccgcttcagccatcgcaatatctcgtttcacccgtaactcatctaacgactgacgcaaattctccatctctttggcgaccgcgttaattttgctgctatccggtgggttcgcggctaacagggcattgtattcataacgcttcgtcaccagttgctgttgcagtgcgctgctttgagcgtaaaagtcattatggattttctgccacgctgtctgttgttcgctggtcaaaggcgcggcattttgctgccacataccgtgtccgccgtgagcaaatgcagatgtcgagcccatcgccattgctgaaagcgccatcattaccagggcaattttcgtgttccgtttcatggttaatcctccgatggttgtcttacttcgggtattgcatcttccgtgccaacgatgaaacgctgatatgacgggtaatctggcatgataaacgagtaaaaatgactcgcctgctgcgggtagcgagtcatttttactcattgaaacttaagcctttgtgttacagcgcagggtaagcgctgataaaagatggcatgatttctgctgtcagaaagggatgagcaggcaaagaagaagatgcgttttatgcaacgttctaaagactccttagctaaatggttaagcgcgatcctccccgtggtcattgttgggctggtggggctgtttgcggtgacggtgattcgcgattatgggcgcgagactgccgccgccagacaaacgctgctggaaaaaggcagtgtacttattcgcgctcttgaatccggctcgcgcgtcggcatggggatgcgcatgcatcatgcgcagcagcaggccttactggaagaaatggccgggcagcctggagtacgttggtttgcggtcacggatgaacaaggaacaatcgtgatgcatagcaactccggcatggtgggaaaacagctttattccccgcaggaaatgcagcagttacatccgggagatgaagaagcgtggcggcggatcgatagcgcagacggcgagcctgttctggaaatttatcgccagtttcaaccgatgtttgctgctggaatgcaccggatgcgccatatgcagcagtatgccgcgacaccacaagcaattttcatcgctttcgacgccagtaatattgtgagtgccgaagatcgtgagcagagaaacaccctgattatcctcttcgccctggcgacggtcttgctggcaagcgtgttgtcattcttctggtatcgccgctatctgcgctcgcgccagctgttgcaggatgaaatgaagcgcaaagagaagctggtggcactggggcatcttgcagcaggcgttgcccacgaaatccgtaatccactttcctcaattaaagggctggcgaaatactttgccgaacgcgcgccagcagggggagaagcgcatcaattggcgcaggtgatggcgaaagaagccgaccgtttaaaccgtgtggtaagcgagttgctggaactggttaagccaacgcatctggctttgcaggcggtggatctcaacacgctgattaaccactcattacagctggtaagccaggatgcaaacagccgggagatccagttacgctttaccgccaacgacacattaccggtaattcaggccgacccagacaggctgactcaggtcctgttgaatctctatctcaatgctattcaggcgattggtcagcatggtgtgattagcgtgacggccagcgaaagcggcgcgggcgtgaaaatcagcgttaccgacagcggtaagggaattgcggcaggtcagcttgaagccatcttcactccgtacttcaccaccaaagccgaaggcaccggattggggctggcggtcgtgcataatattgttgaacaacacggtggtacaattcaggtcgcaagccaggagggaaaaggcgcaacgttcaccctctgtcttccggtcaatattacgcgtaaggacccacaaggatgacgcacgataatatcgatattctggtggtggatgatgacattagccactgcactattttgcaggctttactgcgcggctggggctataacgtcgcgctggcgaacagcgggcgacaggcgctggagcaggtgcgggagcgagtttttgatcttgtgctttgcgatgtgcgaatggcggagatggacggcattgccacgctaaaagagatcaaagcgttaaatccggcgattccggtactgattatgaccgcatactccagcgtcgagacggcggtagaggcactgaaaaccggggcgctggattatctcatcaagccgctggatttcgataacctacaggcgacgctggaaaaggcgctcgcgcatacgcacagtattgatgctgaaacacctgcggtgactgccagccagttcggtatggtcggtaaaagcccggcgatgcaacacctgctcagtgaaatcgccctcgtcgcgccatcggaagccacggtgctgatccacggcgattccggcaccggtaaagagctggtcgccagggcgattcacgccagtagcgcacgtagcgaaaaaccgctggtaacgctcaactgtgcggcactcaacgaatccttgctggaatctgaattgttcggtcacgaaaaaggggcgtttactggagccgataaacgccgggaagggcgctttgttgaggcggacggcggcacgctgtttctcgatgaaattggcgatatctcgccgatgatgcaggtgcgtctgctgcgtgcgattcaggagcgcgaagttcagcgtgtcggtagcaaccagactatctcggttgatgtccggctgattgcggcgacccatcgcgatcttgccgcagaggtgaatgccgggcgttttcgccaggatctctactatcgcctgaatgtggtggcgattgaagtaccatcgctgcggcaacggcgggaagatatccctctgctggctggccattttctgcagcgctttgccgagcgtaatcgcaaggcggtaaaaggttttacgccccaggcgatggatctgttgattcattacgactggccgggaaatattcgtgagctggaaaacgcggtggaacgggcagtggtgctgctgaccggggaatatatttccgaacgcgagctgccgctggcgattgccagtacgccgatcccgctgggacaaagtcaggatattcagccgttggtggaagtggaaaaagaggtgattctggcggcgctggagaaaacgggcggcaacaaaaccgaagccgcccgtcagttagggatcacgcgcaaaacgctattggcaaaactgtcgcgttagttctgctcgcgttcgatggcgcgccagccgatatctttccggcagaagcagtcgtcccagtgaatatcggtcattaaggcataagcgcgtttctgcgcttctgccacggtatgacccagcgcggtgacgcacagtacgcgcccgccgctggtcactacctgctcgtcatccgccagttttgtgcctgcatggaacactttgccgtcttccacttcttccagcggcaggccgtggatcacatcaccggtgcggtaatcgcccggatatccacccgcagccatcaccacgccgagagaagcgcgttcatcccactcggatgttttctcgtccagcttcccttcacaggctgccaggcagagctcaaccagatcggacttcatgcgcagcataatcggctgggtttccggatcgccaaagcggcagttaaattcgataaccttcggattgccctgtttgtcgatcatcaggcccgcgtagagaaaaccggtgtaggtgttgccttccgccgccatgcctttcacggttggccagatgatacgttccatggtgcgctgatgaacttcatcggttactaccggcgcgggggagtaagcgcccatcccgccggtgtttggtccggtatctttatcgcctacgcgtttgtgatcctggctggtagccatcggcagcacatgctctccgtccaccatcacgataaagctcgcttcttcgccatcgaggaactcttcgataacgatgcgatgacccgcgtcgccaaaagcgttgcccgccagcatatcgtgaacagccgcttccgcttcttccagcgtcatcgccacgataacgcctttcccggcagccagaccgtccgctttaatgacgattggcgcgcctttctcacgcagatacgccagcgcaggttctacctcggtgaagttctggtattccgccgtagggattttatggcgggccaggaaatctttggtaaacgcttttgagccttccagttgggccgcacctgctgttgggccgaagattttcagcccggcggcgcggaaggtatcgaccacgcctttaaccagcggcgcttccgggccgacgatggtcagatcaatcttttcgttttgtgcgaaatccaacagcgccgggatatcggtcacgccgatagcaacgttttgcagcgcgggttccagcgcagtgcctgcattacccggagcaacaaaaacagtgtcaaccagcggcgactgggccgctttccaggccagcgcgtgctcgcgcccgccgttaccaatcactaatactttcatctattgctccattaatggcggaagtggcgcatgtcggtgaagagcatcgcaataccgtgctcgtcggcggcggcaatcacttcgtcatcacggatggaaccgccaggctggattacgcaggtcacgcccgcagcagcggcggcatcaataccgtcgcggaacgggaagaacgcgtcagaagccattgaggaacctttcacttccaggccttcatcggcagctttaataccggcgattttcgcggagtacacgcggctcatctggcccgcgccaataccgatggtcatattgtttttggcatagacgatagcattggatttcacgaacttcgccactttccagcagaacagcgcatcacgcagttcctgttcggtcggctgacgttgggtgacgacgcgcagttcttccgcaccgaccatccccaggtcacgatcctgaaccagcagaccgccgttcacgcgtttgaaatcaagacccggaacacgctcgccccactgaccgcaggtcagaacgcgcacgttctgtttggcggcggtgattttcagggcttcttcgctggcggaaggcgcaataatcacttcgacaaactgacgagaaatgatggcctgtgcggtttccgcatccagctcgcggttaaaggcaatgatgccgccgaatgcggaggttgggtcggttttgtacgcgcgatcgtaagcatcaagaatggaattgccgatagccacgccgcaagggttggcgtgcttcacaatcacacatgccggctcggcgaactctttcacgcactccagcgccgcatcggtatcggcgatgttgttataagagagggctttaccctgaacctgggttgcggtagcaacggaggcttctttcacattctcttctatatagaaggcagcctgctggtggctgttctcgccgtaacgcatatcctgcttcttaatgaagttcaggttcagcgtgcgtgggaagcgaccggcggcttctttgctttcaccgtggtaagccggaaccatgctgccgaagtagttggcaatcatgctgtcgtaggcggcagtgtgttcgaaggctttgatggcgaggtcgaaacgggttgcaagcgtcagcgatccttcgttgtcatccatctctttaataatggcgtcgtagtcgctgctcttcaccacgattgcgacatctttatggttcttggcggcggagcgcaccatcgttgggccgccgatatcgatgttctcaaccgcatcttccagcgagcaaccttcacgggccacggtctgggcgaacggatacaggttaacaaccaccatatcgataggctggatctgatgttcttccataatggcatcgtcctggccacgacggcccagaatgccaccatgtactttcggatgcagggtcttcacgcgtccatccatcatctccgggaaaccggtgtaatcggaaacttcggttaccggcagacctttttctgctaacagacgggcagtgccccctgtagacagcagctccacaccgcgtgcggaaagtgcttgggcgaattcgacgataccggctttgtcagaaacactgagcagagcgcggcggactggacgacgttgttgcatggtaaatcccctggatttgactattacagagagcgttagctgaatttttcgcgaaaaactcagctaacgcccctaacggggcatccttatttttcgcccgcattgtaacgaaaacgtttgcgcaacgctcgcgaatttttctctttcaatggtgatcacaattttgacagtggttaccgtgggaaaaatacagaaattacattgatgattgtggataactctgtgcgtaaaaaggtataaagcgggcttttgctggggaatgcagcagtcagtcatttttctgcaatttttctattgcggcctgcggagaactccctataatgcgcctccatcgacacggcggatgtgaatcacttcacacaaacagccggttcggttgaagagaaaaatcctgaaattcagggttgactctgaaagaggaaagcgtaatatacgccacctcgcgacagtgcgctaaagcgcgtcgcaactgctctttaacaatttatcagacaatctgtgtgggcactcgaagatacggattcttgacgtcgcaagacgaaaaatgaataccaagtctcaagagtgaacacgtaattcattacgaagtttaattctttgagcatcaaacttttaaattgaagagtttgatcatggctcagattgaacgctggcggcaggcctaacacatgcaagtcgaacggtaacaggaatcagcttgctgattcgctgacgagtggcggacgggtgagtaatgtctgggaaactgcctgatggagggggataactactggaaacggtagctaataccgcataacgtcgcaagaccaaagagggggaccttcgggcctcttgccatcggatgtgcccagatgggattagctagtaggtggggtaacggctcacctaggcgacgatccctagctggtctgagaggatgaccagccacactggaactgagacacggtccagactcctacgggaggcagcagtggggaatattgcacaatgggcgcaagcctgatgcagccatgccgcgtgtatgaagaaggccttcgggttgtaaagtactttcagcggggaggaagggagtaaagttaatacctttgctcattgacgttacccgcagaagaagcaccggctaactccgtgccagcagccgcggtaatacggagggtgcaagcgttaatcggaattactgggcgtaaagcgcacgcaggcggtttgttaagtcagatgtgaaatccccgggctcaacctgggaactgcatctgatactggcaagcttgagtctcgtagaggggggtagaattccaggtgtagcggtgaaatgcgtagagatctggaggaataccggtggcgaaggcggccccctggacgaagactgacgctcaggtgcgaaagcgtggggagcaaacaggattagataccctggtagtccacgccgtaaacgatgtcgacttggaggttgtgcccttgaggcgtggcttccggagctaacgcgttaagtcgaccgcctggggagtacggccgcaaggttaaaactcaaatgaattgacgggggcccgcacaagcggtggagcatgtggtttaattcgatgcaacgcgaagaaccttacctggtcttgacatccacagaactttccagagatggattggtgccttcgggaactgtgagacaggtgctgcatggctgtcgtcagctcgtgttgtgaaatgttgggttaagtcccgcaacgagcgcaacccttatcctttgttgccagcggtccggccgggaactcaaaggagactgccagtgataaactggaggaaggtggggatgacgtcaagtcatcatggcccttacgaccagggctacacacgtgctacaatggcgcatacaaagagaagcgacctcgcgagagcaagcggacctcataaagtgcgtcgtagtccggattggagtctgcaactcgactccatgaagtcggaatcgctagtaatcgtggatcagaatgccacggtgaatacgttcccgggccttgtacacaccgcccgtcacaccatgggagtgggttgcaaaagaagtaggtagcttaaccttcgggagggcgcttaccactttgtgattcatgactggggtgaagtcgtaacaaggtaaccgtaggggaacctgcggttggatcacctccttaccttaaagaagcgtactttgcagtgctcacacagattgtctgatgaaaatgagcagtaaaacctctacaggcttgtagctcaggtggttagagcgcacccctgataagggtgaggtcggtggttcaagtccactcaggcctaccaaatttgcacggcaaatttgaagaggttttaactacatgttatggggctatagctcagctgggagagcgcctgctttgcacgcaggaggtctgcggttcgatcccgcatagctccaccatctctgtagtgattaaataaaaaatacttcagagtgtacctgcaaaggttcactgcgaagttttgctctttaaaaatctggatcaagctgaaaattgaaacactgaacaacgaaagttgttcgtgagtctctcaaattttcgcaacacgatgatgaatcgaaagaaacatcttcgggttgtgaggttaagcgactaagcgtacacggtggatgccctggcagtcagaggcgatgaaggacgtgctaatctgcgataagcgtcggtaaggtgatatgaaccgttataaccggcgatttccgaatggggaaacccagtgtgtttcgacacactatcattaactgaatccataggttaatgaggcgaaccgggggaactgaaacatctaagtaccccgaggaaaagaaatcaaccgagattcccccagtagcggcgagcgaacggggagcagcccagagcctgaatcagtgtgtgtgttagtggaagcgtctggaaaggcgcgcgatacagggtgacagccccgtacacaaaaatgcacatgctgtgagctcgatgagtagggcgggacacgtggtatcctgtctgaatatggggggaccatcctccaaggctaaatactcctgactgaccgatagtgaaccagtaccgtgagggaaaggcgaaaagaaccccggcgaggggagtgaaaaagaacctgaaaccgtgtacgtacaagcagtgggagcctcttttatggggtgactgcgtaccttttgtataatgggtcagcgacttatattctgtagcaaggttaaccgaataggggagccgaagggaaaccgagtcttaactgggcgttaagttgcagggtatagacccgaaacccggtgatctagccatgggcaggttgaaggttgggtaacactaactggaggaccgaaccgactaatgttgaaaaattagcggatgacttgtggctgggggtgaaaggccaatcaaaccgggagatagctggttctccccgaaagctatttaggtagcgcctcgtgaattcatctccgggggtagagcactgtttcggcaagggggtcatcccgacttaccaacccgatgcaaactgcgaataccggagaatgttatcacgggagacacacggcgggtgctaacgtccgtcgtgaagagggaaacaacccagaccgccagctaaggtcccaaagtcatggttaagtgggaaacgatgtgggaaggcccagacagccaggatgttggcttagaagcagccatcatttaaagaaagcgtaatagctcactggtcgagtcggcctgcgcggaagatgtaacggggctaaaccatgcaccgaagctgcggcagcgacgcttatgcgttgttgggtaggggagcgttctgtaagcctgtgaaggtgtgctgtgaggcatgctggaggtatcagaagtgcgaatgctgacataagtaacgataaagcgggtgaaaagcccgctcgccggaagaccaagggttcctgtccaacgttaatcggggcagggtgagtcgacccctaaggcgaggccgaaaggcgtagtcgatgggaaacaggttaatattcctgtacttggtgttactgcgaaggggggacggagaaggctatgttggccgggcgacggttgtcccggtttaagcgtgtaggctggttttccaggcaaatccggaaaatcaaggctgaggcgtgatgacgaggcactacggtgctgaagcaacaaatgccctgcttccaggaaaagcctctaagcatcaggtaacatcaaatcgtaccccaaaccgacacaggtggtcaggtagagaataccaaggcgcttgagagaactcgggtgaaggaactaggcaaaatggtgccgtaacttcgggagaaggcacgctgatatgtaggtgaggtccctcgcggatggagctgaaatcagtcgaagataccagctggctgcaactgtttattaaaaacacagcactgtgcaaacacgaaagtggacgtatacggtgtgacgcctgcccggtgccggaaggttaattgatggggttagcggtaacgcgaagctcttgatcgaagccccggtaaacggcggccgtaactataacggtcctaaggtagcgaaattccttgtcgggtaagttccgacctgcacgaatggcgtaatgatggccaggctgtctccacccgagactcagtgaaattgaactcgctgtgaagatgcagtgtacccgcggcaagacggaaagaccccgtgaacctttactatagcttgacactgaacattgagccttgatgtgtaggataggtgggaggctttgaagtgtggacgccagtctgcatggagccgaccttgaaataccaccctttaatgtttgatgttctaacgttgacccgtaatccgggttgcggacagtgtctggtgggtagtttgactggggcggtctcctcctaaagagtaacggaggagcacgaaggttggctaatcctggtcggacatcaggaggttagtgcaatggcataagccagcttgactgcgagcgtgacggcgcgagcaggtgcgaaagcaggtcatagtgatccggtggttctgaatggaagggccatcgctcaacggataaaaggtactccggggataacaggctgataccgcccaagagttcatatcgacggcggtgtttggcacctcgatgtcggctcatcacatcctggggctgaagtaggtcccaagggtatggctgttcgccatttaaagtggtacgcgagctgggtttagaacgtcgtgagacagttcggtccctatctgccgtgggcgctggagaactgaggggggctgctcctagtacgagaggaccggagtggacgcatcactggtgttcgggttgtcatgccaatggcactgcccggtagctaaatgcggaagagataagtgctgaaagcatctaagcacgaaacttgccccgagatgagttctccctgactccttgagagtcctgaaggaacgttgaagacgacgacgttgataggccgggtgtgtaagcgcagcgatgcgttgagctaaccggtactaatgaaccgtgaggcttaaccttacaacgccgaagatgttttggcggatgagagaagattttcagcctgatacagattaaatcagaacgcagaagcggtctgataaaacagaatttgcctggcggccttagcgcggtggtcccacctgaccccatgccgaactcagaagtgaaacgccgtagcgccgatggtagtgtggggtctccccatgcgagagtagggaactgccaggcatcaaataaaacgaaaggctcagtcgaaagactgggcctttcgtttatctgttgttgtcggtgaacgctctcctgagtaggacaaatccgccgggagcggatttgaacgttgcgaagcaacggcccggagggtggcgggcaggacgcccgccataaactgccaggcatcaaatttagcgaaaggccatccgtcaggatggccttttgcattggcgcagaaaaaaatgccgggtgcgacgctggcgcgtcttctccagcctgggcaggcacggcaggggcagcttattcctccacatacgccagattcagcaacggatacggtttccccaaatcgtccacctcagagcgtcccgtaaccttaaaccccaccttcttatagaacccaaccgcctgctcattttgctcattaacgttggttgtcagttccggtgccatcgagagcgcatgctccaccagcacccgacctacgccgcagccgcgcacatcaggatcgataaacagcgcatccatatgctgcccacttaacaacataaatccaaccggctgatcccgctcattaaccgcgacccacaacggtgcttccggcagaaaggaacgcaccagttcttccagctcggcccgatactccgctgataaaaaatcgtgggtggcatcgaccgaacgacaccaaatcgcaacgagttcttccccttcctcatgccgcgagcggcgaatactaataaccattttctctccttttagtcattcttatattctaacgtagtcttttccttgaaactttctcaccttcaacatgcaggctcgacattggcaaattttctggttatcttcagctatctggatgtctaaacgtataagcgtatgtagtgaggtaatcaggttatgccgattcgtgtgccggacgagctacccgccgtcaatttcttgcgtgaagaaaacgtctttgtgatgacaacttctcgtgcgtctggtcaggaaattcgtccacttaaggttctgatccttaacctgatgccgaagaagattgaaactgaaaatcagtttctgcgcctgctttcaaactcacctttgcaggtcgatattcagctgttgcgcatcgattcccgtgaatcgcgcaacacacccgcagagcatctgaacaacttctactgtaactttgaagatattcaggaacagaactttgacggtctgattgtaaccggtgcgccgctgggcctggtggagtttaatgatgtcgcttactggccgcagatcaaacaggtgctggagtggtcgaaagatcacgtcacctcgacgctgtttgtctgctgggcggtacaggccgcgctcaatatcctctacggcattcctaagcaaactcgcaccgacaaactctctggcgtttacgagcatcatattctccatcctcatgcgcttctgacgcgtggctttgatgattcattcctggcaccgcattcgcgctatgctgactttccggcagcgttgattcgtgattacaccgatctggaaattctggcagagacggaagaaggggatgcatatctgtttgccagtaaagataagcgcattgcctttgtgacgggccatcccgaatatgatgcgcaaacgctggcgcaggaatatttccgcgatgtggaagccggactagacccggatgtaccgtataactatttcccgcacaacgatccgcaaaacaaaccgcgagcgagctggcgtagtcacggtaatttgctgtttaccaactggctcaactattacgtctaccagatcacgccatacgatctacggcacatgaatccaacgctggattaatcttctgtgatagtcgatcgttaagcgattcagcaccttacctcaggcaccttcgggtgccttttttatttccgaaacgcacctcagcaagtgaataaattttattcatattgttatcaataagttatcaagtatttttaattaaaatggaaattgtttttgattttgatttttaaatgagtagtcttagttgtgctgaacgaaaagcgcacaacgatccttcgttcacagtggggaagttttcggatccatgacgaggagctgcacgatgactgaacaggcaacaacaaccgatgaactggctttcacaaggccgtatggcgagcaggagaagcaaattcttactgccgaagcggtagaatttctgactgagctggtgacgcattttacgccacaacgcaataaacttctggcagcgcgcattcagcagcagcaagatattgataacggaacgttgcctgattttatttcggaaacagcttccattcgtgatacagactggaaaattcgtggtattcctgcggacttacaagatcgtcgagtcgagataactggcccggttgagcgcaagatggtgatcaacgcactgaacgccaatgtgaaagtctttatggccgatttcgaagattcactggccccggactggaacaaagtgatcgacgggcaaattaacctgcgtgatgcagttaacggcaccatcagctataccaatgaagcaggcaaaatttatcagctcaagcccaatccagcggttttgatttgtcgggtacgcggtctgcacttgccggaaaaacatgtcacctggcgtggtgaggcaatccccggcagcctgtttgattttgcgctctatttcttccacaactatcaggcactgttggcaaagggcagtggtccctatttctatctgccgaaaacccagtcctggcaggaagcggcctggtggagcgaagtcttcagctatgcagaagatcgctttaatctgccgcgcggcaccatcaaggcgacgttgctgattgaaacgctgcccgccgtgttccagatggatgaaatccttcacgcgctgcgtgaccatattgttggtctgaactgcggtcgttgggattacatcttcagctatatcaaaacgttgaaaaactatcccgatcgcgtcctgccagacagacaggcagtgacgatggataaaccattcctgaatgcttactcacgcctgttgattaaaacctgccataaacgcggtgcttttgcgatgggcggcatggcggcgtttattccgagcaaagatgaagagcacaataaccaggtgctcaacaaagtaaaagcggataaatcgctggaagccaataacggtcacgatggcacatggatcgctcacccaggccttgcggacacggcaatggcggtattcaacgacattctcggctcccgtaaaaatcagcttgaagtgatgcgcgaacaagacgcgccgattactgccgatcagctgctggcaccttgtgatggtgaacgcaccgaagaaggtatgcgcgccaacattcgcgtggctgtgcagtacatcgaagcgtggatctctggcaacggctgtgtgccgatttatggcctgatggaagatgcggcgacggctgaaatttcccgtacctcgatctggcagtggatccatcatcaaaaaacgttgagcaatggcaaaccggtgaccaaagccttgttccgccagatgctgggcgaagagatgaaagtcattgccagcgaactgggcgaagaacgtttctcccaggggcgttttgacgatgccgcacgcttgatggaacagatcaccacttccgatgagttaattgatttcctgaccctgccaggctaccgcctgttagcgtaaaccaccacataactatggagcatctgcacatgaaaacccgtacacaacaaattgaagaattacagaaagagtggactcaaccgcgttgggaaggcattactcgcccatacagtgcggaagatgtggtgaaattacgcggttcagtcaatcctgaatgcacgctggcgcaactgggcgcagcgaaaatgtggcgtctgctgcacggtgagtcgaaaaaaggctacatcaacagcctcggcgcactgactggcggtcaggcgctgcaacaggcgaaagcgggtattgaagcagtctatctgtcgggatggcaggtagcggcggacgctaacctggcggccagcatgtatccggatcagtcgctctatccggcaaactcggtgccagctgtggtggagcggatcaacaacaccttccgtcgtgccgatcagatccaatggtccgcgggcattgagccgggcgatccgcgctatgtcgattacttcctgccgatcgttgccgatgcggaagccggttttggcggtgtcctgaatgcctttgaactgatgaaagcgatgattgaagccggtgcagcggcagttcacttcgaagatcagctggcgtcagtgaagaaatgcggtcacatgggcggcaaagttttagtgccaactcaggaagctattcagaaactggtcgcggcgcgtctggcagctgacgtgacgggcgttccaaccctgctggttgcccgtaccgatgctgatgcggcggatctgatcacctccgattgcgacccgtatgacagcgaatttattaccggcgagcgtaccagtgaaggcttcttccgtactcatgcgggcattgagcaagcgatcagccgtggcctggcgtatgcgccatatgctgacctggtctggtgtgaaacctccacgccggatctggaactggcgcgtcgctttgcacaagctatccacgcgaaatatccgggcaaactgctggcttataactgctcgccgtcgttcaactggcagaaaaacctcgacgacaaaactattgccagcttccagcagcagctgtcggatatgggctacaagttccagttcatcaccctggcaggtatccacagcatgtggttcaacatgtttgacctggcaaacgcctatgcccagggcgagggtatgaagcactacgttgagaaagtgcagcagccggaatttgccgccgcgaaagatggctataccttcgtatctcaccagcaggaagtgggtacaggttacttcgataaagtgacgactattattcagggcggcacgtcttcagtcaccgcgctgaccggctccactgaagaatcgcagttctaagcaacaacaaccgttgctgactgtaggccggataaggcgttcacgccgcatccggcaatcggtgcacgatgcctgatgcgacgcttgcgcgtcttatcatgcctacagccgttgccgaacgtaggccggataaggcatttacgccgcatccggcaatcggtgcacgatgcctgatgcgacgcttgcgcgtcttatcatgcctacaaccgttgccgaacgtaggctggataaggcgtttacgccgcatccggcaattctctgctcctgatgagggcgctaaatgccgcgtggcctggaattattgattgctcaaaccattttgcaaggcttcgatgctcagtatggtcgattcctcgaagtgacctccggtgcgcagcagcgtttcgaacaggccgactggcatgctgtccagcaggcgatgaaaaaccgtatccatctttacgatcatcacgttggtctggtcgtggagcaactgcgctgcattactaacggccaaagtacggacgcggcatttttactacgtgttaaagagcattacacccggctgttgccggattacccgcgcttcgagattgcggagagcttttttaactccgtgtactgtcggttatttgaccaccgctcgcttactcccgagcggctttttatctttagctctcagccagagcgccgctttcgtaccattccccgcccgctggcgaaagactttcaccccgatcacggctgggaatctctactgatgcgcgttatcagcgacctaccgctgcgcctgcgctggcagaataaaagccgtgacatccattacattattcgccatctgacggaaacgctggggacagacaacctcgcggaaagtcatttacaggtggcgaacgaactgttttaccgcaataaagccgcctggctggtaggcaaactgatcacaccttccggcacattgccatttttgctgccgatccaccagacggacgacggcgagttatttattgatacctgcctgacgacgaccgccgaagcgagcattgtttttggctttgcgcgttcttattttatggtttatgcgccgctgcccgcagcgctggtcgagtggctacgggaaattctgccaggtaaaaccaccgctgaattgtatatggctatcggctgccagaagcacgccaaaaccgaaagctaccgcgaatatctcgtttatctacagggctgtaatgagcagttcattgaagcgccgggtattcgtggaatggtgatgttggtgtttacgctgccgggctttgatcgggtattcaaagtcatcaaagacaggttcgcgccgcagaaagagatgtctgccgctcacgttcgtgcctgctatcaactggtgaaagagcacgatcgcgtgggccgaatggcggacacccaggagtttgaaaactttgtgctggagaagcggcatatttccccggcattaatggaattactgcttcaggaagcagcggaaaaaatcaccgatctcggcgaacaaattgtgattcgccatctttatattgagcggcggatggtgccgctcaatatctggctggaacaagtggaaggtcagcagttgcgcgacgccattgaagaatacggtaacgctattcgccagcttgccgctgctaacatttttcctggcgacatgctgtttaaaaacttcggtgtcacccgtcacgggcgtgtggttttttatgattacgatgaaatttgctacatgacggaagtgaatttccgcgacatcccgccgccgcgctatccggaagacgaacttgccagcgaaccgtggtacagcgtctcgccgggcgatgttttcccggaagagtttcgccactggctatgcgccgacccgcgtattggtccgctgtttgaagagatgcacgccgacctgttccgcgctgattactggcgcgcactacaaaaccgcatacgtgaagggcatgtggaagatgtttatgcgtatcggcgcaggcaaagatttagcgtacggtatggggagatgcttttttgagtaaagcttccatataatttttctccgcaatgtatcgagggttatccgtaaagccaaagctttcagccatcttatttaatgtattaaggattaattcagcaataacccggtgacccaattcaaaagccaactcaaaggcagagtatttttgtggggctttgtgttgccaaaaatccataatatcttcagcggtaaatccaaacaggcgtgcatggttagataaagcaagataaaccgtctctacaacattttgttgtttatgctgtatcgctgaaaacaaaccgggatattcattagaattatttgccaggaggaggggcttcatattttttttatcgaatttaaacgtattaaacagagtgggtaatgcgttaaaaatagtattaataacgttcatatgtccactattataggcagtcaacatttctgttctatgtagttctggcattttctggagctgaatcatcagttgcgtaagttggtgattctgaccaattgccattagcaaattcatcgttgctggtgataatggaggggttatttcatccacagatccttttaacatcaatagctgttctttcggaagtgctggaattattgcaacagattggttaataatatgatcatttgaccatttcaggaggctataatctacattcataaaatccatcagagaatagtgtttaatattctctttgctttcgctcataattcttattttatcgttagttacattaggatcataaaccgaaaccacgtaatgggtacatccttcagttgtgttctttattcttagccggaccgtcaaagcatggttatccaccagtaatatggctgccataacactgatgccatttgattccatcttgtcaaaatatgctttcataactagcccgaaatcaccgcaggcagcaacgcaacgcccctcaggacggctggaaaccaacgccaaagtctggtttttgcattttttgttgaagtgcgtgagaaatttttcagctgaagagtaatcatcttgatggggtttgtaatcaacattctgataaatatcattaatatattgtgcagcaatgtgtcggcatactatacggttttggggtcgccccggaaaataacattgaccattaagtttaattcttgggaattctttttcttttctatctgattttaggtttaattcttgtttatcaagagtgtctgagcgttgaggtaaaatttccattaggtatttttcaaatattggggcaatggtttgagtaagtgtcgtgttttcgtttttattaattatcgtaatttctttcttatcagcttgtaagacggacgtggaaaatttaatgacaaaatccttgttgctaaagatatgacgaccattttgtctacagttctctgagaagctttttaatagaggcgtcgccagctccttgccagaaaatttatcctcgagttctttataaaacaattcactcagggtttggtgttcatttgtctgagctgtattattaatatttgcagagaaagaactacgagggatacgagtaatcatttaaatatctcattgtttattgatgtcttgaattttaactatcagaacagtgaaaaaatttaatatgattacaactaaagaaatatcataaatcgctcaatctcataatgcagccgtaaaagtttcggtggaatgagatcttgcgattttgttaataattaagtggtttgatgtttaaaaataatgccgagttaataaaagtgtgtgaagtgtatgacattaagttattttggcgtcaatgcgattaacagacacccttattctattgccactcaggtatgatgggcagaatattgcctctgcccgccagaaaaaagtcagcgcattccaccgtacgccagcgtcacttccttcgccgctttaatcaccatcgcgccaaactcggtcacgcggtcatcggtaatacgtgaaatcggtccggaaatagaaattgcggcaaacggttcacggtgctcatcgaaaatacacgctgcaaggcaacgtagccccagtgcatgttcctcatcgtcaaatgaataaccccgtttgcgcgtttgggcgagatcttcttttaaatgcacaggagacaccagcgttgcgtgggtataggcatgtaaccctttgcggtgcagcagcttcgtcacctgttcttcgctcagttgggctaaaaaggctttacccgcaccggaagcgtgcatcggcaatttaccgccgataggcgcggacattcgcatcagatgcgtacactgtacctggtcgataataatcgcttcgtgatcgctttgatcaagcaccgccatattgaccgtttcgccagactcttccattaaattgcgcaggatagggtgaacaattgctaacaaattacggctctggagaaagctgctgccgaccataaaggcatgtgcaccgattgcccagtgtcccagttcgccaacctgacgcacgaaaccctgctgttgcatcgtggttagcaggcggtgggtcgtggaattgggtaacccggcttgttgcgccagctctgtgagtgccacactgccattggattcggcaatccactccagtaatttcaggccacgcgttaaagactgaacctgtccagtcgctggtgcggtggcaacggcgggttttctgccgcgtttcgcgggaatgggtgcgaccatgacagcctcctttttctgtatcgtggaaatcattttcatttttattgttagctaatgcaatagttgctgaactgatccgatgagttaatgttgaacaaatctcatgttgcgtggtggtcgcttttaccacagatgcgtttatgccagtatggtttgttgaatttttattaaatctgggttgagcgtgtcgggagcaagtgtgagcagcaaagtggaacaactgcgtgcgcagttaaatgaacgtattctggtgctggacggcggtatgggcaccatgatccagagctatcgactgaacgaagccgattttcgtggtgaacgctttgccgactggccatgcgacctcaaaggcaacaacgacctgctggtactcagtaaaccggaagtgatcgccgctatccacaacgcctactttgaagcgggcgcggatatcatcgaaaccaacaccttcaactccacgaccattgcgatggcggattaccagatggaatccctgtcggcggaaatcaactttgcggcggcgaaactggcgcgcgcctgtgctgatgagtggaccgcgcgcacgccggagaaaccgcgctacgttgccggtgttctcggcccgaccaaccgcacggcgtctatttctccggacgtcaacgatccggcatttcgtaatatcacttttgacgggctggtggcggcttatcgagagtccaccaaagcgctggtggaaggtggtgcggatctgatcctgattgaaaccgttttcgacacccttaacgccaaagcggcggtatttgcggtgaaaacggagtttgaagcgctgggcgttgagctgccgattatgatctccggcaccatcaccgacgcctccggacgtacactctccgggcaaaccaccgaagcattttacaactcattgcgccacgccgaagcgctgacctttggcctgaactgtgcgctggggcccgatgaactgcgccagtacgtgcaggagctgtcacggattgcggaatgctacgtcaccgcgcacccgaacgccggtctgcccaacgcctttggtgaatacgatctcgaccccgacacgatggcaaagcacatccgcgaatgggcggaagcgggctttctcaatatcgtcggcggctgctgtggcaccacgccacatcatattgcagcgatgagtcgtgcagtagaaggattagcgccgcgcaaactgccggaaattcccgtagcctgccgtttgtccggcctggagccgctgaacattggcgaagatagcctgtttgtgaacgtgggtgaacgcaccaacgtcaccggttccgctaagttcaagcgcctgatcaaagaagagaaatacagcgaggcactggatgtggcgcgtcagcaggtggaaaacggcgcgcagattatcgatatcaatatggatgaagggatgctcgacgccgaagcggcgatggtgcgttttctcaatctgattgccggtgaaccggatatcgctcgcgtgccgattatgatcgactcctcaaaatgggacgtcattgaaaaaggtctgaagtgtatccagggcaaaggcattgttaactctatctcgatgaaagagggcgtcgacgcctttatccatcacgcgaaattgttgcgtcgctacggtgcggcagtggtggtaatggcctttgacgaacagggacaggccgatactcgcgcacggaaaatcgagatttgtcgtcgggcgtacaaaatcctcaccgaagaggttggcttcccgccagaagatatcatcttcgacccgaacatcttcgcggtcgcaactggcattgaagagcacaacaactacgcgcaggactttatcggcgcgtgtgaagacatcaaacgcgaactgccgcacgcgctgatttccggcggcgtatctaacgtttctttctcattccgtggcaacgatccggtgcgcgaagccattcacgcggtgttcctctactacgctattcgcaatggcatggatatggggatcgtcaacgccgggcaactggctatttacgacgacctgcccgctgaactgcgcgacgcggtggaagatgtgattcttaatcgtcgcgatgatggcactgagcgtttactggagcttgccgagaaatatcgcggcagcaaaaccgacgacaccgctaacgcccagcaggcggagtggcgctcgtgggaagtgaataaacgtctggaatactcgctggtcaaaggcattactgagtttatcgagcaggataccgaagaagcccgccagcaggctacgcgcccgattgaagtgattgaaggcccgttgatggacggcatgaacgtggtcggcgatctgtttggcgaagggaaaatgttcctgccacaggtggtcaaatcggcgcgtgtgatgaagcaggcggtggcctacctcgaaccgtttattgaagccagcaaagagcagggcaaaaccaacggcaagatggtgatcgccaccgtgaagggcgacgtccacgacatcgggaaaaatatcgttggtgtggtgctgcaatgtaacaactacgaaattgtcgatctcggcgttatggtgcctgcggaaaaaattctccgtaccgctaaagaagtgaatgctgatctgattggactttcggggcttatcacgccgtcgctggacgagatggttaacgtggcgaaagagatggagcgtcagggcttcaccattccgttactgatcggtggcgcgacgacctcaaaagcgcacacggcggtgaaaattgagcagaactacagcggcccgacggtgtatgtgcagaatgcctcgcgcaccgttggtgtggtggcggcgctgctttccgatactcagcgcgatgattttgtcgctcgtacccgcaaggagtacgaaaccgtacgtattcagcacgggcgcaagaaaccgcgcacaccaccggtcacgctggaagcggcgcgcgataacgacttcgcttttgactggcaggcttacacgccgccggtggcgcaccgtctcggcgtgcaggaagttgaagccagcatcgaaactctgcgtaattacatcgactggacaccgttctttatgacctggtcgctggccgggaagtatccgcgcattctggaagatgaagtggtgggcgttgaggcgcagcggctgtttaaagacgccaacgacatgctggataaattaagcgccgagaaaacgctgaatccgcgtggcgtggtgggcctgttcccggcaaaccgtgtgggcgatgacattgaaatctaccgtgacgaaacgcgcacccatgtgatcaacgtcagccaccatctgcgtcaacagaccgaaaaaacgggattcgctaactactgtctcgctgacttcgttgcgccgaagctttctggtaaagcagattacatcggcgcatttgccgtgactggcgggctggaagaggacgcactggctgatgcctttgaagcgcagcacgatgattacaacaaaatcatggtgaaagcgcttgccgaccgtttagccgaagcctttgcggagtatctccatgagcgtgtgcgtaaagtctactggggctatgcgccgaacgagaacctcagcaacgaagaactgatccgcgaaaactaccagggcatccgtccggcaccgggctacccggcctgcccggaacatacggaaaaagccaccatctgggagctgctggaagtggaaaaacacactggcatgaaactcacagaatcttttgccatgtggcctggtgcatcggtttctggttggtacttcagccacccggacagcaagtattatgcggtagcgcaaattcagcgcgaccaggttgaagactatgcccgccgtaaaggtatgagcgtctcagatgttgagcgctggctggcaccgaatctggggtatgacgcggactgattcacaaatctgtcacttttccttacaacaaacagggcgctcaatgagtgccctgtctctttattaatatgaaacacttatactggaaacaggctggaataatcttagccggaaaaacgaatgtcaaaaggcacagtaaagatgccagtcagcgtgtttccggtcctttggtcattcaattgcttcaggaacatataacgataaggagaacctgaactcgtgttaacgctgcttcacctgctttctgccgtcgccctgctggtctgggggactcatattgttcgaacaggcgtaatgcgcgtcttcggcgcgcgtctgcgtactgtccttagccggagcgtcgaaaaaaagccgctcgccttttgcgcggggatcggcgttaccgcactggtacagagcagtaatgccaccaccatgctggtgacctcgtttgtcgctcaggatctggtagccctcgcaccggctctggtcattgtgctgggtgcagatgtcgggacggcgctaatggcgcgtattctcaccttcgacttatcctggctgtcaccgttacttatttttatcggcgtgatttttttcctcggacgcaaacagtcacgcgccgggcaactgggccgcgtcggtattggtcttgggctgattttactggcgctggagttgattgtgcaggccgtaacgccgatcacccaggcaaacggcgttcaggtgatctttgcctcgctgaccggcgatattctgctggatgcactgattggcgcgatgttcgccattatcagctactccagccttgctgctgtactgctgactgcgactctgaccgccgcaggcattatctccttccccgtggcgctctgtctggtgattggtgctaacctcggttccggcctgctggcgatgctcaacaacagtgccgccaatgccgcagcccgccgtgtcgcgctgggtagtctgctgtttaagctggtgggtagcctgattatcctgccgtttgtccatttgctggcagagacaatggggaagttgccactgccaaaagcggaactggtgatctatttccacgtcttctacaaccttgtacgctgcctggtcatgctgccatttgttgacccgatggcacggttttgcaaaacgattattcgcgatgaaccggaactggatacccagctacggcccaaacatctggatgtcagcgcgctggatacgcccacgcttgctctggcgaacgccgcgcgcgaaaccctgcgcattggcgacgccatggaacagatgatggaagggctgaataaagtgatgcacggcgagccacggcaggagaaagagctgcgtaagctggcagatgatatcaacgttctctacaccgccattaagctgtatctggcgcggatgccaaaagaagagctggcggaggaagagtcgcgccgctgggcggagatcatcgaaatgtcgctcaaccttgaacaggcctccgatatcgtcgagcgcatggggagtgaaattgccgacaaatcactggcagcacggcgggcattttcgcttgatgggttgaaggaactggatgcactctatgagcaattgctcagtaatttaaaactggcaatgtcggttttcttctctggcgatgttaccagcgcccgtcgtttgcgccgcagcaaacatcgttttcgcattcttaatcgccgctattcccacgcccacgtcgatcgcctgcatcagcaaaacgtgcagagtattgaaaccagttcgctacatttaggcttactgggagatatgcagcgactgaactcgctgttttgttcggtggcttacagtgtgctggaacagccggatgaagatgaaggacgggacgagtattaataccgtgaccctgtaggcctgataagacgcgtcaagcgtcgcatcaggcactatgaacaagatgccggatcatgcatccggcaattcacttaaaaacggtgacccgcttccagcggaaccgcttcttcaccagccttaaacacataagtggtgttcgggccacccagcgtagcgtgacctttactcactgtgatccagttaccttccggtagaccaataatcgtcagttctggcgcgacgaccagcagttcgcgaatacgctgttcacgggtttcacctttatggccttccggcaacgcgttggtgaagtgcgggttgatttgcaacgggaacagattcagcgcatcgaaaccttgcggatcgacaatcggcatatcgttggtggtacgaatggttgggcaagcaaggttagcgcctgcgctccagccaatatacagcgcgccacgtttaaccacgtcagtaattggagccagcagcccgcgctcgcggcactgtttcagcaactggaaagtattcccgccgccgacaatcacaatttcagcattttcaatcgcggcaacgggatcgacaacgctatgaataccggtgacagaaacacccagcggagcaagaaccgcagccgttttctctgtgtaatcatcccaggtctgcgttacgccagcgaaagggataaacaccgctgagcggcgaccctgcaactgttcagcaattagcggcagtgcatgttccagccaggctttacccggcagcgtcgagttactcaataaaagcagttccattacttctccggttagtaagaaatcacggaaggcatgctaccactgcgaatttaaccacttactgacatggctcacgatgtcatgtattgcaccgggcgctgagactgatgacaaacacagcattgcctgatgcgctacgcttaccaggcctaccagataactgcaatatattgaattttcgagattatgtaggccgaataaggctttattccgcatccggcataaacaatgtgtactttgccaccaatttgagcgccccttaaggcgctgatgtttttttatccttctcgtgcacattgggccgcttcagcaatcagccgcacatcaggttgcgaagttgccgcggcgaccagccagcgacatgcagagttaagtagcgcgattaatcatgggaaattgcctctgcatgagtgagcagatattgctccgcctcaccggaccagatcccctgatgacgcgccagaatcgccgccagtgcttgatcctgaatctgcgtgagtgacgtcagcggcaggtatttcccggtatacaccagctttttgccgccgccgacggcaggcaattcaagcgtggtttcgcccgcggcattcagcccaagaatatgtgttaccacttttgcggcctgcacttttttctcttcaatcagtttgaccgctgcgcgcatgtcgtcggtattgccgcctgacgtacccacgtagtgggtaaatgcataatgcacatcgtagaaattaattggcgcgctgaaatgtttatcctgcggtccggcgaagaaattcaggcaaccatctgtcgccagcaaggaagaggcgagagtcaccagtccttcattaggcacaaagacgaaaatatcatcgaagccgtgaccgccactcagcgccattaacgtatcaaatgctgcatcggtggcattgagataatgaatcagtgtttgcggttctgatggatagtgcttgcgcgcataactcaatttatcgttgtcggtatcggtaatgacgagcagcgacgggttaacgggtccatgtagcgcataatcaatcgccaacagtcccattggtccggtgccgccgaggatcagcatgcgcccttgcgggcgaatccccatcgtgtggttataactaccttcctgaagatgatagttggcgttgaacgcgccaatcacgcaggaaagcggttcaaccagcgagccttcaaaataggtttcgccgtcgtatgccagcaggcaatcttgttccatgacctcgttgggaataaccacatgcgtggcttcgccgcccacccacgggaaggagtagccggggcagtccgggcggtcggggagttgcaggttggcctgaatcacataacgctgacccggctggaatttgtgctgccactttttacccacggccagaatatcgccgcaaaactcgtggccgatgatgatggggttggtcgccacatcgtcgggtacttttttatggttttcacccaggttggcctctttccaggaagagaggcacaggctgtcagtgaccaccgtcgcgaggatttcatcctcctgcatttcaggaaggtcaaaggtttccaggcgtaaatcacgtttaccataaagacgcagagctgttgttttcataaaccacctcatgttgagcgatggccccggcagtcgtgccggggcgaagaatcaagacaggaagcccagcgcattgccgataatccctaagccaaacagggcgaaaatcagccataccgggttaatttttttgttgagcagacgaaccatcagtagcgtcagaccgagcgccagcaaaccagggcaaagttggtcgagaatgttctgcacggtcatggtgacggtggagccatcggcggcatgcgtttgtgaaaccaccaacggtacgttgattgacgtccatttggtgaccagcacgcccatcacaaacagtccgagaatcgacgcgccttcggtgagtttttgcagcacattcccgcccatatcgctgacgatattcacccctttgcgaaagccgagctgtaggccataccacttcatcgccagacgcaccgcgttgaaaataaagaagaacagcagcgggccgagaatgttgcccgaaagtgccagagatgcgccgagcgcagcggtaatcgggcgcagcgttccccaaaccagtggatcgccaactcctgccaatggtcccatcagaccgactttgatgccgttaatggtaccgtcatcaatttccgcgccgttggcccgcgcctcttccatggcggcagtgacgccgatgaccgggccacatacggctggcgtggtattgaagaacaccaggtgtcgcctgagcgccgcaacctgatcctcttttaatgggtaaagtcgcttgatggcggggatcatgtcgtagcaaaagcccagcccgtgaatacgttcaaagttaaaggacgcctgttgcaggttggagcgcagaaacatgctcaccagatcgctgcgtgtaatttttctctgttccatgatggctccgttaatcgtcaagttggtcaagggcggtggaagcgggggcctggagctgaggttcagctttacgccactgtggatttagctggatgtagaccagggccatgatcacgccgacgccaccgaacgccagcagactgagatcgaggtagccacctgcgaggaaaccgaggaaaaagaaaggcatcaaatatttcacgcccatcatacgtagcaccatggcgtaaccgaccaccacgataaaaccgccagcaatttgcagacctcgggtcacaaattcgggaatggcgtttaacatattgctgaccatatcggcgctgacgaacagcgagacaatcagtgccggaatggcgacgcgcagcgcctgcacgccaagcgcggagacatgcagaatatcgagagtgcgaaaccgcgcctcttccgctgctttatccgccgcgtgctggaacactacggtgatggtacgggcaaacaccgtcagcacctggcctgccgcagccacaggcaacgcgatggcgattccggtggcgatgctttgctgaccaacgataaccagaatggcggagattatgctggcgagtgcagaatccggagattgcgccgcgccgacgttcatccagccgagagctatcaattccagcgtaccaccgagtattattccggtttttaaatcaccgagaattaaaccaatcaccgtacaggcaattaacgggcgatgagtctgaaattcatccagcacgctgcccattccggcaatacaggaaaaaagaaatatagcaataatttgtagggtacttatttccatgatttgtcaccttttaagtgtcgtcatccctgcctgttaaagcatatgtacacaggcgctattatttaatttgcgattaactgttcgtttattttgtcgataatattgattgagggatctgacgctacgacgcgtaaatccagtatgacgccaagattatttaactcatgaaatgcgttaatatcatcatcatctaatgaaaccgctttggttaactgttttttaccgggccgccaggccatgccgccaatattcagggtgcctatttttaccccctggcgaaccatcgctaaggcatcctgtgggcgagtgaaaagataaaaaacggtttcgtcctgatattgcgggttgtgataaaccgcgacggctttttcaatattgaccacgttaaccttcattcccggtggcgcagcctgacgcaataatgtccggcgaacttcatcgttataaacttcgtcattgcagataataatgcgctgggcgttagccactttcgaccagacggtagtgacctgaccgtggatcaggcggtcatcaatgcgggcgagcgtaatgttcatcagaaatcctcctctgtcgttgccagttgtttccagacaacgcaggtttgctttgcgatttgcgtcaggtgttcacacagttcatcaacattcatgctgtcctggttatcaaccagttcgagcgccagcggcagagaaaggccgctgattacccgcagacgaggattgcgcatcgcaagcatcgctgccgcattccacgggctgccgcactgtaaatccacggcaatcagccactcatcttgattgtgaatgcttactaacttttccagctttgctacgatgtctccggcgttttcaccgggcacaaattcaacggcttcaacattggcgttgccgtaaaccatctgaaccgattccagcatggcgcaagctaatttgccgtgggcacaaaaaatggcgttgaccataaagcctccttagccgcgcgttttgccgcccgcaatgttagtggttactccggtgatgtagctggcgcgttgagacagcagataacaaacaaaatcagcgacttctgctaatcttccggcgcgcccaataggaatggcgtttttggtatagccttcacgcagctgctcgacggtgatattgcgcgtccacgccagcgcttcttcatattccggcgtgcgcagtcctgttttttccagaatccccggcgcgataccgaccacacggataccgtgtttacccaattctttcgaccaggagcgcgtgaagctattgagcgcggctttggtagcggcgtaacagctttggccttctgagccttccagtccactttctgaggaaacattcacaatcacgccatcatgttgtttgaccatctgtcgcgccaccgcctgcgacatcagaaaaacgcctttctggttgatattgaccattttttcgaatgcagcttcgttgagttcatactgcccggcaggcgctttctcatcgaccagcagacgcgggaaattgaccccggcgttgttaaccagaccgtcgatgcgaccaaaacgctggataatttccgctaccgtatgatttacctctttggcgctggaaatatcggtcggccaaaactgatagcctttatgaccttcatattgaccatcgccaccgagaatatctaccatctgtacgtttgcgccttgtgctaataattcctctacaatcgccaaaccaataccggatgcgccgccggtgacgataatgattttatcctgcaaatttaaccacgtttgcataacagactcctgattttagataatagggacccgccgtaatttttattacggtaaacatcgggaagatttttatttcagtaatagttcagctgtgctgctattcgttaccagacaattaatatattttccacgcagtgcaccaataattccgctgtatttttcttcactcatggcaatgccaatggaatatcgtgcctgctttaatttattcatttcgatagagagtgttttttcgctcatattcgtttcaaccattgcgccgtgaatatcaaaaaagcgcgagcaaatatcgccagcaacctggcgggcattcaggtcgtcactctcttcaccaccataaaacgcatgccagttagcgccgtcgcgaatggccggtgagccaattcccaccagggcgacatccagattatcccagtaggcagagatggttttaaagtgctgagactgcatgatcccattacgaattaaggggttatccagcagagccggaaaatccgcgagatgcgattcccctttcagcttcgctgccgcgctgtaggttaatgtgtttacgtgatagcggctttcgagtttaccggacggtccgccaataattggcacgcagattaactgccgcgattgccccgcttgcggcaagttttcaaccagtgcgctcaccgcgcgaccccaggaaaaaccgacaatatcgccaggctccagcaagcgatccagcagttgtgcgccatgtaaccccatcatcgccagttgagtctcttcatcctcatcatttcccgacaccaccacaacgtctttcaggccaaacttttgcttcagttgctgctcgagccagagattttcgttgtagtcatagttgatggcgatggtgacaattccctgatcgcggcctcgtttaagcaagcggctgatggtggtgcggtaaatacccagttcgcgcgcgatttgcgcctgcgtcatatcctgttcgtaatagagttgggcaatcttcacaatcaaacggatatcgtcactgttttccattgccgcctcctggttctgcacatttgtgcaaatacgctttctcaccgcttgatctgatataaccccatcatgagggcctttcaaagcgatttttcactctttgcatggggagaaatagcgctttctcttgcacatttgtttctctgcgcagtagtcatcagcacaggtgtgcagcgattcgtaatatgttgattatccttattttgccaggcaaatttgcattgtacttccggagacacttttgtgataaaaggcgtggcagatcacatttaatttcgacgttgccgcataaccctgtttttccccgctaagaggtacggtatattccgcgttttacaggagaatttatgctgcccgactcatcagtccgtttaaataaatacatcagcgaaagcggaatttgctcacgccgcgaagcggatcgctatatcgagcaaggcaatgtgttccttaatggcaagcgagccaccattggcgatcaggtgaaacccggcgacgttgtgaaagtaaacggtcagttgattgagcctcgggaagccgaagatttggtacttatcgccctgaacaagcccgtcggtattgtcagcaccaccgaagatggcgagcgcgataacattgtcgatttcgttaaccacagcaaacgcgtgttcccgattggtcgtctggataaagattcccaggggctgattttcctcaccaaccacggcgatctggtgaataaaatcctccgcgcgggtaatgaccatgagaaagagtatctggtgacggtcgataaaccgattaccgatgaatttattcgtggtatgggggcgggggtgccaatcctcgggacagtgactaaaaagtgcaaagtcaaaaaagaagcgccatttgtcttccgcattaccctggtgcaggggctgaaccgtcagatccggcgcatgtgcgagcatttcggctatgaagtgaaaaagctggaacgtacgcgcattatgaacgtcagcttaagcggcattccgctgggggagtggcgcgatttaaccgacgatgagttaatcgacctctttaagctcatcgaaaattcctcttccgaggcaaaacctaaagcgaaggccaaaccgaaaacagcgggcatcaaacgtccagtcgttaagatggaaaaaaacggcggaaaaaggcggtcgcccggcgtccaacggtaagcgttttacctcgccggggcgaaaaaagaaggggcgctgattaacgcctcagactgatgaaaacgtccaaaaagtgctcggacagtcccctcgccccttcggggagagggttagggtgaggggaagattgtgtccacacagacgagtgaaaatctcaggcgttgattgttcattagcgcctgccgcgcgtcgacgtatttgctgaccagctaaatgacgcttcaggatctggtttataagcctgctttttcttcaattggcgggcttttttcgcttcagcctcacgctcgaccattaatttatcgatgtactctttcttaatgctgttagtttcggagttggtcagtacgcgaccatgcgcaatccgcgcccgatccagcagtgttttaagttcacgctgctcgcgttcagtcatctctttttgggtaatacgggggagtgccatgatggtgccctcagtgagccagagagttcagtgtacgggaattcgtttgcgagcagaactgataatattcattttgccttctcttaactatttatctctttcgataattaattagagatacagataaaaaaattaaaggcaattattctccgataaagacgctggttaacagagtacaggctcgtttattgataagcatagtgacaagaaaatcaatacggcccgaaatatagcttccaggccatacagtatttactcaaacaaattaaaatgcagcttctgcaccacctgctcggcatcttcgccgggcaccaggaagcacaggttatggctggatgcgccgtaacaaatcatgcgaatgttgaacggttccagtacgccgaatacctctttgccaacgccgcaggcttttgacaggtcattgccaatcaacgcgaccagcgccagaccttcttccacctccacccggcacagtgcggaaagctccatcagcagagattgcgtcagcaacgtatcgccagtggaggttgaaccggtggtatcaagggttaatgccacgctcacttctgatgtggtgattaagtctaccgaaatattatgccgcgcgaggatgccgaaaacttccgcgaggaaaccgcgagaatgcagcatattcaggctgtgcaaagtgagcagagtctgattgcgacgaagcgccagcgcgcggaacagcggcggattttcagttttattgcacaccagcgtaccacctgcgcgtgggtctttgctggagccgacaaagaccgggatatcgctgcgtactgcgggtagcaacgttgccggatgcagtacttttgcaccaaaagttgccatctctgccgcttcggcaaacgcgatttcatcaatgcgttttgctgcggaaaccacgcgtggatcggtggtgtagatgcccgggacgtcggtccagatatcaacacgagatgcgtgtaaagcctccgccagcaaggctgccgtataatcgctgcctccacggccaagcgtcgttgtacgacctttattttcgctaccgataaatccctgggtgatcactaagccttcattgagacgtggaagcagctgcagcgcggccagttccgccagcgcggctacatctggctctgcacgaccaaatcggtcgttggtacgcatcactttacgtacatcaaaccactgtgcctgaacatcgcgttcgcgcaggatctcaacaaacagcagggtcgacatcagctcgccgtggctgaccagctcatctgtcagcgccggagacgttgccagcgccgccgcttctgccagaacagtaatgttctccagcagacgttcaatctcttcacggataacgttcgggtaacgcagacgttccagaatggcaaactggatgttgcgaatagcgtcgagtttttcgaatcgctcgccaggttccagcccttccgctaaagcgaccagcagattagtgataccagcagaagccgagaggactactaaacgcacgttggcatcagaaagcacaatatcagcgctgcggttcatggcgtcaaaatcagctacgctggtaccgccaaatttggagacaacaatttcagacataactacctcgtgtcaggggatccattttcagccttggcacaagggaagagcggaagacgggtgggcgcagagcgatacttcgctactattttcacccagaagtgctccaccacttgcgaaacgcccgactgcgaacgcttctggtgacaaccctggggattcagcccctgtagccgatgatgaacgtggccagccgttcaatcacctcggcgatgcaccccctcaggtgttatcacaggactggctcctccaacaccgttacttgggcaacgcgcctcttctggcctgcgctagcgcaggtagtacatttataaataaagggtgagcggggcggttgtcaacgacggggtcatgcggatttttcatccactcctggcggtcagtagttcagctaataaatgcttcactgcgctaagggtttacactcaacattacgctaacggcactaaaaccatcacatttttctgtgactggcgctacaatcttccaaagtcacaattctcaaaatcagaagagtattgctaatgaaaaacatcaatccaacgcagaccgctgcctggcaggcactacagaaacacttcgatgaaatgaaagacgttacgatcgccgatctttttgctaaagacggcgatcgtttttctaagttctccgcaacattcgacgatcagatgctggtggattactccaaaaaccgcattactgaagagacgctggcgaaattacaggatctggcgaaagagtgcgatctggcgggcgcgattaagtcgatgttctctggcgagaagatcaaccgcactgaaaaccgcgccgtgctgcacgtagcgctgcgtaaccgtagcaataccccgattctggttgatggcaaagatgttatgccagaagtcaacgcggtgctggagaagatgaaaaccttctcggaagcgattatctccggtgagtggaagggttataccggcaaagcaatcactgacgtagtgaacatcgggatcggcggttctgacctcggcccgtacatggtgaccgaagcactgcgtccgtacaaaaatcacctgaacatgcactttgtttctaacgtcgatgggactcacatcgcggaagtgctgaaaaaagtaaacccggaaaccacgctgttcctggtagcatctaaaaccttcaccactcaggaaaccatgaccaacgcccatagcgcgcgtgactggttcctgaaagcggcaggtgatgaaaaacacgttgcgaaacactttgcggcgctctcaaccaatgccaaagccgttggcgagtttggtattgatactgccaacatgttcgagttctgggactgggtcggcggccgttactctttgtggtcagcgattggcctgtcgattgttctctccatcggctttgataacttcgttgaactgctttctggcgcacacgcgatggacaagcatttctccaccacgcctgccgagaaaaacctgcctgtcctgctggcgctgattggcatctggtacaacaatttctttggtgcggaaactgaagcgattctgccgtatgaccagtatatgcaccgtttcgcggcgtacttccagcagggcaatatggagtccaacggtaagtatgttgaccgtaacggtaacgtggtggattaccagactggcccgattatctggggtgaaccaggtactaacggtcagcacgcgttctatcagctgatccaccagggaaccaaaatggtaccgtgcgatttcatcgctccggctatcacccataacccgctctctgatcatcaccagaaactgctgtctaacttcttcgcccagaccgaagcgctggcgtttggtaaatcccgcgaagtggttgagcaggaatatcgtgatcagggtaaagatccggcaacgcttgactacgtggtgccgttcaaagtattcgaaggtaaccgcccgaccaactccatcctgctgcgtgaaatcactccgttcagcctgggtgcgttgattgcgctgtatgagcacaaaatctttactcagggcgtgatcctgaacatcttcaccttcgaccagtggggcgtggaactgggtaaacagctggcgaaccgtattctgccagagctgaaagatgataaagaaatcagcagccacgatagctcgaccaatggtctgattaaccgctataaagcgtggcgcggttaatcatcgtcgatatgtaggccggataaggcgttcacgccgcatccggcaaccgatgcctgatgcgacgcggtcgcgtcttatcaggcctacaggtcgatgccgatatgtacatcgtattcggcaattaatacatagcacgattgattaaataaccttaataacaatgccgacgttatgtcggcatttttttatcagataaatccccttgtctgtgatttaacggaaatcataccatgaggttaatcctaaaatagatttttaatcgttgtttatttcggaaaatacgcagattaattgcttttgtttttattttaagtttatgatttttattgttatttaaatataagttgaaacttatatttgatattcattccaattatcctaaaacgccatcgctaattccccgcgccgtaattcgcatgctttagttgtgtatactcgatcccgcccgaaatgtttttgggtaaatctccattcattcaatgaagggaaattgttatgaaaaaagttctgtatggcatttttgccatatctgcgcttgcggcgacttctgcgtgggctgcacctgtacaggtgggcgaagcggcagggtcggcagcaacgtcggtttcggcggggagttcctccgcgaccagcgtcagcaccgtaagctcggcggtgggtgtcgcgcttgcggcaaccggtggcggtgatggttctaataccgggaccaccacaaccacgaccaccagtacccagtaataaagtatgtatccccaaaataattcgagtcattgcatctgtggctagaagtatgaagggattaaccataaccacactccggtgtggttattctgcccctctggagaagagtcgtgaagcgacctgcactcattcttatctgcctgttattacaggcctgttcagccacgactaaagagctgggcaattcactgtgggacagtctgttcggcacgccaggcgtacagctgacggatgatgatattcaaaatatgccctacgccagccagtacatgcagcttaatggcgggccgcagttatttgtggtgctggccttcgctgaagacggacaacaaaaatgggtcactcaggatcaggctactctcgttacccaacatggccgtctggtgaagactctgctcggcggcgacaacctgattgaagtgaataaccttgctgccgacccgctgattaaacccgcacaaatcgttgatggcgcaagctggacgcgcacgatgggctggaccgagtaccagcaggtacgctacgccaccgcacgctcagtcttcaaatgggatggcaccgataccgtcaaagtcggcagcgatgaaaccccggttcgcgtgctggacgaagaagtctccaccgaccaggcgcgctggcataaccgctattggatcgacagcgaagggcaaattcgccagtcggaacagtatctcggcgcggattattttccggtgaaaaccactctcatcaaggcggcaaaacaatgattaaacaaactattgtcgcgttgcttttgagtgtgggagcgtcatcggtcttcgcggcaggaaccgtcaaggtgttcagcaatggcagcagtgaggccaaaacgctaacgggcgcagagcatttaatcgatctggtaggccaaccgcggctggcaaacagctggtggcccggtgcggtgattagcgaagagctggcaacggcggcagcattgcgtcagcagcaggcgttgctgacacggctggcagaacagggcgcagattccagcgccgacgatgccgctgcgattaacgccttacgccagcaaattcaggcgttgaaagtgacgggcaggcaaaaaatcaatcttgatcccgatatcgtccgcgttgccgaacgcggtaacccgccgttgcagggcaactacacgctgtgggtcggaccaccgccgtccacggtcacgttgttcgggcttatcagccgtcctggcaagcagccattcactccaggtcgcgacgtggcgagctatctctctgaccagagcctgctcagcggtgcggatcgcagctacgcgtgggtggtttacccggacggacgcacgcaaaaagcgccggtggcttactggaacaagcgtcacgtagagccgatgcccggcagcattatttatgttggcctcgcggactccgtctggagtgagacgcctgatgcccttaacgccgacattcttcagactctgacgcagcggataccccaataatgaaaaaaagacatctgcttagcttactggcgctgggcattagcatggcttgctacggcgaaacatatcctgcgcccattggcccgtcgcagtcggatttcggtggcgtaggattattacaaacgcccaccgcacgcatggcgcgggaaggggagttgagcctgaactatcgcgataacgatcagtaccgttattactcagcttcagtgcaactcttcccgtggctggaaacaacgctgcgctacaccgacgtgcgcacccggcagtacagcagcgtcgaagcgttctctggcgatcaaacgtataaagataaagccttcgatctcaaactgcgtttgtgggaagagagttactggctgccgcaagtggcggttggtgcgcgggatatcggcggtacggggctgtttgatgcggaatatcttgttgccagcaaagcctgggggccgttcgattttacgctcggcctgggctggggatatttgggcaccagcggtaatgtgaaaaatccgctctgttcagccagtgataaatattgctatcgcgataacagctacaaacaggcgggatctatcgacggtagccagatgttccacggtcctgcctcactgtttggcggcgtggaataccagacgccctggcaaccgctgcgcctgaaactggagtatgaaggcaataattatcagcaggattttgccgggaagctggagcaaaaaagtaagtttaacgtcggtgcgatttatcgcgttaccgattgggccgacgttaaccttagctatgaacgtggcaacacctttatgtttggcgttacgttgcgcaccaactttaacgatctgcgcccgtcttacaacgataacgcccgcccgcaatatcaaccgcagccgcaggatgccattttgcagcattcggtggtggcgaatcagttaacgctgttgaaatacaatgctggacttgccgatccacagatccaggcgaaaggcgatacgctgtatgttaccggcgagcaggtgaaatatcgtgattcgcgcgaagggatcatccgtgcgaatcggatcgtgatgaacgatctgccggatgggatcaaaacgatccgcattacggaaaatcgccttaacatgccgcaggcgacgacggaaaccgatgtcgccagcctgaaaaatcatctcgccggagagccgttgggccacgaaacgacgctggcgcaaaaacgcgtcgagccagtggttccgcagtccaccgagcagggctggtatatcgacaaatcacgctttgatttccatatcgatccggtgctgaaccagtcggtcggtggcccggaaaacttttacatgtatcagctgggcgtgatgggaacggcagatttgtggctgacggaccatctgctgaccaccggcagcctgtttgcaaatcttgccaacaactacgacaagtttaactacactaatcctccgcaggactcgcacttaccgcgcgtgcgtacccatgtgcgcgagtatgtgcagaacgatgtctatgtgaataacctgcaagccaactacttccagcatctgggcaacggcttctacggtcaggtctacggtggttatctcgaaaccatgtttggcggtgcgggggcagaagtgttgtatcgcccgctggacagcaactgggcgtttggtctggatgccaactacgttaaacagcgcgactggcgtagtgcaaaagatatgatgaaattcaccgactacagcgtgaaaaccggacatctgaccgcctactggacgccatctttcgctcaggatgtgttagttaaagccagcgtcgggcagtatctggcaggggataaaggcggcacgctggagatcgccaaacgctttgatagcggcgtggtggtgggtggctatgccacgatcactaatgtttcaaaagaggagtacggcgaaggggacttcaccaaaggcgtgtatgtctctgtaccgttggatctcttctcgtctggcccgacacgcagccgtgcggcgattggctggacgccgctgacgcgtgacggtggtcagcaacttgggcgtaagttccagttgtatgacatgaccagcgaccgtagcgtcaatttccgctaagtcatgggaaaggtgccagttttcgcaatcactggcaccctcattcttaatggcctgttgagccatcaggaacgcagttcacccccggtttgcgatctggtgtgtaaaggcgaaaacattctgtcttcctgtccgtcgatatcggttgcaggtctggttgcctgagcgactgggccatcattgggctggagacattgctttgcggtaggtcggctttatcagcagtaccgagcggaccagcataagcaggaagaacagagactgataacatcaaagcagcaaaataaggcttcatttttaccacctttatcaggttacgtttcatttgttccagaggaacattgtcgatttttcgcgcattgctggtggctgggaatcacctgaatgggtgatttttgaattaccggctttggtgcggtttgtcttgccggatgcgccgccaggcgcggcttatccggcctacgggtaggtatatccggctttggtggaggcgcgctccaaatccaggttgaacaaaacatacacaaaaaatatagatctccgtcacatttttgcgttatacaggaagctcgccactgtgaaggaggtactgctatgacgtcactctctcgtccgcgcgtggagtttatctccaccattttgcagaccgtactcaatcttggcctgctgtgcctcggcctgattttggttgtcttcctcggcaaagaaacggtgcatctggctgatgtgctgttcgcgccagaacaaaccagcaaatatgagctggtagaaggactggtggtttactttctctatttcgaatttatcgcgctgattgtgaagtactttcagtccggttttcacttcccgctacgttactttgtctatattgggatcaccgccattgtgcgcttgatcatcgtcgatcataaatcgccactggatgtgttgatctactcggctgcgatcctgttactggtgatcaccctgtggctgtgtaattcgaaacggctgaagcgggagtaaaaagacagcacgccgaaatggcgcggcgtgctggacaggaagattacagcgtagcagtttgttgtgttttcttcgtttccggttcccagagcgcttccagctcctcaagggttttacctttggtttccgggacaaatttccacataaacagtgctgccagaacgcccatacaaccgtaaatccagtaggagaaaccgttgtggaaatgggccaccagccaggagtttttgtccatcatcgggaaggtccaggagacgaagtagttcgccagccactgggccgccaccgcgattgccagcgctttaccacgaatagcattcgggaagatttccgacagcagtacccagcataccggaccccaggacatggcaaaggcggcaacatagaacagcatcgacagtagcgccacaatacccgatgcctgagtgtaaaacgcggtaccgaggctaaacataccgattgccattccgagtgcgccgataatttgcagtggcttacgaccaaatttatccaccgtcataattgccagtacggtaaaggtgaggttgataactccgacaataatggtctgcaacagcgcgatatccgtgctggcccccagcgttttgaacacttccggcgcgtagtacagcaccacattgatgccgacaaattgctggaagatggagatcataacgccgattacaatcacgcccacgccaaacatcagcagacgaccaccggttttgcggccatgatccagggagtgtttaatttcctgtactgcctgcgttgcaagcgtgttgcccataattttgcgcaggatactttccgcctgttcttgcttgccgcgtgacatcagccagcgaggactttctggcacggtatacagcagcattaagaacagcagtgcagggatacattccgaggcaaacatataacgccagccgtcagtattcagccagctggcatcaccggaacgggcaataaaatagtttacgcagtaaactaaaagttgcccgaaaataatcgcaaactggttaaatgaaaccagttttccgcgaatatgagctggagccagttccgcaatatacattggtgaaagcattgaggctaaaccaacgccaataccgccaataatacgataaataacaaattccgggacataacctgccagataaataggtactgtgttgtccgggtttatagaggtaaaaccaagttctggccaggcagaacctacaccagaaataaaaaacaggacagcagcaatcttaagtgaatcacgacgaccgaagcggttactgcaataaccaccgagggcaccgccgatgatgcaaccaatcagagcgctggccacgcaaaaccctaacagggagttggcagcggattcacttaagttttgtggagcaacaaagacggtattgagtgactcaacagtaccggaaataacggcggtgtcgtagccaaataataaaccacctaatgtagcgactaaggtaatcgaaaatatataactggaattatactgggtattcattcagacctgccttagaccattctgatcttttatcagtgcattgatgttggaattgtcaggcagttaaggcaattatcattttttacaatgcgtttacgtaatgtcttttctgtgatcttaattgtgataattatccaaaattgataaaaacaatactattgccgtgactcagagcacgaaagagaattatcgtaagtgggaaaacaaataacgtaaaaataataagctctatgatggaaatattaaccggcgaacgattcagattgcagacgaaagaaaaaaaggcgctccgtggagcgccgaataacagtcacaagttgggataacgtaagttgagggtgcagcggcataacattggcagaacaacatctttaacctttcacaccacctgccgtcaggccgttgaccagccagcgttgagccagcaagaagacgatggtgatcggtaatgcagacatcacggcagcggcggcaaagtcaccccacaggtagttttgcgggttgaggtattgctgcatccccacggccagggtgtagctgtttacgtcacgcagtaacagcgacgcgaccggaacttcagtaatggcagcgataaacgacaggatgaataccaccgccagaatcggtactgacagcggcaacaggacaaggcggaaggcctgccacggtgtcgcaccatccagcgcagcagcttcttccagcgaactgtcgatggtttcgaaatagcctttgatggtccagacatgcagcgcaatcccacccagatacgcgaaaattacgccgccgtgagtattcaggccaatgaatggaatgtactcacccagacgatcaaacaacgcatacaacgcgaccagtgaaagtactgccgggaacatctggaaaatcagcattcctttcagcagcgtcgctttgcctggaaagcgcatacgggcgaaagcgtaggcgcaggtggtggagagcgccacaatgccaatcgcggaaatcccggcgacctttaccgagttccacagccacagcagtaccgggaatggcggtggcgtaatgcgaccatcagcctgttcaacgctaaaacctaacgccagtttccagtgatcccaggagatttgctccgggatcaggctgccggtcgcaaagtttccctgacgcagcgagatagcgacgaccatcagcagcgggaacataatcgctgcgataaaaagtagcagtagcaggtgagtaataaataaacgagctttttgcgatttcggttggaccattgccatttttgttatctcccttaatcaaacttcattcgcgtggctttcaggttcactatcgccagcgcacccaccagcaggaagatcagcgtggcaattgctgccgccagaccgaagtcctgacccccgccgccttcaaaagcgatgcggtaggtgtagttaacaagcaggtcggtataaccggctggcgtggtcgtgccaagacgatccgggccgccgttggttaacagttgaatcagcacgaagttgttaaagttaaaggcgaagctggcgatcatcagcggcgtcagcggtttaatcagcagcggcagcgtaatcttaaagaagttctggaacggacctgcgccatccattgctgaggcttcatacaaatcgtccggaatcgctttcagcaagcccatgcagaggatcatcatgtacggataacccagccaggtattgacgataattagcatcgtgcgggcggtggtcggatcgctgaaccaggcgggcttcacgccaaacagcgcgctcaacatcatgttgatttcaccgaagctctggttaaacaaccctttgaaaatcaagattgaaatgaacgatggcaccgcgtagggcagaatcagcaggacgcgatagaccgctttgccgcgcaacgcttcccactgcaccagacacgccagaaccatgccgaccgccaccgttaaaaagacagtgatcagcgagaacaccacggtccagacgaaaatggcgaggaacggtttctgaatgccttcgtcggtaaagacgcgggtaaagtttttccagccggtggtcacggtgtaaccggggcttagcttttcatcaccccagttgccgtcggcggtaatggactggtaaaagccaatttggttattcggacgatatttcacgccgctctgattattcgtcaacgtgccgtcaccgtcgagtgtgtagagcggctgcgtgccagaaaactggcgcagggagctcatcatcactttgttgccatccggcagaatggcggtaatgtcactcagcgcctgacgattctgggtaatcacgcgcagattcgcgcgttcgccttcgggctgggcggtcgtttctttcagttgcagtttttgctcgccgccaaatttaaaagcgtcggagaggtaatttttgccggtttcgccgtcgctgagcgccagttgccactcatcgcccgccgggtaaagaccaaagttataggttttgcctgcttgccaggagcgatctaacaacacttcctgcgcacgttcaaaagtcagctggttagtgctgctgtagttggtgaaggcaatggcgatggtgcagaccagagggaagaggacgaataatcccattccagccattcccgggtaaacatagcgccaggcgtaggctttacgattggcgaaaatatacagccccgctgaactcaatatcagcgtggtaatggcgaacaggtattccccttgtgcgtacattaaaacaacaaggtaacccaccagcaggccgagcagacctagcactgaccatttcagcgcgtcgctttgccaccaatgtttctttttaatgacatccatggggttcttcctcattccaggacggataaggctttcacgccttatccgacaacaactgcctgatgcgacgctgacgcgtcttatcaggcctacatacgtttcggttttgtaggccggacaaggcgttcacgccgcatccggcatttcacagcattacttggtgatacgagtctgcgcgtctttcagggcttcatcgacagtctgacgaccgctggcggcgttgatcaccgcagtacgcacggcataccagaaagcggacatctgcgggatgttcggcatgatttcacctttctgggcgttttccatggtggcggcaatacgtggatctttcgccaactcttcctcgtaagacttcagcgctacggcacccagcggtttgtctttattaaccgcttccagaccttcatcagtcagcagatagttttcgaggaactctttcgccagctctttgttcggactggcggcgttaatacctgcgctcagcacgccaacgaacggtttggatggttgacccttgaaggtcggcagtaccgttacaccataattcactttgctggtgtcgatgttggaccatgcccacgggccgttgatggtcatcgctgtttcgcctttattaaaggcagcttctgcgatggagtaatcggtgtctgcattcatgtgtttgtttttaatcaggtcaaccaggaaggtcagacccgctttcgcgccagcgttatccacgcccacgtctttaatgtcgtatttgccgttttcatacttgaacgcataacccccgtcagcagcaatcagcggccaggtgaagtacggttcttgcaggttgaacatcagcgcgctcttacctttcgctttcagttctttatccagcgccgggatctcttcccaggtttttggcgggttcggcagcagatctttgttataaatcagcgataacgcttcaacagcgatcgggtaagcaatcagcttgccgttgtaacgtacggcatcccaggtaaacggatacagcttgtcctggaacgctttgtccggggtgatttcagccaacaggccagattgagcgtagccaccaaagcggtcgtgtgcccagaagataatgtcagggccatcgccagttgccgcaacctgtgggaatttctcttccagtttatccggatgctcaacggtgactttaattccggtatctttctcgaatttcttaccgacttcagcgagaccgttatagcctttatcgccgttaatccagattaccagtttaccttcttcgattttggcgagagccgaggcggaaaacatcatcgtcgttaatgcggataatgcgaggatgcgtgcacctgtttttattttcataatctatggtccttgttggtgaagtgctcgtgaaaacacctaaacggactctagtttctttatacggcaacctctttccatcctccttgcccctacgccccaccgtcgctttgtgtgatctctgttacagaattggcggtaatgtggagatgcgcacataaaatcgccacgatttttgcaagcaacatcacgaaattccttacatgacctcggtttagttcacagaagccgtgttctcatcctcccgcctcctcccccataaaaaagccagggggtggaggatttaagccatctcctgatgacgcatagtcagcccatcatgaatgttgctgtcgatgacaggttgttacaaagggagaagggcatggcgagcgtacagctgcaaaatgtaacgaaagcctggggcgaggtcgtggtatcgaaagatatcaatctcgatatccatgaaggtgaattcgtggtgtttgtcggaccgtctggctgcggtaaatcgactttactgcgcatgattgccgggcttgagacgatcaccagcggcgacctgttcatcggtgagaaacggatgaatgacactccgccagcagaacgcggcgttggtatggtgtttcagtcttacgcgctctatccccacctgtcagtagcagaaaacatgtcatttggcctgaaactggctggcgcaaaaaaagaggtgattaaccaacgcgttaaccaggtggcggaagtgctacaactggcgcatttgctggatcgcaaaccgaaagcgctctccggtggtcagcgtcagcgtgtggcgattggccgtacgctggtggccgagccaagcgtatttttgctcgatgaaccgctctccaacctcgatgctgcactgcgtgtgcaaatgcgtatcgaaatctcccgtctgcataaacgcctgggccgcacaatgatttacgtcacccacgatcaggtcgaagcgatgacgctggccgacaaaatcgtggtgctggacgccggtcgcgtggcgcaggttgggaaaccgctggagctgtaccactatccggcagaccgttttgtcgccggatttatcggttcgccaaagatgaacttcctgccggtaaaagtgaccgccaccgcaatcgatcaagtgcaggtggagctgccgatgccaaatcgtcagcaagtctggctgccagttgaaagccgtgatgtccaggttggagccaatatgtcgctgggtattcgcccggaacatctactgccgagtgatatcgctgacgtcatccttgagggtgaagttcaggtcgtcgagcaactcggcaacgaaacccaaatccatatccagatcccttccattcgtcaaaacctggtgtaccgccagaacgacgtggtgttggtagaagaaggtgccacattcgctatcggcctgccgccagagcgttgccatctgttccgtgaggatggcactgcatgtcgtcgactgcataaggagccgggcgtttaagcaccccacaaaacacacaaagcctgtcacaggtgatgtgaaaaaagaaaagcaatgactcaggagatagaatgatgattactctgcgcaaacttcctctggcggttgccgtcgcagcgggcgtaatgtctgctcaggcaatggctgttgatttccacggctatgcacgttccggtattggctggacaggtagcggcggtgaacaacagtgtttccagactaccggtgctcaaagtaaataccgtcttggcaacgaatgtgaaacttatgctgaattaaaattgggtcaggaagtgtggaaagagggcgataagagcttctatttcgacactaacgtggcctattccgtcgcgcaacagaatgactgggaagctaccgatccggccttccgtgaagcaaacgtgcagggtaaaaacctgatcgaatggctgccaggttccaccatctgggcaggtaagcgcttctaccaacgtcatgacgttcatatgatcgacttctactactgggatatttctggtcctggtgccggtctggaaaacatcgatgttggcttcggtaaactctctctggcagtaacccgctcctctgaagcaggtggttcttcctctttcgccagcaacaatatttatgactataccaacgaaaccgcgaacgacgttttcgatgtgcgtttagcgcagatggaaatcaacccgggcggcacattagaactgggtgtcgactacggtcgtgccaacctgcgtgataactatcgtctggttgatggcgcatcgaaagacggttggttattcactgctgaacatactcagagtgtcctgaagggctttaacaagtttgttgttcagtacgctactgactcgatgacctcgcagggtaaaggtctgtcgcagggttctggtgttgcatatgttgacgaaaaattttcctatgacattaacaacaacggtcacatgctgcgcatcctcgaccacggtgcgatctccatgggcgacaactgggacatgatgtacgtgggtatgtaccaggatatcaactgggataacgacaacggcaccaagtggtggaccgtcggtattcgcccgatgtataagtggacgccgatcatgagtaccctgatggaaatcggctacgacaacgttaaatctcaacgtactggtgataccaacaaccagtacaaaatcacacttgctcaacaatggcaggctggcgacagcatctggtcgcgtccggctattcgtgtgtttgccacctacgccaagtgggatgagaaatggggttacgattacaccgacaaagctaaaggtactccgaactacggcaaagccgttccagctaacttcgaaggcggcagcttcggtcgtggcgacagcgacgagtggaccttcggtgcccagatggaaatctggtggtaatagcaaaacctgggccggataaggtgcttgcgccgcatccggcatccaacgcctgatgcgacgcttgcgcgtcttatcaggcctacaacggctgtcaaatgtaggccggataaggcgtttacgccgcatccggcataaaaacaggttgtcattatctgaaaggggcgaaagcccctctgattatcgggtttagcgcgctattgcctggctaccgctgagctccagattttgaggtgaaaacaatgaaaatgaataaaagtctcatcgccctctgtttatcagcagggttactggcaagcgcgcctggaatcagccttgccgatgttaactacgtaccgcaaaacaccagcgacgcgccagccattccatctgccgcgctgcaacaactcacctggacaccggtcgatcaatctaaaactcagaccacccaactggcgactggcggccaacaactgaacgttcccggcatcagtggtccggttgctgcgtacagcgtcccggcaaacattggcgaactgaccctgacgctgaccagcgaagtgaacaaacaaaccagcgtatttgcgccgaacgtgctgattcttgatcagaatatgaccccatcagccttcttccccagcagttatttcacctaccaggaaccaggcgtgatgagtgcagatcggctggaaggcgttatgcgcctgacaccggcattggggcagcaaaaactttatgttctggtctttaccacggaaaaagatctccagcagacgacccaactgctcgacccggctaaagcctatgccaaaggcgttggtaactcgatcccggatattcccgatccggttgctcgtcataccaccgatggcttactgaaactgaaagtgaaaacgaactccagctccagcgtgttggtaggacctttatttggttcttccgctccagctccggttacggtaggtaacacggcggcaccagctgtggctgcacccgctccggcaccggtgaagaaaagcgagccgatgctcaacgacacggaaagttattttaataccgcgatcaaaaacgctgtcgcgaaaggtgatgttgataaggcgttaaaactgcttgatgaagctgaacgcctgggatcgacatctgcccgttccacctttatcagcagtgtaaaaggcaaggggtaattacgccccacagtgctgattttgcaacaactggtgcgtctcctggcgcacctttttttatgcttccttcctgggatatgagcgattttttatagtaactcacttcttcttcactaagaatatccattatctcaatgccttatcagagattcttttcctttcgccggtagtgtctggacattcaggctacttttccaggttattttatttctgttatgcagaggttttatgataagtcatatcctaaattctggcggcaataactctttgatgaaacatgatgtggtgcaaggaaataatatagtagatcttgatttactacgtaatttaaatggggtgccaggtttaaacagagataactttatttatatcagcaatattttttcaaatataaaacaacggaacgaaaaaatcatgcaataaatatgtttcgtgaagtctcaatcagtaatgatactataagtgtaaaattctacagaaatgaaaaaaattgaatgcgcttgcaattttctgatggataaagatgcgcaggggtatatcgacctgtctgatttggatttaacaagttgtcattttaaaggtgacgttatatcgaaggtgtcttttttatcatcaaatctacaacatgtaacattcgaatgtaaagaaattggggattgcaattttactactgcaatagttgataatgtcatatttagatgtcgacgtttacacaatgtgatttttatcaaagcgagtggtgaatgtgtcgatttcagcaaaaatattcttgatacagttgacttctcgcagagtcaacttggtcatagtaattttcgcgaatgtcagattagaaattcaaacttcgataattgttatctttacgcttcgcacttcaccagagcagagtttctgtctgccaaagaaatatcatttattaaatcgaatttgacagctgttatgtttgattatgtgcgaatgtcgacagggaattttaaagattgcattacagaacaattggaattaactattgattattcagatatattttggaatgaagatctcgatggttatatcaataacattataaaaatgattgatacattgccagataatgcaatgatattgaaatccgttctggccgtaaaactggtgatgcaattaaaaatacttaatattgttaataaaaactttattgagaatatgaagaaaatatttagccattgtccttatataaaagatcccattatacgcagttatatccattctgatgaagataacaagttcgatgattttatgcgtcaacatcgattcagtgaggtgaatttcgatacccaacagatgatcgattttattaacagatttaatacgaataaatggctaattgataaaaataacaatttttttatccaacttatcgatcaggccttacgatcaacggatgatatgatcaaagcaaatgtttggcatctttataaagagtggattcgtagtgatgatgtttcacctatatttatagaaactgaagataatttaagaacctttaacacgaatgaattaacacgaaacgataatatctttatcctgttctcctcagtcgatgatgggccagttatggtggtaagctcccagcgcttacatgatatgttgaatcctacaaaagataccaattggaattccacgtatatctacaaatccagacatgagatgttgcctgttaatcttactcaggaaacacttttcagctccaaatctcatggtaaatatgcgcttttccccatttttactgcgagttggcgagctcatcgtataatgaataagggtgtttaagtaaaggaaaacatcaccgttcctggcatcctggacggtgatgcccctacggttgccctcgccagcacgggcatcggtaaagcgtaaggttcaacatcgttttaccacttcatgcgattgttgcgtttttgttgcgtattagatcacttaatttgctttacatctcccgtaaacacttttctgcgatacaatgcctttacgttatgtaacggagagttcggcatgtcacaccccgcgttaacgcaactgcgtgcgctgcgctattgtaaagagatccctgccctggatccgcaactgctcgactggctgttgctggaagattccatgacaaaacgttttgaacagcagggaaaaacggtgagcgtgacgatgatccgcgaagggtttgtcgagcagaatgaaatccccgaagaactgccgctgctgccgaaagagtctcgttactggttacgtgaaattttgttatgtgccgatggtgaaccgtggcttgccggtcgtaccgtcgttcctgtgtcaacgttaagcgggccggagctggcgttacaaaaattgggtaaaacgccgttaggacgctatctgttcacatcatcgacattaacccgggactttattgagataggccgtgatgccggactgtgggggcgacgttcccgtctgcgattaagcggtaaaccgctgttgctaacagaactgtttttaccggcgtcaccgttgtactaagaggaaaaaaatatggagtggagtctgacgcagaataagctgctggcgtttcatcgcttaatgcgtacggataagccaattggcgcgttactgctgctctggccaacattatgggcgttgtgggtggcgacaccgggcgttccccagctctggatcctggcggtgtttgtcgcgggtgtctggctgatgcgcgctgccggatgtgtggtgaatgattatgctgaccgcaagtttgatggtcatgttaagcgcacggcgaaccgaccacttcccagcggcgcggtaacagagaaagaggcgcgcgcgctgtttgtcgtgctggtactgatttcgtttttactggtgctgacgctgaatacgatgaccattctgttgtcgattgccgcgctagcgctggcgtgggtgtacccgtttatgaagcggtatacccatctaccgcaagtggtgctgggcgcggcgtttggctggtcgattccaatggcttttgccgctgtgagtgagtcggtgccattgagttgctggttaatgttcctcgccaatattctctgggcggtggcttacgacacgcagtatgcgatggttgaccgcgatgatgatgtgaagattggcattaaatccacggcaatcctgttcggccaatacgataaattgattattggtattttgcagattggcgtactggcactgatggcgatcatcggtgagttaaatggcttaggctggggatattactggtcaattctggtggctggcgcgctgtttgtttatcaacaaaaactgattgccaaccgcgagcgtgaagcctgctttaaagcatttatgaataataactatgttggtctggtactatttttagggctggcaatgagttactggcatttctgatgatgtaaaaaagccggatgatcatccggctttcttctgggttgcctgatgcgcggcgcttctcaggcctacacaacacatcgcaatttattgaatttgcagattatggaaggccggataaggcgttttcgccgcatccggcaattctctctgattacccttcgccctgcgtcgcactctcaatcgtcaaacgcacgtctgatgtaatcaactccgccagcaactgataaaccttcatcgtttctgccggttcggcatcgccgctatcgctgatatacccttcatcacgcagtgtcagcaccagagaactgaacaccgccttgtcgaagaactccggcgcgttgatgccgtgcagcacggagagacgttgcgcgacggtgcggctctctttctccagcgtaccgcggttgatcgacgggttggcactcaacaaccagaaggtgatggcataacgttgcagcgtttcgcgcgcgcctgcggccagcagctgtagcgtgcgagaatgcgccgggttgatatgcaactcatcatcttgcagggtaatcagcccctgacgttgcatctcatttgccagcgcatcaataacgtccggcaactcgtcgcgatcccagcgcaggaacagctccgctttcagcattgggtaaagcacattgacgtgctccatcaatacgtcgcgggagatgtggcgatgctgggtgacgattgccgccatcagcgaaggcagcaccaacatatgcgcaatgttgttgcgatagtaggtcatcagcaccgcttgctcgcgcggcagaatgatgatgtcgccgattgtgtctttctcgacttcaaacttgttcatttgcagcgcgtgatcgataagctcgctggcgctggctgaaggaacggtagagtccgtggagtaaggtacgttgcgcatcagatccaggtagcagttgagttgctcggttaactgctcgcgggtgagtgagcgctgacgtgacgccagaagcgcagtacagcacaggttcatggcgtttgccgcgcctgcgttgttaatgcgtaccatcagatcggcagcaatattattgaccgtcggcgttaaccatgccggacgcaccgcttcgatgggatcgatagattcacgccagtctggtacgtgctggttaaggtaggtcatcaacggcattggttcaccgaagttgacgtaaccctgaccgagattacgcagcttgcttaaaccgcgcagcatctgcggcaggctctctttctctttcgtcgcgccgcgcagttctttggcgtaagtacccacttccatgacgtgctcataaccgatgtagatcggaatcagcgtaatcggacgcgtgccgccacgcagcatcgcctgaatggtcatcgacagcgtaccggttttcggatccagcaaacgccccgtgcgggaacgaccgccttccacgaagtactcgacggaataaccacggctgaacagttcgccgagatactcacggaaaacggtggaataaagtttattgcctttaaaagtacggcgaataaagaacgcccccagacggcggaaaatcggcccggccggccagaagttcaggttgatcccagcggcgatatgcggcggcaccagcccctggtgatacagcacgtaagaaagcagcaggtagtccatgtggctgcggtggcaaggcacatataccagctcatgaccgtcgtgggccagctggcgaacgcgctcggcgttatggacgttgatgccctggtaaaggcggttccaggtgaagcccagaatacggtcagtcaggcgaatcatctcgtaagagaaattcgccgcaatctcttccatcagcgcaatcgcgttctgctgcgctttttcatgggagatttttttgctgcgcgcttcatcttctaccgctttggcaatggcgcgggaggcgagcagcttattaaacagatcctgacgagcaggcagacgtgggcccacagcagccagacgttgacgggcaaagtgcatacgcgccacgcgcgccagtttctgtgcgatagttttatccgtgccgtgttcatccgccatacggcgcagcgaaactgacggcgagaaacgcacaaaactgtcgcgaccgagccacagtacggcgaaaaatttctgtacgccgttaagcatacgcagcggcgggtttacttcgcctttttcacgccccggcgcgcgaccaaacatcaccgatactggcaccatctgcacatccagatttgggttgctacggtgcaaatcgagatagtcgtggaacagcttaatagactcttctttcggcgtgtaataggtgaatacacgcggcccgccgtgaatgaacacatagcgcggcagtagcgtgccgtcgatttccagcggctctaacgggtcaggcaagtcatgagccagacactgggcgcgtaacgtcagcaaatctgctttcgagttgtacggtaaaacgtacataattggacgagaggtatccagccccagttccggggcaggatctgccggaatagacttgctttttaccaggatgcttaatggtaaattcagtaatttgtagtaaattcgtggccagccggacataaacgatgtaaagcctctggttaataatgcaaatgcgcggcaaggatagcagaaagtcatgggaaattctgtggtatccgctcatgtttcgcgcggcgttacgcaaacccgaatcatcggatttaacggtacactgatattgacgctcataatgtaaaaaggttctttcaatggccaataataccactggattcacccgaattatcaaagctgctggctattcctggaaaggtttacgcgctgcatggatcaacgaagcggcattccgtcaggaaggcgtagcggtattgttggcggtggtcatcgcctgctggctggatgtggacgcaattacccgcgtgctgcttatcagctccgtgatgctggtgatgattgtggaaatcctcaatagcgccatcgaagcagtggttgaccgaattggctctgaataccatgagctttccggacgcgcaaaagatatgggatccgctgcggtgctgattgccattatcgtcgccgtgattacctggtgcattctgttatggtcgcattttggataacccttccagaattcgataaatctctggtttattgtgcagtttatggttccaaaatcgccttttgctgtatatactcacagcataactgtatatacacccagggggcggaatgaaagcgttaacggccaggcaacaagaggtgtttgatctcatccgtgatcacatcagccagacaggtatgccgccgacgcgtgcggaaatcgcgcagcgtttggggttccgttccccaaacgcggctgaagaacatctgaaggcgctggcacgcaaaggcgttattgaaattgtttccggcgcatcacgcgggattcgtctgttgcaggaagaggaagaagggttgccgctggtaggtcgtgtggctgccggtgaaccacttctggcgcaacagcatattgaaggtcattatcaggtcgatccttccttattcaagccgaatgctgatttcctgctgcgcgtcagcgggatgtcgatgaaagatatcggcattatggatggtgacttgctggcagtgcataaaactcaggatgtacgtaacggtcaggtcgttgtcgcacgtattgatgacgaagttaccgttaagcgcctgaaaaaacagggcaataaagtcgaactgttgccagaaaatagcgagtttaaaccaattgtcgttgaccttcgtcagcagagcttcaccattgaagggctggcggttggggttattcgcaacggcgactggctgtaacatatctctgagaccgcgatgccgcctggcgtcgcggtttgtttttcatctctcttcatcaggcttgtctgcatggcattcctcacttcatctgataaagcactctggcatctcgccttacccatgattttctccaatatcaccgttccgttgctgggactggtcgatacggcggtaattggtcatcttgatagcccggtttatttgggcggcgtggcggttggtgcaacggcgaccagctttctctttatgctgttgctgtttttacgcatgagcaccaccgggctgactgcgcaggcttatggtgccaaaaatcctcaggcattagcccgtacgctggtgcaaccgttgctgttggcgttgggggctggggcgttaattgcgctgctgcgtacgccgattatcgatctggcgctgcatattgttggcggtagtgaggcagtcctggaacaggcgcggcgctttcttgaaatccgctggttaagcgcaccggcgtcgctggcgaatctggtattactcggttggttactcggcgtgcaatatgcccgtgcgccagtaattttgttagtggtcggcaatatcctcaacattgtgctggatgtctggctggtgatggggctgcatatgaacgtgcagggcgcggcgctggcgacggttattgcggaatatgcaacattgctgattggtctgctaatggtgcgtaaaatcctcaaactacgcggaatttccggcgaaatgctgaaaactgcctggcgaggaaacttccgtcgcttgctggcgcttaaccgcgatatcatgctgcgttcgctgttgttgcaactctgtttcggcgcgatcaccgtacttggcgcgcgactggggagtgacattatcgctgttaacgcggttctgatgacgctactcacctttaccgcctatgcgctggatggttttgcctacgcggttgaagcgcactccggtcaggcatacggtgcgcgcgacggtagccagttgctggatgtctggcgggcagcgtgccgccagtcggggatcgtagcgttactgttttcggtggtttatttgctggctggggaacacatcattgcgttactgacgtcgttaacccagattcagcagctggctgaccgctatcttatctggcaggtgattttgccggtggttggcgtctggtgttatctgctggacggcatgtttataggcgcaacgcgtgccaccgaaatgcgtaacagtatggcggtggccgccgcaggttttgcgctgacgctccttacgctgccgtggctgggtaatcatgctttgtggctggcattaaccgtctttctggcgttgcgcgggctttctctggcggctatctggcggcgtcactggcgcaatggtacctggtttgccgcaacgtgacggttaaaaattctgaataaataatcctaagccaaattgctgactacacttaatctcacgttcagaagaaaagtgaacgtactctcattcacaacctaacgatgaggtcttgattatgaataaagatgaagccggcggtaactggaaacagtttaaaggtaaagtgaaagagcaatggggcaaactgaccgatgatgatatgacgatcattgaaggtaaacgtgatcaactggtcggtaaaatccaggaacgttatggttatcagaaagatcaggcagaaaaagaggtcgtggattgggaaacccgcaatgaatatcgctggtaattaatccctcctgcccgacgtgtacaaggatgtacgccctcttaacgcggtttctttttcacctgcacagagtgatcatgctggcactgttcaggatgacgacacgcttccacttctacacatgccgcacagagcccatgtgcttcaatcacattatgccgcagggcaaaccccatttttgccgccagcgtatgcataatgtcttccacgccttctgcacactcttctttcactgcgccgcagcgatcgcaaataaacatggctgacgtatgggtgggctgatcgaacagatgacagagcacataactgttggtggattccaccttatgcacaaaaccttgctcaagcagaaaatccagcgcgcgataaaccgttggcggcttggcttgcggttcagcttcgcgcagtaaatcaagcagatcataagcgctgatagcgccatcctgcagactcatcaggcgcaacacttccaggcgctgtggggtcaggcgcacattacgctgcgcgcagattttttcagcctgcgctaataactcctgcgttgtggtcttttccatcgggcacctcaaagtgggggttaagaatgtccttactttaccatgttccaggaaaaacaccgagaacccttattgttgccgtaatgttgattttctgttttgtaggtaaggtgttatgttgccttgtcgtaccattatcaacacgataataattaataattcatttttaaataaattgcttcaagttaactcgctatttatttaactgggtttaaacgcatacctgtagttcagaaattatgagcgatttttgatagtgaccagatggcaaaagaattataaggaggacacggtacgacaaaaaaggtagatgaatcatgttgaagataatacccggtgcaactggatactttaataaaacactcaattcaaatcaattcgataatgaagatgcaatcaaagataaattagataatagaggttcaatcaaaggtaaattaaataatatatatggtaaatctattgattatgcagcgctgcgtcatcgggatataattattgcaaaaatagatttgtttattcaacgaatcacgcataatttatggcatgcacgtaaaaaaatgtgtttttaattgtgcaaataaatgatctcaaaatgtgggtcaatgagtatattgacgattgcactgatgaggatttaaacgatcgtgactttattgcatcagttgttgaccgggctatttttcatttcgcgattaatagtatatgtaatcctggggataataaagatgcaatgcccattgaacaatgtacttttgatgtagaaactaagaatgaccttccctccacggttcagctattttatgaggaatctaaggataatgaacctttagcgaatatacattttcaagcaataggttctggttttttaacgtttgttaatgcctgccaggaacatgatgacaacagcttaaaattatttgcttcgctgttaatttcactttcatattctagtgcctacgcagatttatcagaaacagtgtatattaatgaaaataatgagagctacctgaaagctcagtttgaaaaattatctcaacgtgatatgaagaagtacctgggagagatgaagcgtctggctgatgggggagaaatgaattttgatggctatctggataagatgtcacatctggtgaatgaaggaacgctcgatcctgatattttaagcaaaatgcgagatgctgcaccacaattaattagcttcgcgaagtcgtttgacccaacctcaaaggaagagattaaaatacttacagacacttctaaattaatttatgatttgttcggggttaaatcggagaaataatatgtgaagttcttcgatagtatggaaggcattatataaaaggacccaatgcttattgggttcttttttctctatcagtgctattagcagggagagatatcaccggagtttaatgtgtgatttttatttatcgtcgaatctgtattgtttatcattgcttttcacaacgctaacatctaataagattagatcttcacttcgtgagagcttcatgccttgagaggatctcatttttcttttgcaatgagacaggcgcttcctgttgttatggtatagtaccccgttattgagcctcctgaacagtgatgctgaataacataactccatgatatatcgataaaataatctctacatttgaaaatgcacggtaattctgaaatgcaaaaaatcaaccaaaccagcgcaatgcctgaaaaaactgacgttcactggagtggtcggtttagcgttgcaccaatgctcgactggacggacagacattgccgctatttcttgcgtctgctttcccgcaatacgctgctgtataccgaaatggtgaccacaggggcgattattcacggtaaaggtgattacctggcgtacagtgaagaagaacatccggtagcgttgcaactcggcggtagcgatccggcggcgctggcacagtgtgcgaagctggcagaagcgcgcggatatgatgagatcaacctgaatgtcggctgcccgtctgaccgggtgcagaacggcatgtttggtgcgtgtctgatgggtaatgcgcagctggttgccgactgcgtgaaagcgatgcgcgatgtggtgtcgattccggtgacggtgaaaacgcgtattggcatcgatgaccaggacagctatgaatttctctgcaatttcatcaacaccgtttccggcaaaggcgagtgtgagatgttcatcatccacgcacgtaaagcctggctttcggggttaagtccgaaagaaaaccgtgagatcccgccgctcgattatccgcgtgtgtatcaactgaagcgtgactttccgcatctgacaatgtcgattaacggtggtatcaagtcgctggaagaggccaaagcacacctgcaacatatggatggcgtgatggtcgggcgcgaggcgtatcagaatccgggtattctggcggcggtagaccgggagatctttggttcctcggatatcgatgccgatccggtggcggtagtgcgcgccatgtatccgtacattgagcgtgaactcagccaggggacgtatctcggtcatattacccggcatatgttgggcttgttccagggtattcctggcgcgcggcagtggcggcgttatttaagtgaaaatgcccataaagcgggtgcagacattaatgtgctggaacacgcgctcaaactggtggcggataagcgttaacttttcaccaaaaaatagtcaaattcaccacgccctgcgcaccgtcgcggggcgttttgctgttaaatcaatagattatttttggcatgattcttgtaatgccagcaagagatttcatatttgggagtgcatcatgctggaactactttttgtgattggcttttttgtcatgctgatggtcaccggcgtttcgttgctgggcattatcgccgcgctggttgtggcgacggccattatgttcctcggcggtatgctggcattgatgattaagttgctgccgtggttactactggcgattgcggtggtgtgggttattaaggcgattaaagcaccaaaagtgccgaaatatcagcgttatgaccgctggcgttactaagggattgtgcggatgatcacaacctaaggttttatccttagaacaaaataggaattgataatcaaatctgtcactattgcgcctctaacagattcatcgtgctgtaccctacatacagccgaactataaaaagaaagggcttcccaggtggaagccctatttcttttatggaatcaacaggctggaaccttgcgttgcccggctttccagaatttcatgcgcacgctgcgcatccttcagcggatatttctgctgctcggcgacatcgaccttaatcacaccgctggcaatcaaagagaacagttcattactggcctcggttaattcctcccgcgtggtgatatagccttgcagggaagggcgtgtcacatacaacgagcctttctgattgagaatgcctaagttcacaccggtaaccgcacctgatgagttgccaaaactcaccattaagccgcggcgttgcaggcaatccagcgaccgttcccaggtgtctctgcccacggaatcgtacaccacgcgcactttcttaccgccggtgatctcttttaaccgctcgaccagattctcttcacgatagttaataacctgccacgcgcccgcttttagcgcgctctgcgctttttgcgcggttcctacggtgccgataagtttcgcgcccagggcttttgcccactggcaggcaatcaagccaacgccgccagctgctgcgtggaacaggaactgctcatcgggtttaatttcataggttttgcgcagcagataataaaccgttaagcctttcaggaaggatgccgcagcttgctcaaaagaaattgccgcaggcagaatcgccgctttgtccgcaataatgttatgcacagagctgtaagcgcctaacgccgactgcgcatagactacacgatcgcctgccttaatatgctttacaccactgccgactttactcacgatgcctgctgcttcggtgcctaatccgctgggtagcgatggcggcgggtaaaggccgctgcggatatatgtgtcgataaaattgatgccgatggctttattttcgacctggatttcattctccgccggatcggcaggagtgaactctacggcttgaagtacttccgggccaccgtgcttgtgaaattcaattcgtgttgccatgtgtcctccagaacgtatcgtcaggggctgcttcatatggtaaagtttcgacccattctttatctcggtaactccattcactatggcaggaaataaacccttcaacaaacagcaggctgaaccccgcgaacgcgatccacaagttgccgggctgaaagtgcctccgcactcgatcgaagcggagcagtcggtgttgggcggtttaatgctagataacgaacgctgggatgatgtagccgagcgtgtggtagcagacgatttttacacccgcccacaccgtcatatctttactgaaatggcgcgtttgcaggaaagcggtagccctatcgatctaattactcttgcggaatcgctggaacgccaggggcaactcgatagcgtcggtggttttgcttatctggcagagctgtcaaaaaatacgccaagtgcggcgaacatcagtgcttatgctgacatcgtgcgtgaacgtgccgttgtccgtgagatgatctcggttgcgaatgagattgctgaagccggttttgatccgcaggggcgtaccagcgaagatctgctggaccttgctgaatcccgcgtctttaaaattgccgaaagtcgtgcaaacaaagacgaagggccgaagaacatcgccgatgtgctcgacgcaaccgtggcgcgtattgagcagttgtttcagcagccacacgatggcgttaccggagtaaacaccggttatgacgatctcaacaaaaaaaccgctggcttgcagccgtcggatttgatcatcgtcgccgcgcgtccgtcgatgggtaaaacaacatttgcgatgaacctcgtcgaaaacgcggcgatgttgcaggataaaccagtacttatcttctcgctggagatgccttcagaacagattatgatgcgttctctggcgtcgctgtcgcgcgttgaccagactaaaatccgtaccgggcagctcgatgatgaagactgggcgcgcatttccggcaccatgggtattttgctcgaaaaacgcaatatctatatcgatgactcctccggcctgacgccaacggaagtgcgttcccgcgcacgccgtattgcccgtgaacacggcggcatcgggcttatcatgatcgactacctgcaactgatgcgcgtaccggcgctttccgataaccgtacgctggaaattgcagaaatctctcgctcgctgaaagcactggcgaaagaactgaacgtgccggtggtggcgctgtcccagttgaaccgttctctggaacaacgtgccgacaaacgcccggtcaactccgacctgcgtgaatctggctctatcgagcaggatgcggacttgatcatgtttatctatcgtgatgaggtgtatcacgaaaacagtgatttaaaaggcatcgcggaaattattatcggtaaacaacgtaacggcccaatcgggacggtacgcctgacctttaacggtcaatggtcgcgcttcgacaactatgcggggccgcagtacgacgacgaataataattattttatgaattaggtaattaaagcaaacacttatcaaggaacacaaatgcaagcggcaactgttgtgattaaccgccgcgctctgcgacacaacctgcaacgtcttcgtgaactggcccctgccagtaaaatggttgcggtggtgaaagcgaacgcttatggtcacggtcttcttgagaccgcgcgaacgctccccgatgctgacgcctttggcgtagcccgtctcgaagaagctctgcgactgcgtgcggggggaatcaccaaacctgtactgttactcgaaggcttttttgatgccagagatctgccgacgatttctgcgcaacattttcataccgccgtgcataacgaagaacagctggctgcgctggaagaggctagcctggacgagccggttaccgtctggatgaaactcgataccggtatgcaccgtctgggcgtaaggccggaacaggctgaggcgttttatcatcgcctgacccagtgcaaaaacgttcgtcagccggtgaatatcgtcagccattttgcgcgcgcggatgaaccaaaatgtggcgcaaccgagaaacaactcgctatctttaataccttttgcgaaggcaaacctggtcaacgttccattgccgcatcgggtggcattctgctgtggccacagtcgcattttgactgggtgcgcccgggcatcattctttatggcgtctcgccgctggaagatcgctccaccggtgccgattttggctgtcagccagtgatgtcactaacctccagcctgattgccgtgcgtgagcataaagccggagaacctgttggttatggtggaacctgggtaagcgaacgtgatacccgtcttggcgtagtcgcgatgggctatggcgatggttatccgcgcgccgcgccgtccggtacgccagtgctggtgaacggtcgcgaagtaccgattgtcgggcgcgtggcgatggatatgatctgcgtagacttaggtccacaggcgcaggacaaagccggggatccggtcattttatggggcgaaggtttgcccgtagaacgtatcgctgaaatgacgaaagtaagcgcttacgaacttattacgcgcctgacttcaagggtcgcgatgaaatacgtggattaatcgttctgtaatatttgattgtctgtgccggatgcggcgtgaatgccttatccggccaataaaatcctaaaaattcaataagttgatgttctttcatgctcttataaaggtcgtgcctctggcggatgtacgtttgtcatgagtctcactctgttgctaattgccgttcgctcctgaacatccactcgatcttcgccttcttccggtttattgtgttttaaccacctgcccgtaaacctggagaaccatcgcgtgtttcaaaaagttgacgcctacgctggcgacccgattcttacgcttatggagcgttttaaagaagaccctcgcagcgacaaagtgaatttaagtatcggtctgtactacaacgaagacggaattattccacaactgcaagccgtggcggaggcggaagcgcgcctgaatgcgcagcctcatggcgcttcgctttatttaccgatggaagggcttaacagctatcgccatgccattgcgccgctgctgtttggtgcggaccatccggtactgaaacaacagcgcgtagcaaccattcaaacccttggcggctccggggcattgaaagtgggcgcggatttcctgaaacgctacttcccggaatcaggcgtctgggtcagcgatcctacctgggaaaaccacgtagcaatattcgccggggctggattcgaagtgagtacttacccctggtatgacgaagcgactaacggcgtgcgctttaatgacctgttggcgacgctgaaaacattacctgcccgcagtattgtgttgctgcatccatgttgccacaacccaacgggtgccgatctcactaatgatcagtgggatgcggtgattgaaattctcaaagcccgcgagcttattccattcctcgatattgcctatcaaggatttggtgccggtatggaagaggatgcctacgccattcgcgccattgccagcgctggattacccgctctggtgagcaattcgttctcgaaaattttctccctttacggcgagcgcgttggcggactttctgttctgtgtgaagatgccgaagctgcaggccgcgtactggggcaattgaaagcaacagttcgccgcaactactccagcccgccgaattttggtgcgcaggtggtggctgcggtgctgaatgacgaggcattgaaagccagctggctggcggaagtagaagagatgcgtactcgcattctggcaatgcgtcaggaactggtgaaggtattgagcacagagatgccagaacgcaatttcgattatctgcttaatcagcgcggcatgttcagttatacaggtttaagtgccgctcaggttgaccgactacgtgaggagtttggtgtttatctcatcgccagcggtcgcatgtgtgtcgccgggttaaatacggcaaatgtacaacgtgtggcaaaggcgtttgctgcggtgatgtaatgcaggaaagcaggctggagttacccagcctgcagtgaaattaaactgtcgtcgctttcactctttctttatagatgatttttttgatgccatcgttctacgtaagagataataaacgttgttagttcttttattgttaagcttatcccaattatctggaattccttatcctgtttttttgtgtggagtaataatttctgcacatctaaccattattaaatttaataataagtatcgggtttgttacgatagaatttttctatatcctcaagaatatgctttgccttattgcctgtgactttctgagattcaattatagtatcgttaaattctaaagttaaagagaactctttttttccgctttgtgtaagtttaaccttatattgattaccaatatcaaataaaaaggtcctgtaatgagaataatcacctttaacctcctcggcaaaacagcaaagcgtgcaaatatacataaaatctttcttacccctgattttgttaactaaatcaataaatgcgtgaaaaactgtacttgcaatagaacttgatacttcttctccaggtctacaaaaatcttttgcaatttttaactgtgtttctatatataaaaaaagatctatggcataagagatatctttgttatttagtgcatctagctcaacaggtaaagatgtcattttgttgttgttcacatatgatatattcatatcatcatctccatcgggagtaataaaattagtcaccattgtagggtagggttctggtcaatcagaaatcatctttataaacttcgattgtttttgtaatgctgtttcattaagttcattaaatcgtacagcagataaatgttctatcaaatttcgctcatttgcagaggattcatcataataaacgaaatattaatgtattcttacatcgagcaataaccatttttttacaaaaaaacgacaggaacgtatttactgggttaaatataatcatcctgcttttcatcacaaaaaccgcagataatccttcctttcccctgcagctggcgttatggtcagatggtttttgcaacaaatctcacaataaaaagtttcaacatactgactatttagggaaaaatatgcgcaagatcacacaggcaatcagtgccgtttgcttattgttcgctctaaacagttccgctgttgccctggcctcatctccttcaccgcttaaccctgggactaacgttgccaggcttgctgaacaggcacccattcattgggtttcggtcgcacaaattgaaaatagcctcgcagggcgtccgccaatggcggtggggtttgatatcgatgacacggtacttttttccagtccgggcttctggcgcggcaaaaaaaccttctcgccagaaagcgaagattatctgaaaaatcctgtgttctgggaaaaaatgaacaatggctgggatgaattcagcattccaaaagaggtcgctcgccagctgattgatatgcatgtacgccgcggtgacgcgatcttctttgtgactggtcgtagcccgacgaaaacagaaacggtttcaaaaacgctggcggataattttcatattcctgccaccaacatgaatccggtgatctttgcgggcgataaaccagggcaaaatacaaaatcgcaatggctgcaggataaaaatatccgaattttttatggcgattctgataatgatattaccgccgcacgcgatgtcggcgctcgtggtatccgcattctgcgcgcctccaactctacctacaaacccttgccacaagcgggtgcgtttggtgaagaggtgatcgtcaattcagaatactgacagagcgggagagcgtgatgctctcccgaatgctgtttttttaatcacacctttatcctttcgctgtcttgctgcaaactgattaagagagttttatcaaggagcagcacatgtggtatcaaaagacgctcacgcttagcgccaaatctcgtgggtttcatctggtaacggatgaaattctgaatcagctggctgatatgccgcgcgttaacatcggcttactgcatctgttgctgcaacatacctccgcctctctgacacttaatgagaactgcgatcccaccgtacgccacgacatggagcgttttttcctccgcaccgttcccgacaacggaaattatgagcatgactatgagggagcagacgatatgccttctcatatcaaatcctcaatgctgggaacatcgcttgtattgccggtgcataaagggcgtattcagaccggcacctggcaaggcatttggctgggggaacatcgcatccacggcggatcgcgtcgcatcatcgcgacactacaaggggagtaaaaaatgaccatttcggagttgctacaatattgcatggcaaaaccaggcgcagaacagagcgtgcataacgactggaaagcgacgcagatcaaagtggaagatgtactgtttgcgatggtgaaagaagtagaaaatcgcccagctgtttcgctgaaaaccagcccggagctggcggagctgctacgtcagcagcacagcgatgtgcgtccaagccgccatctgaataaagcgcactggagcaccgtgtatctcgacggttcgctgccagattcgcaaatctattatctggtggatgcgtcttatcagcaggcggtgaatttactgccggaagaaaaacgtaaattgctggtgcaactctgaaaggaaaaggccgctcagaaagcggccttaacgattacagcatcggcttaaggaagcgtgccgtgtgtgatgcttcgcactccgcgacggtttctggcgtaccggagacgaggatctcgccgccaccactgccgccttctggtcccaggtcgacaatccagtcagcggttttgatcacgtcgagattgtgctcaatcaccacaatggtgttgccctgatcgcgcagtttatgcagtacgtcgagcagttgctgaatatcggcgaagtgcagaccggtggtcggctcgtcgagaatatacagcgtctgcccggtgccgcgttttgacagttcacgcgccagcttcacgcgctgggcttcaccgcctgaaagggtggttgcggactgccccagtcgaatgtacgtcaggccaacgtccatcaacgtttgcagcttacgcgccagtgcaggtacggcatcaaagaactcacgcgcctcttcgatggtcatatccagcacttcgtggatggttttgcctttgtacttaatctccagcgtttcacggttatagcgtttacctttgcactggtcgcacggcacgtagatatccggcaggaagtgcatctccactttgatcacgccatcgccctgacaggcctcgcagcgtccgccacgaacgttaaagctgaaacgtcccggcgtatagccgcgcgcacgggattccggtacgcccgcaaacagttcgcgcacaggcgtaaacacgccggtataggtcgccgggttagaacgcggagtacgaccaattgggctttggtcgatatcgatcactttgtcgaaatgctccagtccctgaatatcgcgatacggtgccggttcggcgatggtcgccccattcaactggcgttgggcaatcgggaacagtgtgtcgttaatcagcgtcgatttaccggaacctgaaacccctgtgatgcaggtaaacagaccgactggcagcgtcagcgtcacgtctttcaggttattaccgcgtgcgcctgtcagcttcagcactttttccggattcgccggaacgcgtttcttcggcacttcaatcttgcgtttaccgctcatgtactgtccggttaacgactccggcaccgccataattgcttccagtggaccttccgcgaccacttcaccgccgtgaacacctgcgcccgggccaatgtcgatcacatggtcagcggcgcgaatcgcgtcttcgtcgtgctccaccacaatcacggtattaccgagatcgcgcagatggataagcgtacccaacaggcgctcgttatcgcgctggtgcaggccgatagatggctcgtccagcacgtacataacgccaaccaggcccgcaccaatctggctcgccagacggatacgctgggcttcaccgccggaaagcgtttctgccgagcgggaaagcgtcaggtaattcaggccgacgttaacgaggaatttcaaacgatcgccgatctctttaagaattttttccgcaatcttcgcccgctgacctgcgagtttgagattgttgaagaattccatcgcatgaccgatgctcatgtcggagatggcgggcagcggcgtattctcgacatacacgtggcgcgcttcccgacgcagacgcgttccttcgcagctggcgcatgggcgattgctgataaacttggctaattcttcacgtaccgcgctggattccgtctctttatagcggcgctccatattatgcagcacgccttcgaacggatgacgacgaatggaggtatcgccacgatcgttcatgtatttgaattcaatgttttctttgccagaaccgtacaacaccactttatgcacgttcgcgctcaagctgccccacggcgcttcgacgtcgaacttatagtgatctgccagtgatttcagcatctggaaataatagaagttgcggcgatcccagccacggatcgcaccacctgccagcgacagttccggattctggatcacgcggtcaggatcgaaatattgctgtacgccaaggccgtcgcaggtcgggcaggcccccgccgggttgttaaacgaaaacagtcgcggctccagctcgcgcatactgtaaccgcaaattgggcaggcgaagttggcggagaacagcagctcttccgctttcgggtcgtccatatccgccactaccgcggtaccaccggaaagctctagcgcggtttcaaacgactcggccagacgttgggtaagatcgtcacgcaccttgaagcgatcaaccaccacttcaatggtatgtttcttttgcagttccagtttcggcggatcggaaagatcgcagacttcgccatcaatacgagcacggatgtaaccctggcttgccaggttctccagcgttttggtgtgttcgcctttgcgctctttaatgattggcgcgagcagcatcagacgcttgccttccggctgcgacagcacgttatccaccatctggctgacggtttgcgccgccagcgggacgtcgtggtccggacagcgcggttcgccgacgcgggcgaacaacaaacgcaaatagtcgtggatttcggtgattgtccccaccgtagaacgcgggttatgagacgtcgatttctgctcaattgagatggcaggagaaagcccctcaatatgatcgacgtccggcttttccatcagtgacagaaactgccgcgcgtaggcggaaagggattcaacgtaacggcgctgcccttcggcatataaggtgtcgaaagcgagcgaggatttgccagaacccgaaagcccggtcacgacaatgagcttgtcgcgggggataacgaggttgatgtttttgagattatgggtgcgggcgccccgaacttcgatcttatccattcacctttcccggattaaacgcttttttgcccggtggcatggtgctaccggcgatcacaaacggttaattatgacacaaattgacctgaatgaatatacagtattggaatgcattacccggagtgttgtgtaacaatgtctggccaggtttgtttcccggaaccgaggtcacaacatagtaaaagcgctattggtaatggtacaatcgcgcgtttacacttattcagaacgatttttttcaggagacacgaacatggccagcagaggcgtaaacaaggttattctcgttggtaatctgggtcaggacccggaagtacgctacatgccaaatggtggcgcagttgccaacattacgctggctacttccgaatcctggcgtgataaagcgaccggcgagatgaaagaacagactgaatggcaccgcgttgtgctgttcggcaaactggcagaagtggcgagcgaatatctgcgtaaaggttctcaggtttatatcgaaggtcagctgcgtacccgtaaatggaccgatcaatccggtcaggatcgctacaccacagaagtcgtggtgaacgttggcggcaccatgcagatgctgggtggtcgtcagggtggtggcgctccggcaggtggcaatatcggtggtggtcagccgcagggcggttggggtcagcctcagcagccgcagggtggcaatcagttcagcggcggcgcgcagtctcgcccgcagcagtccgctccggcagcgccgtctaacgagccgccgatggactttgatgatgacattccgttctgatttgtcattaaaacaagaggttatattgttttaaggtggatgattaaagcatctgccagccataaaaaagaagcctccgttatggaggcttctacgtatcaggtcaaaatcattggccattgtggcggtgtctgattcatctcttctatcatcaccgactcgatgttgtgccagatagcggtgatgtccgccattgtgatgccaagcaaccccattgcgaaccaacaggcggaaacaacgcccagaccgctgctgatcaccgcaagcccgacataatcagaccgacgaaaacggatgttgagtgtgctggccagaaacatcattacggcactaagaagttgccagcgaagaagaaccacgccagtggtgagggtagccatcaaacaattcctctgaaaagagccgatgccctggacagcgcggcgttgttcacgggaggcgtggtacactctggctatcgcggggcttgcagaacacaaaaatgaaacactctgtttgtttcattaattttgtgaactatatcacaattgattgtttgttagccatattaggccgtgacttttattgctgtacagattatgtggtttttcagtggcattaagggcatatcttcccgccgcctctgcattcctgtaggaaattaattttgaatatcaatgaattattttcatccaggtgacgattagaaaggtatcaatttcaaatcaggcaaaagtgctatttataccgtaagatttatctaaagacgtcggtacccagggttttcaccttgcaatggccgggtataaacaggcaggaaattgatagcaatgagtcatcgtgcacgacaccaattactggcgttgccgggcattatctttttagttctctttcccatcattctttcgctatggattgccttcctttgggcaaaatcagaagtgaataatcagctccgaacctttgctcaactggcactggataaatccgagctggtcattcgccaggcagatttagtgagcgatgcagctgaacgctatcaggggcaagtttgcactccagcccatcaaaagcgaatgttgaatattattcgtggctatctttatattaatgaattgatctatgcccgtgataaccattttttatgctcatcgctgatagcgcctgtaaacggctatacgattgcaccggccgattataagcgtgaacctaacgtttctatctattattaccgcgatacgccttttttctctggctataaaatgacctatatgcagcggggaaattatgtggcagttatcaaccctctcttctggagtgaagtgatgtctgatgatccgacattgcaatggggtgtgtatgatacggtgacgaaaacctttttctcgttaagcaaagaggcctcggcagcaacgttttctccgctgattcatttgaaggatttaaccgtacaaagaaatggctatttatatgcgacagtttattcgacaaaacgcccaattgcagccattgttgcgacttcatatcaacgtcttataacccatttttataatcatcttatttttgcgttgcccgccggtattttggggagtcttgttctgctattactctggctacgtattcgacaaaactatttatctcccaaacgtaaattgcaacgcgccctcgaaaaacatcaactttgtctttattaccagccaataatcgatatcaaaacagaaaaatgtatcggcgctgaagcgttgttacgttggcttggtgagcaggggcaaataatgaatccggcagagtttattccgctggcagaaaaggaggggatgatagaacagataactgattatgttattgataatgtcttccgtgatctgggcgcgtacttggcaacacatgccgatcgctatgtttctattaacctgtcggcctccgattttcatacgtcacggttgatagcgcgaatcaatcagaaaacagagcaatacgcggtgcgtccgcagcaaattaaatttgaagtgactgagcatgcatttcttgatgtcgaaaaaatgacgccgattattctggctttccgccaggctggttacgaagtggcaattgatgattttggtattggctactctaacttgcataaccttaaatcattgaatgtcgatattttgaaaatcgataaatcgtttgttgaaacgctgaccacccacaaaaccagtcatttgattgcggaacacatcatcgagctggcgcacagcctggggttaaaaacgatcgctgaaggcgtcgaaactgaggagcaggttaactggctgcgcaaacgcggcgtgcgctattgccagggatggttttttgcgaaggcgatgccgccgcaggtgtttatgcaatggatggagcaattacccgcgcgggagttaacgcgcgggcaataaaactacaggcggtggcgataatcgctgggagtgcgatcaaactgccgacggaaaacgcgggagaaggtctgctgcgagacataacccaggtccattgcgatatcaaaaatcggacgctcggtggtgcgcaactcaacggcggccagtaacaggcgacgttggcgaatgtaatcgccaagcgtctgatgcgtcaccgtgcggaacattcgttgcaagtaccactttgaatagcctgatttttttgcgactacatcaatgttaagcggctggtcaatatgctcgtcaatccatgcgataagatcctgaataattttctgatgggacataaatctgcctcttttcagtgttcagttcgttaattcatctgttggggagtataattcctcaagttaacttgaggtaaagcgatttatggaaaagaaattaccccgcattaaagcgctgctaacccccggcgaagtggcgaaacgcagcggtgtggcggtatcggcgctgcatttctatgaaagtaaagggttgattaccagtatccgtaacagcggcaatcagcggcgatataaacgtgatgtgttgcgatatgttgcaattatcaaaattgctcagcgtattggcattccgctggcgaccattggtgaagcgtttggcgtgttgcccgaagggcatacgttaagtgcgaaagagtggaaacagctttcgtcccaatggcgagaagagttggatcggcgcattcataccttagtggcgctgcgtgacgaactggacggatgtattggttgtggctgcctttcgcgcagtgattgcccgttgcgtaacccgggcgaccgcttaggagaagaaggtaccggcgcacgcttgctggaagatgaacaaaactaaagcgccacaagggcgctttagtttgttttccggtctttgtctttctctctatcccgctggtacacaggagggtttcccccgacgtcaacacacctcattcgagcacgtggtggaggttccggttggtgttgatgctttaattgtatgtcaccgacgtttcttcgccagtgtaaaagtatactttttaaccgcaatatttttgtcatctcagacgattttttatcgcaatcctgaacggtatacggctcgataacgctgcaatcttgcgcaccgacgataacgtttgcgcatcaattgcctggtttttcatcgtcaagacaataaaagagaaaaaagcagcaaacttcggttgaaaaagccgctatgatcgccggataatcgtttgctttttttaccacccgttttgtatgcgcggagctaaacgtttgcttttttgcgacgcagcaaattgtcgcaaacctggagcaggaagataacgtttcgctggcaggggattgtccgccacgcatcttgacgaaaattaaactctcaggggatgttttcttatgtctacgccatcagcgcgtaccggcggttcactcgacgcctggtttaaaatttcacaacgtggaagcactgtccgtcaggaagtggttgccgggttaacaacgtttctggcgatggtctactcggtcatcgtcgttccaggtatgttgggtaaagcaggcttcccgcctgcggcagttttcgttgcaacctgtctggttgccggactcggttctatcgtgatgggtctgtgggctaatctgccgttggcgattggttgcgccatctccctgacggcgtttaccgcattcagcctggtgctggggcaacatattagcgtacctgtcgcgctgggtgccgtgttcctgatgggtgtgctgtttacggtaatttctgccacgggtatccgtagctggattttgcgcaacttgcctcacggtgtggcgcacggcacggggattggtatcggtctgttcctgctgctcattgccgctaacggtgtcggtctggtgattaaaaacccgcttgatggtctgcccgttgcgctgggtgatttcgcgaccttcccggtgattatgtcactggtaggtctggcggtgatcatcggcctggaaaaactgaaagtccctggtggcattctgctgaccattatcggtatctcaattgtcggtttgatcttcgatcctaacgtccatttctccggcgttttcgccatgccttcattgagcgatgaaaacggcaattcactgattggcagcctggacattatgggcgcgctgaatcctgtagtcctgccaagcgttctggcgctggtgatgacggcagtatttgatgccaccggaactatccgtgccgtcgccggccaggcgaacctgctggataaagatgggcagatcatcgacggtgggaaagcactgaccactgactccatgagcagcgttttctctggcctggtgggtgcggctccggcagcggtatacatcgagtctgcggcgggtacggcggcgggcggtaaaaccggtttgacggctatcaccgttggcgtgctgttcctcctgattctgttcctctctccgctctcttacctcgttccggggtatgcaacggctccggcgctgatgtacgttggcctgctgatgctgagcaacgtggcgaaaatcgactttgctgattttgttgatgcgatggcgggtctggttacggctgtattcatcgtgctgacctgtaacatcgtaacaggcatcatgatcggcttcgcgactctggtgattggtcgtctggtttccggcgaatggcgcaagttgaacatcggtacggtcgttatcgccgtggcgctggtgaccttctatgcgggtggctgggctatctaatctttcatcggattctgaaaacgggtggcaatggctgcccgtttttattttctccgcacattgtgtgagcttttgcgatattctgaaaaaatgagaattcaggcataacgtctttctcagatcataaaaaacatcgcaaacagggaacgcatggaaatcttcttcaccatactgataatgaccctcgtggtctcgctgtccggggtggtcactcgtgtcatgccctttcagatcccgcttccgcttatgcaaatcgccatcggtgcgctactggcgtggccgacgtttggtttgcatgtggagtttgatcctgaactctttttagtcttgtttatcccgccgttgctgttcgctgatggctggaaaacgccgacccgtgaatttctcgaacatggtcgagagattttcggcctcgcgctggcgctggtggtggtcaccgtggtcggcattggcttccttatttactgggtggtgccgggcattccgctgatccctgcctttgcgctggcggcggtgctttctccgaccgatgctgtggcgctctccgggattgttggcgaagggcgcatcccgaaaaaaatcatgggcattttgcagggcgaagcgttgatgaatgacgcctccggtctggtgtcgttgaagtttgccgtagcagtggcgatggggacgatgatcttcaccgtcggcggtgcgacggtcgaatttatgaaagtagccattggcggtattctcgccggttttgtggtgagctggctgtacggtcgctcgctgcgattcctcagccgctggggcggtgatgaacccgcgacgcagatcgtcctgctgttcctgctgccattcgcttcttatctgattgccgaacatattggcgtttccggcatcctcgctgcggttgccgccgggatgaccatcacccgctccggtgtgatgcgccgtgcgccgctggcaatgcgcctgcgtgcaaacagcacctgggcgatgctggaatttgtctttaacggcatggtgttcctgctgttaggtctgcagctgccgggtattctggagacgtcgctgatggcagcagaaatcgaccctaacgtcgaaatctggatgctgtttaccgatattattctgatatatgcggcgctgatgctggtccgtttcggctggctgtggacgatgaaaaagttcagcaaccgcttcctgaagaagaagccgatggagtttggttcgtggaccacacgagaaatcctgatcgcgtctttcgccggggtgcgtggggcgatcactctggctggtgtgctctctatcccgctgctcttgccggatggtaacgtcttcccggcgcgctatgagctggtgttcctggcggctggcgtcattctcttctcgctgtttgtcggcgtggtgatgttgcctattctgctacaacacattgaagtcgcggatcattcgcaacaattgaaagaggaacgtattgcgcgagcggcaacggcagaagtggcgattgtggcgatccagaaaatggaggagcgtctggcggcggataccgaagagaatatcgataaccagctgcttacggaggtcagttctcgcgtcattggtaacctgcgtcgtcgcgccgatggacgtaacgacgttgaaagttccgtgcaggaagagaaccttgagcgtcgcttccgtctggcggcattgcgttctgaacgtgctgaactttaccacctgcgcgccacacgggagatcagcaacgaaacgctgcaaaaattactgcacgatctcgatttgcttgaagcgttgctaattgaggaaaatcagtaagccgaaagcgacgtaaccaggcccgaggtaatctgaaaaaggtgcaatcttttgcacctttaacaggttagctcgggctaacattcatgattctaaaacaaataagttatctctcttttaaagtcaattcattggctgttcttcgacttaacctcaatctgcatcttgcataatatctgcagtaatcttcatagcgactgcatgaagattatcctcagtttgtgacatgccagtatgagtggcacaatcttcttcaaagaatttctgtagtgttaccaggatatcactattaatggagatattttcctcaccacggagaatggtaatacccattccctggacgctagcctcatcgaaattaacacgatagagacggatattaaacatccaggcttttgttaaaacagaacagttgaaatggcaattgcttaaattggcattattaaaattaacattagccatattagagccggtacatataaccatttcgaggaacgtatttgttaaccgcgtaaaaaagagtttgctatcaattaagtttatattctggagggttgctttattcaggttgacacgagacagatcagcatgttcaaagttaattaaatcaagtttagagaagctaaggtcggctctaaataaattaatatatggcgctattactttataaagatttacctcagccatgtatgccatataaaaatttgaataatcaaggaaggtatttttaatattggctctattcattgttgcattgtagaattgaacatgcatagcggaacatgaatttagagttccgtcagtcatttttatctgagcgaaatttgagtcatcgagaatacaattatcaaaaagtattttttccattatggcgaaattaaaattcgttttatacatattacagtcctgaaaaatagcgttttgtagtctgcaacctgcaaaattcgaattggataaatcttcatctttaatcacgatacctttcaggctaaggtgtgaaaaatcgtaaccaccatttactgtctgtgggatttcgatagtattattatggacggtgacattatttataaaatataccaccttaattgacacttccttatctttattaaggtaaactcttctcgtaattctatcgtcacatttattatttgcatgtgaagctatatctataaaatatttatgtattttcctgtccgtttccttcgtgatttttcctgatggtaaactatcataaattcttttcattttctgaatcaagcctatcactttttcatgatcatccatcttgaaaagagagagggctttattgtcaattaacgtgcttttatgatgttttctgtaattatctgattttgttttctttgtatgtgatggacttgtgacagagtggttatcgttaatctggcaaagagggaaaaacatattatttaaaccattgtagcacataaaatatccttataattaacaagaaagaaaaggcatattctctgcattatcattttctacgactgtcaaaaatcgctcattttttaatgagtttatttgtttaatattttgggaaaaggtgatgcatgctggagaggaagagtattccccggtcaggcgaccggggaaggggagagattaatgtgcgcggccttgctcaacgccaaagccggtctgggagcggataaactgcgcgcggaacagttcacgctcgcgcgccccttccgctgagttatcggttgccgagaagaaccagatgccgaggaatgccacggtgatagagaacagcgccgggtattcatacgggaagatggctttttcgtgaccaaggatctgtacccaaatcgtcgggccgaggatcatcagtactactgcggtaatcagccccagccagccacccatcatcgcgccacgcgtggtcagtttcgaccagtacatagaaagcagaatgatcgggaagttacagctcgccgcgatggcaaacgccagccccaccataaaggcgatgttctgattctcaaacagcacgccgaggataatcgcaatcacgccgaggatcagtacggtgatttttgatacccgcagctcttcacgttcggtcgcgccttttttgaagacgttagcgtacaagtcatgcgaaaccgcggatgcgcccgccagcgtcagacccgcaaccaccgcgaggatagtggcgaaagcaaccgctgaaataaaaccgaggaacaggttgccgcccactgcattcgccaggtgaacggccgccatgttgttaccaccaatcagatggcccgccgcgtctttatattccggattcgcaccaaccagcatgatcgcgccgaagccgataataaaggtcagaatatagaagtagcccataaacccggtggcgtagaacacgctcttacgtgcttcgcgggcatcgctgactgtaaagaagcgcatcagaatgtgcggcaagcccgccgtaccaaacatcagtcccagacccagagagagcgcggagatcggatctttcaccagcccgcccggcttcatgatgtcgacccctttcgggtgtaccgccatcgcttcgctgaacagattgttgaagctaaagccaacgtgtttcatcaccataaaggccataaagctggcaccgaacagtaacagcacggctttaataatttgcacccaggtggtcgccagcatgccgccgaacaggacatacatcatcatcagcacgccgaccagcaccaccgcaatgtgatagttaaggccaaacagcagctcgatcagtttacctgcgcctaccatctgagcgataaggtaaagcgccaccaccaccagagaaccacaggccgaaagaatacgaatcggcccttgtttcaggcggtaagaggctacatcggcaaaggtgtagcgtcccaggttacgcagacgttcggcaatcaggaacaaaatgatcggccagcccaccaggaagcccagcgagtaaattaagccgtcatagccggaggtaaacaccagtgcggagatccccaaaaatgaggcggcggacatatagtcaccggcaatcgccagcccgttctggaagcctgtgatattgccgcctgccgtgtagtagtcgctacgagaacgtacgcgttttgatgcccagtaagtaatgccgagcgtaaacacgacgaaaatcaggaacataataatcgcctgccagttcgttggctggcgctctacggccccgctaatagcatccgcggcgttagctgcgaaagggagtgtggcggcaagcgccgtcagaactcttttcatgatgcttgtacctcatgcaggacttcgttattaagacggtcgaattcgccgttcgcccgccagatgtagataccggtgagaacaaaggagatcacaatcactccaacaccaatcggaataccgcgtgtgacgctggtgttcggattcagcggggtgcccagccagccgggcgcgaaggcgatcactaaaataaagccgatataaactgccagcataataatcgacaggatggtggcaaaccgttgccgtttttcgactaactccctgaaatgcgcattgtcttctatccgctgataaatcgtaccattcatcacagattctccagaggtaatgtagggattgttttaattcccgctcccttatgggagaaggttaacgctcgggtaacccttgccgaatgtaggccggataaggcgttatacgccgcatccggcaatcaatgcctgatgcgacgctgtcgcgtcttatcaggcctacaaaccgttaccgactcgcatccggcaattgtggattacgatggcatcgcgatagcctgcttctcttcaagcagcttctcgactacgccaggatcggcaagcgtcgaggtatcgcccaggttgctggtatcgcccgccgcaattttgcgcagaatacggcgcataattttgccggagcgggttttaggcagggagtcggtccagtgcagcacgtctggcgtcgccagcgggccaatctctttacgcacccagttgcggacttctgcgtacagttctggtgacggttcctccccgtgattaagcgtgacgtaggcgtagatcgcctgacctttaatattgtgcggaatacctactacggcggcttcggcaatcttcggatgcgccaccagcgccgactcaatctccgccgttcccagacggtgaccggagacgttcagcacatcgtccacacgcccggttatccagtaatagccatcttcatcgcgacgcgcgccgtcgccgctgaaatacatatttttgaaggtggagaagtaggtctgttcaaaacgttcgtgatcgccaaacagcgtacgcgcctgacccggccaggagtcggtgatcaccaggctgccttcggtagcgccttccagcgggttaccttcgttatcgaccagcgccggttgcacgccgaagaacggacgtgttgccgaaccggctttcagctcggtagcgccaggcagcggcgtgatcatgaaaccgccagtttcggtctgccaccaggtatcgaccaccggacatttctcgttgccgatttttttccagtaccactcccacgcttccgggttgattggctcgcccacggaaccgagaatgcgcagcgacgatcggtcggtgccttcaatcgctttatccccttccgccatcagcgcgcgaatcgccgtgggcgcggtatagagaatattgacctgatgcttgtccaccacctgcgccatacgggcaggcgtcggccagttcggtacgccttcaaacatcagcgtggtcgcaccgcaggccagcgggccgtacagcaagtaactgtgtccggtcacccagcccacatcggcggtgcaccagtagatatcacccggatgataatcaaagacatatttaaaggtcagcgccgcgtacaccagataaccgccggtagtatgcagcacaccttttggcttaccggtagaaccggaggtgtagagaataaacagcggatcttcggcgttcatctcttccgcctggtgctgatcgctcgcttgctcaaccaggtcgtgccaccacaggtcgcgcccttcctgccagtcaattttcccgccagtacgcttcagtaccaccacatgctctacgctggtgacgttcgggtttttcagcgcgtcatcaacgtttttcttcagcggaatactgcgcccggcacgcacaccttcgtcggaagtgatcaccagtcgtgagttggaatcaataatgcgcccggcaacggcttccggcgagaagccgccgaaaatcaccgaatgcaccgcgccaatgcgggcgcaggccagcatcgcaaccgcggcttccggcaccatcggcatataaatcgccaccacatcaccttttttaatgcccagctcgagcagggtattggcgaagcggcagacgtcgcggtgcagctctttatagctgatatgtttgctctggctggcgtcgtcgccttcccagatgatggcggtacgatcgccgttttcttgcagatggcggtcaaggcagtttgccgccagattcagcgtgccgtcctcgtaccatttaatggacacattaccgggggcaaaggaggtgtttttcaccttctggtaaggtttgatccagtcaagaatttttccctgttcgccccagaaggtatcaggtacgttaatagattgttgatacatcgcctcgtactgctgagggtttatcaggcaacggtctgcgatgttggcaggaatggtgtgtttgtgaatttggctcatgcttttgttctccttgtaggatgttaataatatgtggcataagcgttaaatgtaggggtattggcagttttgtttagtatttgggcgacagatcacgcaaaagtagaattgtgcaaataaacggcagggtaatttttgaaggtcagcaacaaaagttgattaattctttgaggaacatgcagttatgcatgctgttgaaaaagaggaagatactgactaactctaaagtggtattttacatgcacttacaattgattaaagacaacattcacagtgtggttatttgttacacataggggcgagcaatgtcatgacagtgtaggtgcggttactgtcgtgaaaaacaataaaaaccgccattgcaacaatggcgcaattcggatgaagcccctatgacaaggataaaaataaacgcacgccgtatcttcagcttattgattccttttttctttttcacttctgttcacgctgaacaaacggctgctcccgcaaaacctgtaactgtggaagcgaagaatgaaacctttgccccgcagcatcccgatcaatatctctcctggaaagccacctcggaacagtcagagcgtgttgacgccctggcggaagatccacggctggtgatcctgtgggcggggtatcccttctcgcgcgattacaacaagccgcgtggacatgcttttgctgtgaccgatgtgcgtgaaaccctgcgtaccggtgcgccgaaaaacgctgaagatggtccgctaccgatggcatgctggagttgtaaaagcccggatgtggcgcgtctgatccagaaagacggcgaagatggctacttccacggtaaatgggcgcgcggcggtccggaaatcgtcaacaacttaggttgtgccgattgccataacaccgcctctccagagttcgccaaaggcaaaccggagttaaccctttcccgtccgtatgcggctcgcgcgatggaagccattggtaaaccttttgagaaagccggacgtttcgaccagcaatcgatggtttgcggtcagtgccatgtggagtattacttcgacggcaaaaacaaagcggttaaattcccgtgggatgacggcatgaaagtcgaaaatatggagcagtattacgacaaaattgccttctctgactggactaactccctgtcgaaaacgccaatgctgaaagcgcagcacccggaatatgaaacctggacagcgggcattcacggtaaaaacaacgtgacctgtatcgactgccatatgccaaaagtgcagaacgccgaaggcaaactctacaccgaccataaaattggtaatccgtttgataacttcgcccagacttgtgcgaactgccatacccaggacaaagctgccttgcaaaaagtggtcgcggaacgtaagcagtcgattaacgacctgaaaatcaaggttgaagatcaactggttcacgctcacttcgaagcgaaagcagcgctggatgcaggcgcgacggaagctgaaatgaagccaattcaggacgatatccgtcatgcccagtggcgctgggatctggcgatcgcttcccacggcattcatatgcacgcaccggaagaaggtttacggatgctcggtacggcgatggataaagcggcggatgcacgcaccaaactggcgcgcctgctggcgaccaaaggcatcacccatgaaatccagatcccggatatctcaaccaaagagaaagcccagcaggccattggcctgaacatggaacaaatcaaggccgagaagcaggacttcatcaaaacggtgatcccgcagtgggaagaacaggcacgtaaaaacggtctgttaagccaataaccccgttccgcctcgcaaggggcggaaaacacaatggagtgaatatgagcgtattacgttcgttattaactgccggggtgctggcgtcgggcctgttgtggagcctgaacggaattaccgctacccctgcggcgcaggcatctgatgatcgctacgaagttacccagcagcgtaacccggatgccgcctgtctggactgtcataaaccagataccgaaggtatgcatggaaaacatgcttccgttatcaacccgaataacaaactgccggtcacctgcaccaactgtcacggccagccatcaccgcaacaccgcgaaggggtgaaagatgtgatgcgctttaacgagccgatgtacaaggttggagagcagaacagcgtctgtatgtcctgtcatctgccggaacagttgcaaaaagcgttctggccgcacgatgtccacgtaaccaaagtggcgtgcgccagctgccattccctgcatccacagcaagatacgatgcagacgttaagtgacaaaggacggattaagatttgcgtcgattgccacagcgatcagcgcaccaatccgaactttaacccggcgtctgttccgttgcttaaggagcagccatgacctggtctcgtcgccagtttctcaccggcgtcggcgtgctggcagccgtcagcggcaccgcagggcgcgtggtggcgaaaacgttgaatatcaatggggtgcgttacggcatggtgcatgacgagttgttatgcatcggctgtaccgcctgtatggatgcttgtcgggaagtgaacaaggtgccggaaggcgtctcgcgcctgacgattattcgtagcgagccgcagggcgaatttcctgatgtgaaatatcgcttcttccgtaagtcttgccagcactgcgatcatgcgccgtgcgttgacgtctgcccgaccggtgcgtcttttcgcgatgctgccagtgggattgtcgatgttaatccggatctctgcgtcggttgtcagtactgcatcgccgcctgtccgtaccgcgtgcgctttatccatccggtcacgaagacggcggacaaatgcgatttctgccgtaagaccaatttgcaggccggtaagttgcccgcgtgcgttgaagcttgcccgaccaaggcgctgacgtttggcaatctggacgatcccaacagtgagatttcgcaactgctgcgccagaagcccacttaccgctacaagctggcgctgggaaccaaaccgaagctgtaccgcgtaccgtttaaatacggggaggtgagccaatgacgcagacttccgcatttcattttgaatcgctggtgtgggactggccgattgccatctacctgtttttgattggtatttctgctggtctggtgacgctggccgtgctgttacgtcgcttctacccgcaggcgggcggtgcagacagtacgttgctgcgcaccacgctgattgtcgggccgggcgcggtgatcctcggtctgttgatcctcgtcttccacctgacaagaccgtggaccttctggaagctgatgttccactacagttttacctcggtgatgtcgatgggggtgatgctgtttcagctctacatggtggtgctggtgctgtggctggcgaaaatctttgaacatgatttgcttgccctgcaacaacgctggttgccgaagctggggatcgtgcaaaaggttctgagcctgctgacgcccgttcatcgcggactggaaacattgatgctggtgctggcggtgttgttgggggcttataccggctttctgctgtcggcgctgaaatcgtatccgttcctcaataacccgatcctgccggtgctgttcctcttctccggcatctcgtccggtgcggcggtggcgctgatcgccatggcgatacgccaacgcagtaacccgcattccacggaagcgcagtttgtacaccgtatggaaatccctgtggtatggggtgaaatcttcctgctggtggcgttttttgtcggtctggcgctgggcgatgacggtaaagttcgtgcgctggtggcggcattaggtggcggtttctggacgtggtggttctggcttggtgtcgccgggctggggctgattgtgccaatgttgctcaaaccgtgggtcaatcgcagttccggcattcctgccgtgctggcggcgtgtggggccagtctggtcggcgtgttgatgctgcgctttttcattctctacgccggacagttgacggtggcgtaagccagaaaagaggtggtttctggacgtattccttcctgaagtcggttttctggcgttgttgttaagtctcggggtcaacgtgttgaccccgttgacggcctttgcgggagtgcggttgcgctggcctgccatgatgcgactcacttgcatcggcattctggcgcagttcgcgctcctgctgctcgcctttggcgtactgacgtattgttttctcatcagcgatttctcggtcatttatgtcgcgcaacatagctacagcctgctgtcgtgggaactcaagctggcagcggtgtggggcggccatgaaggttcgctgctgctttgggtgctgctgctttccgcctggagcgcgctgtttgcctggcattatcggcagcaaaccgatccgctatttccgctgacgctagccgttttatctctcatgctcgccgcactgctactgtttgtggtgctgtggtccgatcccttcgtgcggatatttccaccagcaatcgaaggccgcgatctcaatccgatgctgcaacatcccggtcttatctttcatccaccgctgctttatctcgggtatggcggtttgatggtggcggcgagcgtggcgctggcgagtttactgcgcagcgagtttgatggtgcctgcgcccgaatttgctggcgctgggcactacctggctggagcgcattaacggcggggatcattctcggttcctggtgggcctattgcgaactgggctggggcggctggtggttctgggatccggtggaaaacgcctctttattaccctggctttctgccactgcgctgctgcacagtttatctctgacacgtcagcgggggattttccgccactggtcgctgctgctggcgatagttactctgatgctgtcgctgctgggcaccttaattgtccgttctggcattctggtttcggttcatgcgttcgcgctggataacgtccgcgccgtgccgttgttcagcctgtttgcactgattagccttgcgtctctggctctgtatggctggcgagcgcgggacggtggcccggcggtgcgtttttcggggttatcgcgggaaatgttaatcctcgctacgctgttgctgttttgcgcagtgctactgatcgtgctggtgggaacgctttatccgatgatttacggcctgctgggctggggacgcctctccgttggcgcaccttattttaaccgcgcgacgttaccgtttggtctgttgatgctggtggtgattgtgctggcgacgtttgtctctggcaaacgcgcgcagcttccggcgctggtagctcatgcgggcgtgctgttatttgccgctggggtcgtggtttccagcgtcagccgtcaggaaatcagcctgaatttacagccgggtcagccggtgacgctggcaggatacaccttccgttttgagcgcctcgatctgcaagccaaaggcaattacaccagcgaaaaagcgatagtggcgctgtttgaccatcagcaacgcattggtgaattaacgccggagcggcgtttttacgaagctcgtcgtcagcaaatgatggaaccgtcaattcgctggaacggcatccatgactggtatgcggtcatgggggagaaaactgggccggatcgttacgcttttcgtttgtatgtacaaagcggtgtgcgctggatctgggggggaggattgttgatgattgcaggcgcattattaagcggatggcgggggaggaagcgcgatgagtaaaggacttctcacgctactgctgttatttacctgttttgcgcgcgctcaggttgtagacacctggcaattcgccaatccgcaacaacaggaacaggcgttaaatattgccagccagttacgttgtccgcagtgccagaatcaaaacttactggaatccaatgcgccggtggcagtcagtatgcgccatcaggtttacagcatggtggcggaggggaagaacgaagtcgaaatcattggctggatgaccgaacgctacggagattttgttcgctataacccaccgttaacgggtcagacgctggtgttatgggcgctgccagtggtgttgttactactgatggcactgatcctctggcgagtgagggcgaagcgatgaaacagcccaaaataccggtgaaaatgctgacaacactcacaatattgatggtatttctctgtgtcggcagttatctgttaagcccaaaatggcaggcggtacgtgcggagtatcagcgtcagcgcgatccgctacatcagtttgccagccagcaaaccccggaagcgcagcttcaggcattacaggataaaatccgcgctaatccacaaaacagcgaacagtgggcgttactgggcgagtactatctgtggcaaaacgattacagcaattcgctgctggcgtatcgtcaggcgttgcaactacatggtgagaacgctgaactgtatgcggcgctggcgacggtgctttattaccaggccagccagcatatgaccgcccagactcgcgcaatgatcgacaaagccctcgcgctggactctaacgaaatcaccgctctgatgctgctggcttccgatgcgtttatgcaggcgaattacgcgcaagccatcgaactatggcaaaaagtgatggatctcaactcaccccggatcaaccggacacagctggtcgagtcgattaatatggcgaaactgttgcagcggagatcggattaatcatctggtgatgaagattatgtcattgagctgcataaaaaataatcgaatgaacatatgccaaaaataatcactaatcagtattattgcagattaaacaaataaaaatctttccataacaaatggttattcattaatcctgccataaactcgcgttattatgcattaatgcagcgaaaagctctgttgttaaagggttgcgcaacataccgcgcaaatgatactgatcataagcgttaaaaaaatctacaaaccaacgcaacacaattcatgccctggcagtatgtcacgttctcgcgtttctgaacggggaacggcgctccattgaggaagtcattcatatgaaaaatataaaattcagcctggcctggcagattctgtttgctatggtgctgggcattctcctgggaagctacctgcactaccatagcgacagccgcgactggctggtcgtcaatttgctctctccggcgggtgatatcttcatccatctgatcaaaatgattgttgtgccgattgtgatctccacgctggtggtgggtatcgcgggtgttggtgatgccaaacagctcgggcgtattggcgcgaaaaccattatttacttcgaggtgatcaccaccgtcgccatcattttggggatcactctggcgaacgtcttccagcccggtgccggggtggatatgtcgcagctggcgaccgtcgatatctcgaaatatcagagcactacggaagcggtacaaagcagttcccacggcattatgggcacgattttgtcgctggtgccgacgaacattgtggcgtcgatggcgaaaggcgaaatgctgccgatcatcttcttctcggtgctgtttggtctggggctttcctccctgcccgcgacgcatcgtgaaccgctggtgaccgtgttccgctccatctctgaaaccatgtttaaagtgactcacatggtgatgcgttatgcaccggtgggtgtgtttgcgctgattgcggtgacggtggctaactttggtttctcttctctgtggccactggcgaaactggtgctgctggtgcatttcgccattctgttcttcgcgctggtagtgctgggaattgtggcgcgcctgtgcgggttaagcgtctggatcctgattcgtattctgaaagatgagctgattctggcgtactccactgccagctctgaaagcgtactgccgcgaattattgagaagatggaagcctacggagcaccggcgtcgatcaccagcttcgtggtgccgaccggttactcttttaaccttgatggttcgacgctgtatcaaagtattgccgctattttcatcgctcagctgtatggcattgacctgtccatctggcaggaaatcattctggtgctgacgctgatggtgacctcgaaagggattgctggcgtgccgggagtgtcgtttgtggtgttgctggcaacgctgggtagcgtaggtattccgctggaaggtctggcgtttattgccggtgttgaccgtatcctcgacatggcgcgtactgcgctgaacgttgtgggtaatgcgctggcggtgctggtgattgccaagtgggaacacaaatttgaccgcaaaaaggcgctggcttatgagcgtgaagtgctgggtaaatttgataaaactgcggatcaataattgaagattgccggggatatccacccggcaatgtgtggatgcctgatgcgacgctggtcgcgtcttatcaggcctacgccagacagcgcaatagcctgatttagcgtgattttgtaggtcggataaggcgtttatgccgcatccgacatcaacgcctgatgcgacgcttaacgcgtcttatcaggcctacgccagacagcgtcaatagcctgactttagcgtcgattttgtaggtcggataaggcgtttacgccgcatccgacatcaatgcctgatgcgacgcttgccgcgtcttatcaggcctatcttaaccgttggttaatttttcaaactcttcacacccggtatcaaacccttccatacagctcaggttcaaccagtgcagcgccttttgcttgttcttctcgataaaaccttcttcaccgtttaagaacatcattcccgcccagtactcggaataaccggttcgggaaattgcagagctgcgtttgaaataccaggttgccttgtcatcgtcggccttaatgcccacgccgttggcgtaaatcaaaccaagcagcatttgggcatcgacggcagagtcgttctccagatcttccgaggcgttttctaacagcgaaattgcctttggataatccggtttacccgcttgagtatttaccagaatatgcgccagcgttacttcaccttctttactgcccgcttgcgccgctttctctgcaagaacttttgcttgtggatagtccagactgaccggattggtgattttgatctgcgccagcagcgcgcaggcatcagcatcaccgctgtcggcggctttctgtgcccaatattcggctttgctcaaatcgccggagctaaaccagctgtcggcaagaaaatattgtgcgcgtcggtccccggcctctgctgcctttaaatactggctgccaggctcggagtcgttggcgtgggcaaagaatgtcaaaaacaacatcaatgcgataatttttttcattttgataatacgattgggtagggagtaaccagtataaagagttcgaatggataaaaaaacagcctccgaaaggaggctgtagaaaggacggtattacgccagtgccgcttcgcgcaggcgagttttcaacttgttgtactcgtcaatcacgtactgctcggcggcgcgctgatcggcgatcggctcgacgcgcacggcgcagtatttgtattccggcgttttcgtaatcgggcttaagttttcggtaaccagctcgttacaggcaccaatccaccactggtaggtcatgtaaatcgcccctttgttcggacgatcgctgacctgcgcacgggtgataattttgcctttacgcgagtgcacccaaaccaatgcctcatcttcaatacccagacgtttggcgtcttcggtattgatttgtgcgtagccaggttcatcagccagcgccgccagtgccgcacagttaccggtcatcgaacggcaagagtagtgaccaacttcacgcaccgttgacagtaccatcgggtactcgtcggtgagtttgtcgattggcgctacccagtcgcaggtgaagaactgcgccagaccgttcggggtatcaaacttctctttaaacagataagaagtcccctgatcggcatctgaagtatcgcggcaaggccactgaatgaagcccagttcgcccattttctcgtaagtcgcaccgtagaaatccgggcacagatgacgcaactcatcccagatctcctgggtgttgttgtagtgcatcggataacccatacgggtggcgatttcactgatgatttgccagtccgttttcagatcccatttcggttcaaccgccttgaagaaacgctggaagccacggtcagccgcagtaaacacgccttcatgctcgccccacgacgttgacggtaaaataacatccgccgccgacgcggttttggtcataaagatgtcctgaacgataaccagttccagatcttcaaaggctttacgtactgccgacagctccgcgtcagtttgcagcggatcttcgcccataatgtacgcggcacgcacttcgccatgcgctgcgcggtgcggtagctcgctgatgcgatagccggtatgcgctggcaggctttccacgccccaggctttggcgaatttctcgcggttagccggatctttcacgtactggtatcccggatacgtatccggcagcgcgcccatatcgcaggcaccctgtacgttgttctgaccacgaaccgggttaacacccgcatgtggcttaccgaggttaccggtcagcatcgcgaggctggtcagagaacgcacggtttccacgccctggtagaactgggttacacccatgccccacaggatggcggcgcttttcgcctgggcatacatccgtgccgcctgacgaatctcactggcgctgacgccggtgatatcttcaaccgactccggcgtgtagccttcaacgattttacgatactcttcaaagccttctgtacgggaagcgacgaatgctttgtcgtacaaattttcttcaataatgacatggcccatcgcattcaacagcgcgatgttcgagccgtttttcagtgcaatgtgcatgtcagcaatgcgcgcggtttcaattttgcgcggatcgcagacgataattttcgccccgttacgtttagcgttaattacgtgattcgctacgattgggtgggaatccgccgggttgtacccgaaaacgaacactaaatcggtattatcaatttcgttaatagcattgctcattgcgccattaccgaccgattggtgcagacctgcaaccgatgggccgtgtcagacacgagcgcagcagtcaacgttattggtaccaataacggcgcgcgcaaatttttgcattacatagttggtttcgttacccgtaccacgcgaggagccggtcgtctggatggcatccggaccgtacttctctttgatggcgctcaggcgctcggcaacgtaattcagtgcctcatcccaggaaacaggttcgagtttgccgccacgctggcgacggatcatgggggttttcaggcgcggggtcaggatctgggtatcgttaatgaagtcccagccataataacccttcagacacagggtaccctggttggttttcccctgcgctgcctccgcccggacgattttgccgttatcgacgaccaggttgattttgcaacctgatgcgcaataggggcaaaccgtgacgacttttttcatcggtctcgctccagttaatcaaatcacgcatacgcgctctcgactacagtatgcatcttttatgccacattttatgtggggtcattccctgatattacgggcactatttattcaaaactctgacgaaaaacaggctgtcgtcagttttgacgtgacgaaacgaaataccgcgtgacagccatcacgcggcagacattttattttttctcgacgacgggacctgcctgatacccgccgcccagcgatttcatcaactgaatgctttggatcacccggcggctgtccagcatcagtaatgacatctcttcggcaagcactggcaaccgggcttcggtggcctgtaagcggctggttaagccgcgctgataggcggcctcggcagcgcgctgggtaaagcgcgtggcttccacgcgttcagcctgcatttctcgctcgtcgttgagcgtttgcagacgcgtgccgttgacggcaacgtcacgcaccgcgttcagtactgactggttgtaacgttcaatcatcatgttgctggcggcgcgcgtgccttcgagattggcattcaaccgtccaccgtcaaacagcggcaatttcagacccgggatgaagttgaactggcgactggtttttttgaataaggtatgcagatggatggagtccagaccgaaaaacgctttgatatcaaagctcggatagaacaacgcccgcgcggaatccacctgatctaatgacgcctgaacataccagcgcatggcttgcagatccgggcgtctggcgagcaactcataagagagtgtcgccggaatgccggtctggacttgcggtaatgccaccggtctgatctccggcatatcgctggctcccgcgccaatcaatgcacgcagagattctcgcgtttcggtgatttgccctttgacggcaacaatttgtttatcgaccgccagaatctgtgcccgcgcgccgtggaaaggcacttgcgcttccagaccgtgcgccactttactctggtgcgctttcaccgcgtaatcaatcacatcgtgagtttgttctaacagatcgagcatctgatagctggcctgcatactgtaataaagctgcgctacgcccgtggccagcgatagctctactgctgcggtttctgccagcgcggcattatgcgcgccaatggcggcggcaaccgctgagcgatgcacaccccacaaatcaagatccagtccggcaaacaaacctactgtggcttccgtatagtacggcccgtccatacccagtgctggcgcatccattgaataagggcttaaaaagccgttcgccgagacacgttggcggttgagcatccctaacgctgcgacctgtaattgtgaaccggcatctaacaaatcggcctgggactgcgctttttcttcccgcagtttcgcttcggcgagggtgtgtgaaccacttagcgtccgttggatcagcgcatccagctgcgggtcattgagttgtttccaccactgcgcctgcggccagccggagctggcaagatgaatatcgtcggccagtttgatttgttccggtttgagctgttgatgaggtgcagaatccttacgtaccagggcacagccggaaatcagcgtcgtgctgccgagaatgctgcacaacagcagacgtgaaagttgacgattgatcattgcgtggctccttgtgcctgttccgtggcgggcgttaatgccggggctgtccagtctggcaagcgggcgaaaagctggcagacgtgttgctcctgttttaataaggtgggcaggatggcctgagaggcgggtgtctcttcaagcgttatttgaggagaacggctgagtgcggttgccagaccggcagcgtatttctccagggcgtcggcaaactgacctgctctgtccggctgtagtgcgttatccagcgcctgcgccgagttccaggtggcatcccaggcgtgaagaagatcgcggccctgacgaataaccgtttgcgaacgttcaatcagtaatgcgcgttcttcgctgtccagttgacgctccagcgccacgcgttggcacatctcttcacaggcattaaacgccgcatgcagaccgatacgaatttgcagataagtgcgcagagccgtgacttcctgctggcgtgggatccgcattactttacttaacatacccagcgtgccagccagtttttgcggcagtgtgcgcgcttcactttcaggccagacaaaggtgtaaatcaccgcggacaccacggtaccaatgatgatacccagggcgcgatcgcgaatttccaccaggtcgtacactgggccaaaaacgttttcgagcgtggcgagcgcgaaggtgaccaccatctgtgtgccgatataagaagagcgttcagagctggtggcaatccatgcgcccaacaggaaaatcggtgccagcacaaacagcaattcgacaatattgtccagccagggcatgaccagtagcgtgaataacagcgccagaatcgcgccgcaaaaggccccgccaaaacgcagcaccatcttctggtacgacgaaccgacatttgggttagcgacgatcacgcatgtcagcatacaggtgtgaatgccttcccagtccacgccgctgtaaaaggtgtaacagatcaaacaggcgagcagcgtttttaccgcgtagcgcatatagtctggattggtaaaagcatcggcggccattgatggcggtttggctgcgggcgttggcggcgtattcgggtccatctgacccagttgtaacaacgtctggcagatattctccaggttacattcccgtgccgccatcgcttcactttcactgatccgccagtcgctttgccagcactgaccttcagcaacggcatgctgcagcttgttgatttctgaagctaatttttgtcggaattcaataattgcctgagaatcagcaaaagaggtgggatcgtagcgattcagcgtcgagtaaatgtaggttaccgttgccacgcagctttgccaccatgcgttttgagttcgccagttggcatcgtccgcgaggcaaaagacattgagtttttgtagcgccagcgcctctctttcaatccgcgtttcgggtagcggtgcgaggctgtctgtcaggtgactaatggcatcatcaagccgatcattaagcgcctgatgcatttgcgaaatggcacgactgggaaaccacagcacgccgattaacgtcatcagcaaggttggatagaggccaacaacgatacaccacagcgttaagcgcacgaccacttccggatagtcgagcatggcggggaaggtttgcccgtaaatagcgacaatggcgacggcgaaaaagaccagccccaagcgatgggtgcgcatcaaaaacatgcagcccatcaggatcggtccggcgatgatcaatcggatcaacggttcgccgtatgaccatttgtagatcaaaaacaggctgccgatctccagcaccgtggcaaccacaaacaagatcgcgacaaatttggtgtaaaacgcgttcgactgaataccgtaaaacagcactgccagcgataacgccacaaaagggatctcaaaggtcatcgagatcagaatcaccagcaggcagcctacccagagttgcacggtctgcggcacgcgacctggtcgccgctcgcttaactcttcatgaaagaacgccagcagcctgaccaccggtaatggcagggagttgagcgcgctcattattgcggctcaagattagcgactgccgaagcgccgatgcggaacatttccgggtcaggtttatcgaccatgattttgaccggaaaacgctgggcaacgcggacccagttaatagaacgagacactttcggcaggccgcccagcaccaggccgccgtcatccggtagcacgccgtagccaatcgaatccactttaccctcgaaggttttgccgctgtcactcatcaggcgaatcgttgcgggtgtacctgagcgaatatttttcagatcggtttcgcggaagttggcgatcacataccagtgacgagtgtcgattagggtaaaaatagggcgcatggcagaagcaaattgcccgacggaggttttgagggaaatgacccggccatcaaacggcgcgcgaacggtcgccatttccagatgcagtttggtcagggcaatatccgcttcgaccgccgcacgctgggcaactaatgcatccacgccgctgacggcgctggcggctgactgcgcctgtaacaatacggcattaagatccgcttctgcggcgcgctgcgccgttcttgcacggtcaacatcttccgctgagacaaaaccttctttcagtaatggctcggtgcggcgtaatgtatctgtggcctgtttcgcggcggcacgggctttttctaccgtggcattaaccgagtcggcaccaaactgttgcgcgtcaacgctacgctgggtgagcataatttgcttatccagcgccgcgagggaggcttcagctttcgccagattggcttcgtacgggcgcgggtcgatgcggaacagcaaatcgccctgtttgactgcctggttgtcggtgaccgccagttctacaatgcggccgctgacttccggtaccacatcaatggtatctgctgacgcgtaagcgtcattagttgatggcgcactgtctacgcgccagataacgaaaacaagggcaaccagcgccaacgcaaccactaacagagcagggaatttactgcgaggagcttttttcggcgtactttccatgagcgcgtctcaaatagattagaaaaatgccagccagaacagcatggcgtagagagcaaaaagggcggtataaataattccgacaaatgccagattgatatttgcccgctgaataactcgcctcgtgatgagcctcaaaataaggctggcaatggcgcagaaaaaccagctgggataataagcgccgatcaccgggattgccggagataatgagcatcccgaaaccatgaagacgggaattatccaggctgtttttttgagttgcatcgccatgcgagagagaactgttggcatattaaatacatcctgtctgctgcgaacaatatctgtagtgaatatcaatatccattgaaggcgtcagtatggctattttcttgatgaataaaaatagctttattcagccaccgcattcataacttatatattttatgtattaattggttgtatatatttttaaaataaatgcttttgggggcttcagcgcccccaaaagcgagtggcattaatttggggttacgatattcacccacaaatcgaaattatccagacaggcaataatttcttccagtttagcgccattgccaataattttggctttcttcgcttttaccagatccgccatttttgcctgtccggtcagcacggcgtgcagatcttcacggctgatgtagaaagaggcgttggcttgcggttgcagcgttttccggtagttaagcacactatcgttcagcgtcaggttgaggttatcgccgttgcccatattgaagttcaggctgatatttttacccgcggctttcgcgctatcgaggcgaacggacataaagtcgaacagcatttcgaccgacatcccgcgaatggtgtccggggaaccggtggtgccgtggctgaacttatgcaccccttcgcgcagctctttcgcgccggtcaggtagaaaccgcgccaggtggcggactcggcctgatagcccagctgttcaaagttattcgcttgcagattcttcgcgacctggtcacccgggttggcggcaatcacctgtttcagcagttctgccgaccagcggtaatcaccttgcttgttcgcttcttgcgccaggttgatgacacgggcagaaccgcccagcgcctgcacgtaacgtttacccatctccacctgaccatacggatgcaggttagccgggttaccgtcgtaatagccaagatagaagttatacaccgcgcgggcgttgtggctgacagaaccgtaatagccacggctggcccagttattggcaagtgcaggcggcagcttaatcatgtcgccgatttcattcatggtgtagccctggttcgccaggtgcagggtctggtcgtgaatgtacttgatagtatcgcgatatttaccaatataatcattgatatgcttattgccccagaccggccaggtgtgcggcataaacaggacttccgcgtcgttaccccacatatccagcgtttcgttcagatactcggtccacttgctggtgtcgcgggttttcgcgccgcgtagagtgtagaagttgtgcagggtatgcgtggcgttctcggcggtacacagggctttcagggccggaatatagaagtgcatttcggctggcgcttcgctacctggggtcatcaggaagtcaaactccaggccgtcgataatcatcttctcgccagttcggacgatagttttagtcggtgcaataatgctcgggtcgcccgttgccagcgtcacgccaaggccattacccacgttgccttgcgcgttgtgcggcagtaacagaccgtaagagtagagcgcacggcggctcatgatgttacccgccagcacgttttcgctgatggcttcgtccataaagcctgcaggggcaatcacctgaactttgccggatttaacatcggcttcagagataatgcctttcacgccaccatagtggtcggtgtggctgtgagtgtagataacggcaacaatcggtttttgcggacgatgctggaagtaaaggtcaagtgcggcttttgcggcaggcggcgtcaccagcgggtcgataacaataatgcctttctcgccctcaacgaacgtaatgttagagatatcctggccgcgcacctgatacattttatcggtgactttgaacaggccagaaataccgttgatttgcgactgacgccacaggctggggtttacggtttccggcgctgtggcattaatatcaaatttgtaatcgtccgcgcggtagtaaactttaccgttcgcatcacgcagaataccttcatccagcagcggggcgataaatccacgctgggcatcgtcaaaatcctgacgatcgctaaacggtaatgatttggcgtaattctgattaacctgttgggtatattgagtggcggctttcgcttcctctttcgcgttagcggtatttaccatcatgccgctggcggcagttaacgcaataacaatcctgctcaaacggaataaccgagagttattcatataaatctccatttatcatttatgtcgtaaatatgtaatccatgcaaaatacgtcatttaaagctggcgttatcataattgggaaattgcgactttaataagtggaagtgtgagcggaacgcgccattttattaggcatttgtgctgaagagggaaaattacagtaaaactatcattgcagaaaataatatgagtcgttttatgtgtttattatatatattgtacctgtcgttggcacagtgggacattgcgctactgtgccaacgttttactcatggggctttagcacagaactgtggcaaaaaacgttgatgcgccaatattgctgcaccctgagcgccattaaagtcagaagatgaggcggcaataaagcgcacgacctgatgcggcagtggacggcgcaggtacttttgggtcatggcaacgagagtctcgcgtgggaaggcgggcatatccatcacgccaccgcccaggatcaccgcatcgggatcgaacagattaatgctggtggcaatggcccgtgccgcgttttcaagcagactctggacgaaaggggcgttttccgcatggacgaaaagatcgcgcaatgggtaatttcggggctgttgttcgtaccagcgtcttagcgccattccagagcaattggtttccaggcacccaggattgccacacgcgcagtgttgggtcatatctcccagggggatatgacccagttcgcctgccacaccgtgtgcacccgtccacggcgcaccgttcatccacactgcgaaccccatccccgtaccgagataggccgccagaaccagttgttgcgtaaggcggttttctactacgtcccaggagagttgcaggttaacgtcgcgggaaaactcaaccggacaattcagcgtattttcgagcttatcggcgagatcatataaatccgccgctgttaacggcaggttaggcgtagaaataatggtgcgtttatctttactgaccagcgccggaaatcccatcaccagaccatgacagcgagcgttaaagcgcctgagttgctcgtcaatcatttcgccgatacccgacaccaggccgggagcaatgacttctgcggtccgctttttttcgcagtgtagcgtttcaccttctgctgtccgcagacaaaagcggatatgcgttgcccccatatccacgcccgctacgacgttatgctgtttttgcatgaggctgtacctcgctttttgcagccagaatctgcgcggtcataattctccatgcttcgtcgatattttccgcatgattaaacaggccggaagtgccgacgataaagacatccgcccctgccgccatcagtttttcgtaagttgcctggttgcaggaaccgtccacctcaatttcgtactccagaccttctcgttcacgccatgccttcagttcggcaagtttatccagcatttcaggaatgaacggttgtccggcaaagccgggatcgacagtcatgaccgtaattttatcggccttatggatatagtatttcatggcctcaactggcgtctccgggttaaggatcagccccactttcatgtcatgacggcggatttcatcaatcaggcggaacgcctggccgttgatggtttccggatgcagagtgatgaaatctgctcccgcacgcgccagttgagcaatgtaatcctgcggccgcgtcaccatcagatgacagtcgagcggtttagttgccagttttttaacctgacttacgaagaacggtgagagtgtcagattggggacaaagtgaccgtccatgatatcgatgtggaagtaatcggcatggctgtcgataaattcgatctgttctttaaatttcagcagatccatacacattaacgagggggagattttcatgttcaattccttacttactgataagacggtcaagggcgacagccgcgataattaatccgcccatcaccaccagttggtaataggtttgtacctgcaaaatattcagaccgttgttgatggtgccgatgatcaacccgccaatcaccacagagaaaatgcgccccttgccgccgaagaaactggtgccgccaatgatggcgctggcaatggcataggtttcaaaacccataccggcaagcggttctgcggcaccgagtcgtgcagttgagacgacgcctgccagacctgcacaaacaccggagatgataaacaccaccaggatgtggaatttcacgtcaatcccggaatagaacgccgaatttttgttgccgcccagtgcgtagatgttgcgcccgagccgcatacgcgttgtcagaaaccaaaggatgagcgcgacaattagtgagaagataacggggacaggtatcccaattacgctggcggcaaagaagttcacgaagtcaaatgagaagccgtataccgagttggcatcggagatcaccagcgtgatcccacggaaaatcgcgttggtgccaagggtgatgatgaacgggtgtagccccgtccagttgaccaggcagccgttgatcgcccccagtgcgccgccaaccagtacaccgccaatcatcgctgcgagaaacgggtcaacacctgccaacatcagtttggcggtcaccataccggaaagcgccagaatcgcgccaaccgagaggtcgataccagcgaccaggatagcgaaaaactcgcccatgccgatcaataccgtcacggagctttgaacaaaaatctgggtaatattattggtggtcagaaaatattctggtgacagcgaaccaaagatggcgacgatgatcgccaggataaaaaaggtgccgtatttatcccagaacagcgcaaagttgaacggtttcttctcgctcgcttcgctttttactcttgtggtaaagcccatgccataatctcctcttcgctcatgtcatcgcgattcgtcaggatttgcgtcagtcgtccttcgcagaacacggcgatgcggtcgcagacggtgataatttcaggtagttcagatgacaccatcaggatgacttttccgtcgtccgccagttggcgcatcactttgtaaatttcggctttcgcgccaacgtcgatgccgcgggtaggttcatcgaaaatgatcacttccgggcaacagcacagccatttggagatcagtactttctgctgatttcccccggagagttcggtgatattctggtttaccgaatgacatttcagcgccagcagttcgcgttgattttcagcggtacgttgctcgtcaacttcatgaaacaagcccatcgcgcctttatagccgccgtctttcagactgcggctgatcgccatgttctgagcgatggaaaagttggggaaaaaaccgttatcccggcggctttcagtgatgtaagccatcccttttttcacggcatccaggggggaacgtggagagatatctttgccattaagacggatttctccgccagcgcgtttctcaacgccaaacaggcaattcatcagttcagtacgtccggaaccgaccagcccggcaaagcctaatatttctccccggcagacgctaaatgagatatcccggaccttttttctgtcacggctggtgacgttccgcacctcaaaaaccgtatcgtgcgcaaggttgctgacattctccttcatcgcgttaaaacggttttgcagttcgcggcctaccatcagacggacgatatcgtcatttgacacatcgctcaccatgccgctgcaaacgctgctgccgtctttcatcaccgtatagcggtcgcaaatacggcgaatttccgccaacttatgcgagatatagacgatggccgtaccctctttacgcaactgattcatgatcagaaacagatagtccacctctttattggtgagtgaggaggtgggttcatccatgatgatgactttggcatcgagcatcagcgttttggcaatttccagcatctgcttgtggctgatagataaattcgccactttctcatctaaatcaactttcaaacccacgcgtaataacatcatggcggcgcggacacgcatttctcgccagtcgataatattgacgccacagatttttttcgtcagatgacgaccaatatataaattttccagtacggttaattcatcaataacgctgagttcctgataaataatcccgataccgagttgtgccgctaatttatgatccagcttgttatagttaatgttattaatagtaatggtgcctttggtcggctcatgtattccggataaaaccttcattagcgtggatttacccgcgccattttctcctagtaatgcatgtatttcaccaggataaaccgttaaattaaccgactttaatgcgtgaaccggaccaaaggacttgccgatccccgccatcgatatatatggcgtggccataaataacctctctgcacgaaatatcgtattattgcctgatggctacgtttatcaggtctacgttcaggttattttgttggccggataagacacttcattagcatcatcatccggcatcattcagttttattgagtgaccaggattgaatcgaccagtttaaattccggtgctttatccagcggaataaccttgccggatttctcagcgtcaaccatcagcttcagacccgttgcgccaatatctgccgggttctgggcaaccgtcgcggtcatttgtccggcttccaccattttgcgggcttccggaattccatctgtaccgacgaccaatattttgcccgtttttccggcgtttgcgactgcctgagcaacacccattgccatcgtgtcattcgcgcaatagatcgctttaatattcggattacgttgcaacacgttagtggcgacatccagtgctttaatgcggtcccagtcggcaggctggctggcgacaagcttgatctggcttgcttttttgaaggcttcggtggcaccattacgacgcgcttcaccggaggcgttaccggctttaccctcaatgattgcgacttcaccaccttcagcgcccaatttgtcaataatgaacgacgcgcctttcgccccgacagcaacgttatcggtggtgacaaaaccttccacattgccgccagcttttttcagattatccatgtcgattttttcatcgagattaaccagataaatgccttttttccatgcgcgggcgacaggcatgaccagattcactgaggataatggagcgaaggcgatgcctttgtaatttttattactgagatcttcaaataactgcaattgagattgaaaatcgccttctgaaggagaggcaaaaatatcaacgctgacacccagcgtttttgcttcatcttcaatgccttttttcatatctatccaaaatgggttggagagcgttttcaatacgacagcatattcggcggcagcaaaagcgctggttgacaacattaagcccacgagtgtgccgctgaaatatttcagatatttattcataataatgttctcacggtaaggggacaggtaactccgcgatggcggaattacctttttcttatttcagcgcgcctggtgagaagaaatcaacaattgcgccggttttttgcatattaatattagcttgttcaatgttgagctgggcgacagagacaaaaaaagcgtccagcaaagttagttgtaatattcttgccgaggcattacgacctaataacggcgtttccggggctggtgagcaaataatataatcggccagtttcgctatcggtgaatggtagctatgggttatacaaataatctttgccccgttcttttttgccagttctacggccgcttttacatcactggttcgcccggaatgggtcactaccagcacaacatctccttcctgtaacaacgaagcggacatcatcatgatgtgagcgtccggataggcctgacagcgtacgccaatgcgcaagaacttgtgctgtacatcagcacagatagcatttgatcctccggcaccgtacaaatcccgctgtctggcctgatagaaaaagcgggcggcacggtggatctcatcaacgttgacgatcgactgaccttccataatggtgcgtaaagtgatgttaaataccttattcaccacatcctgcggcgcttcatcaaaagccaactcggaaggcaatacctgttctgactgagaaaaataatcttccagcgcactgcgtaagttacgaaagccgctaaaccccagcagctttgataccttaactatcatcgcttcagataccgccagagcttctgcgacatctttaattgcgggtgcacaactcaggttaccgggtttgagtaaccactccacgatgcggctttcattttctgtcattccttcctgcttcattcgcaggtaaggcgctaaccctataccgttcggaagcgctgaatcaaactctgactggctcatcacgttctcttgtccttgaattgaagacgccactatatcaccacagcaagaacagaaaagatgctggcgacttcacaaaaaaataaaatttataaagtttattttattgtgaacaatggcgagtggcttaaaattttatttcatttaattagtttaaaaacatgatgttatttgtttttctggttttttagatgatagatgttgctggatggtgagtgtctttaacgctattgcgctgtcagatgtaactctgtaaaacagatcaggaaggcgtaattcatcgattttgggtgtttttaattcattaacatcacaaatgttttttgattgtgaagttttgcacggacggggaagatgaatgaaaaagattgcatttggctgtgatcatgtcggtttcattttaaaacatgaaatagtggcacatttagttgagcgtggcgttgaagtgattgataaaggaacctggtcgtcagagcgtactgattatccgcattacgccagtcaagtcgcactggctgttgctggcggagaggttgatggcgggattttgatttgtggtactggcgtcggtatttcgatagcggcgaacaagtttgccggaattcgcgcggtcgtctgtagcgaaccttattccgcgcaactttcgcggcagcataacgacaccaacgtgctggcttttggttcacgagtggttggcctcgaactggcaaaaatgattgtggatgcgtggctgggcgcacagtacgaaggcggtcgtcatcaacaacgcgtggaggcgattacggcaatagagcagcggagaaattgagattcatccactacttgcatggatgagtaatgactaatgtggatagagtttctttttgaggttggctaatgaaacgctttccgctatttcttttattcaccctgctcaccctgctcacgctgtccaccgttccggcccaggccgatattatcgacgacaccattggcaatattcagcaggcgattaacgacgcttataaccctgaccgtgggtgagactatgaagattcgcgcgacgacggctggcagcgtgaagtgagcgacgatcggcgcagacaatatgacgaccgccgccgccagtttgaagatcgccgcaggcagctggacgatcgccagcgccagcttgatcaggagcgtcggcagctagaagatgaagagcggagaatggaagatgagtatgggcggtgaggtaggctagggtgagggggccagcgcgcacattccctctcatcacgccaccccaatctccatcccatcaaacccggcttcaaaccccggtggcagcgcattctccatcagccacgcatcaaactggtggctgatatgggtcagaatcacccgtggcgagcggataacctgattcagcgcaagcacggtatttaaatcacagtgattacgcggcgcatcctcgcgcggcgggtggctgcaatcaatcaccatcacctgcggatgattattgagtaaaaatttctgtgttttttccggcaggccagcggtgtcagatagccacgccacccggctatgtgccgtttccagcagataaccgaaggtcagttttgagtggttaagcggcagcggcgtgacctgcaacccctgcaaatcaaacaccacaaacggttccactgtgtggctgaaatcaagcaggcccggatgtttaaacagatcgtcgcaaccctggtcatccggcgggccgtaaaccgggatcggatcgccaacgccccagcgcagcggaaacagcccctggacgtgatccatatgataatgcgtcagcaaaaactgctggaacgatccgggcgaccagcgatcggcgagatcgtgcagcccggcgtcgatcagggtgattgcgtcgttaaacttcactacgccgctgcacggttggcggcgatactgcggcgagcgccgcgctctggcgcaggccgcacactcgcagccccatgccggaacgccctgtgcgccgccggtgccggtgagcgtgagggtcaggctcatgttacagcgccttggtgaagcggaagtggctctgctcgtagccttcgcgcagatagaaacggtgcgcgtcgtggcgcttcacgttggtcgaaagttcggtcatttcggccccggcctggcgggcttcttcttctgcccacgccagtaacttactgccgacgttcagaccgcgcgcctgcggcattaccaccaactcctgaatttcgccgatccagttgacatgatgcagatgaaactgcaaatgcaggccgatcatgccgacaacttcgccatcaagcagcgccagatggtagcgcatgtttgggtcgcgcagattggcgttaaaacccacgcgaaacgcgtggtggtcaaactccgcctgttttagctcacaaatcagcgcgtaaaccgcgtcggtgtcgtactgcgtggccgggcgaagctcacaagcaggcatggtgtttctccttctgatggatcagcgtcagcagcgtgtcgaccgactggcgcaggctgccgtcattgttgagcgtatggcaatcctgtggagtatagcgggcggcgcgcgccaggcgggcgttaatttcactggcgttttcacggccacggttttccaggcgctggcggaggatctccggcgaaacctgtaaacagacgggcagcagcgccgattgatagcgcgcccgcgcctgcggcagatgggcgcgtgagccgttgaccagcacgtcgaatccggcgtgcagccagagatcaatctcgacgccgacgccataatacagaccgttagcgtgccagcttaaggccaacagattttgccccgcgcgggtaaaaaactcctgctcgctcagggcgatatggttttcacttccggcgctggcatcgcgcgtgatgtagcgatgcgccaccagtaactgagtttgttcccgcaggcggagttccgccagcaggctgtctttcccggagccggacggccccattaaccaaatcagttttcccatcatcagaacacccttttaccctgacgccagacgtggtcgatatgaatatgattgtccttgcgatgcgccagcaccaggtcggcgcgtttgccctcgccaatcaccccgcgatcctggagattaagcgcctgcgctggatttttagtcaccagcttcaccgcctgcggcagcgtaaagcggttgctctcgtcatcggcgacgcgaaatgccgcatcgagcaggctggcggggtagtagtcggaagagaggatatccagcaggccaagctgcgccagttcactggccgccacgttgccggagtgcgagccgccgcgcacaatattcggcgcgcccatcagcacgttcatgccatgcttgcgcgaggcttccgccgcttcgaacgtggtgggaaattcggcgatcacgctgccaagctggtgagattcagcaacgtgggcgtgggtggcgtcatcgtggctggcaagcgcaatttttcgcgcgcggcacagggcggcgatggattcgcgattcggctgcgaccagcgtgcggcgagcgccagttgctcttcttcgtactgctgcatctgcgcatcagtgagggagtatttgccctgataatattcgcgatacttctcgcggttggcgaactggcgctggcccggcgagtggtccatcagcgacaccagcgtcaccggctcgcgctgcaccagtttttcaaacagcggcagcgtggtgtgatgcggcagttcgcagcgcagatgcagacggtgctcggcgcggttgacgccgcgtttctgcgtctcttcgatggcgttgatcatcttctccagattctccagccgatcgccgccgtcgcgcacgtcgccaattgccacggcatccagtacggtggtgatgccgctcgccaccatcagcgcgtcgtggctgctcatcgccgagtgggcaggccagtcaactttcgggcgcggggtgaagaatttatccagattatcggtatgcagctcaatcagccccggcagcagccagccgccttcgccgtccatcgcctccggcaggcggctctggctttcggcaaaggcgcggatttcgccgttctgcacctccagcgaaccgcttaccacctcgttttccagcaccagcttaacgttattgataatcatgaagaggctcccattgggtgcaggcggtcggcgacgtcattacgtacagcttcgtcatggaagatgcctacgatggctgcgccacgggttttggcttcgcgaatcagttccaccaccgcggcgctgtttttggcgtccagcgaggcggtaggttcgtcaagcagcagaatggggtagtcgacgataaagccgcgggcgatgttgacgcgctgctgttcgccaccggaaaatgtcgatggtgccaggtgccacaggcgttccggcacgttcaggcgggtgagaagacgcgcggctttagcggcgcaggcttcacgcggaacgccggtatcgagcagcggctgcatcaccacttccagtgctgagatacgcgggatgacgcgcagaaactggctcacccagccgacggtggttttgcggatttccaccactttgcgcgctggcgcggtgaccaggtctacccactcgtcaccgtgtttgatctggatttgaccttcgtcgggcagatagttggcgtacagcgagcgtagcagagttgatttgccgctgccggaatggccgtggagcaccacgcattcgcccgcgttgacggtgagcgaggcgcgattgaggacgggcaggcgcacgccgttttgctggtgcaggatgaaggttttactgacgttttgtacgttaatcatttttcgcctcgtggttcgggtgtcggatgcgacgctgacgcgtcttatccgacctacggggagcgcatttgtaggccggataaggcgtttacgccgcatccggcaccggctcaattctgcaaaaccgatgacaccagcagctgtgtatacggatgatgcgggtcgtcgagcacgcggtcggttaacccactctccaccacttgcccctgcttcatcaccagcaaacggtccgccagcaggcgggcgacgcctaaatcatgggtgacaatcaccaccgcgaggttcagctccaccaccaggccgcgcagcaggtcgagcaggcgggcctgcaccgacacatccagcccgccggtcggttcatccataaacaccagcttcggatgcgtcaccaggttgcgggcaatctgcaaacgctgctgcataccgccggaaaaggtggtcggcaggtcgtcgatccggttggcgggaatctccacctcttccagccacttctgcgcggtggcacgaatatcgccgtaatgacgtgccccggtcgccatcagccgctcgccgatattgccgcctgccgacacctggcggcgcaggccgtcgagtggatgctgatgcaccacgccccattcggtacgcagcaggcgacggcggtcggcctcgctcattgcatacagcgaacggttctcgtagtgaatttccccctgctgcggcgtcaggcgcgcggagatcgacttcagcagcgtggtcttcccggagccggattccccgacaatgcccagcacttcccccggccataaatcaaaagagacatcgctaaagcctttgcccggcgcgtaaaggtgggtcaggttattgaccgaaagtaacggttgattcattggttttttgcctcgctctgttggcggcaataatcggtatcggagcagacaaacatgcggtttccggcgtcatccagcaccacttcatcaagatagctgtgggtcgatccgcagatggcgcatggctcatcccactgctgaacggtgaacgggtgatcgtcgaaatcgagactttccacgcgggtaaacggcggcaccgcatagatgcgcttctcgcgccccgcgccgaacagttgcagggcgggcatcatgtccatttttgggttatcgaatttcgggatcggcgacgggtccatcacgtagcgcccatttaccttcaccggataggcgtaggtggtggcgatatgaccgaagcgggcgatatcttcatacagtttcacctgcatcacgccgtactcttccagcgcgtgcatggtgcgggtttccgtttcgcgcggctcgataaagcgcagcggctcggggattggcacctggaagataattatctgatcttcggtcagcggcgtttcggggatgcggtgacgcgtctggataaccgtcgcatcgtccgtacgttccgtggtgtttaccccggtcacgcgcttgaagaagttgcgaatcgacacggcgttggtggtgtcatccgcgccctggtcaatcaccttcagcacgtcgctttcgccaatcacgctggcggtaagctgaatgccgccggttccccagccgtacggcatcggcatctcgcgcccgccaaacggcacctgataaccggggatcgccaccgcttttaagatggcgcggcggatcatgcgtttggtctgctcgtcgaggtaggcaaagttgtagccgctcagattagccatggttctgctcctgttgcagacgtttgagtagctccagttcggcctggaaatcgacgtagtgggggagtttgaggtgtgagacaaagcctgcggcttcgacgttgtcggcatgtgccagcacgaactcttcatcctgcgccgggcctgtcgcgtgctcgccgtactccggggcttgcagagcgcggtcgacagcgccatcgccatcgctttgcgctcgctcatgccgaacaccagcccgtagccgcgcgtgaagtgcggcggctcacccggcgggtcgataaaaccgttaaccatttcacactcagtcatcagcagttcgccgacgttcaccgcaaatcccagctcttccggcacaatcgacacgtcgatatagccgctgcggatctcgcctgcgaacgggtgattgcgcccgtaaccgcgttgggtggagtaggccagcgccagcaaatagccttcgtcgccgcgcatcaactgctgcaaacgggaggagcgtgagcaggggtaaaccggcggcgtgcgggtgatgtcatccggctgtgcgccgctatcctcttcaaacttcgccagcccctgacgcgccagcaggctgaaaacgtgcggcgacggctgctgttcgctgtcggcggtggtcagcgtcggcgcttcgccgtttgccagcagggtaaaatcgagcaggcgatgggtgtagtcgtaggttgggccaagcagctggccgccgggaatgtctttataaacggcggagatacggcgttcgagacgcatcccggtggtgtcgagcggctcgcttaccgccagcttcgccaacgtggtgcggtaggcgcgcagcaggaaaatcgcttcaacgttatcgccgctggcctgtttcagcgccagcgccgccagttcgcggtcggcaatgccgccttcggtcatcacgcgatctaccgcgaggttaagctgctgttcaatctgggcgacgctcagttcgggcaaatcggtatcgcctcggcgtcggctctcttgcagggcgtgggcggcgtcgatcgccttctcgccccctttcacggcaacgtacatcagcacacctccacatgagtggttcgcggaatagccagcaggcgctcgccacaggtcaggatcaggtcgatgccgagcgggaacggatgcgggcgctcggtgagttcgtgcagaatgcactccggcagctgcggagcgatcattcgttcttcggcaatacccgcaccagtaaggcgcaacatgcgtccgccgctcaggctggcgacctgtaaaatcagcgtcgcacccgcttccggcgcaacggcggtgccggtggaaagggcgttgagctgttcgctggaaatcgcctcatccgtcaccgcgaaggtcgcctgttccggctggctgaccagcggcgcgttggtatgaaaacgcaggctctggttgacgatatcgttatttaatggggtagaaagccacaccggcgtgtcgttatcggccagcgtcagcagcacgctggtggtggcgatattcagcggttgccagccgcgtttgagctgatgcagggcgacaatcacgcccggctcgctcatggcctttaacaggcgacgaaaactgtgctgggcatcctgcacgggaagcataaaagcggtttccagggtcatgcgttgtctccgcgaaccatcgtaaagaagtcgacccggctggcgttcacttcggcctggcgtgcggcaatgcgtgccatacggtcagcgtccagcggggcaataagggtttctgataagttttgaaagtggcgagattgctgcatcagcgcgtcaatcagcgcgcagcgttcggcgtgctgtttatcacgcccctgcacccagctgtagccgagcgtgccgtcagtcaggcgcacggcggcgcgggtcagcgtggcgtcgccggcaaaaaaacgttcgccggtgccgcccatccgcgcctgaatctgtaccaggccagtttcagcggcgcggatcacctcatagtcggcggtgatgtttagcgcgttcaggcgtgctgccagttcagccggttggctgtgcgccagcacggacatccagtgctggcgggtcgcggtatctgcgtgcattcagtgctccatagtgaattcaatcatgtcggcgcgcgtcaggctgacggagtactccgccgggctgctttcaccgtcacggtggttaagggtgcgcacgcacagcagcggcgacatattcgggatttcaagacgctggcactctttggcctgggcgcggcgggcgctgatccgcgtctggctgcggcgcagcgcaattccggtttgctcgcgcagaaaatcgtgcagcgagccgctgtcgaagcgttgcagcgtcggccagagggtgaggtccgcaaagtagtggtcgattaaacagagcgcgatgccgttgacccggcgcagggtgcgcaggtggatgacgttctccccctcggttatccccagcgcgtcagcgacgtgaccagatgccgggcgcagcaccgacagcagtttttcgctggtgggatggctgccctgatccagcaggttctggctaaaacgcgcctgggcgttgagcgggtaatcgaacgggcgcatcagcaccagcacgccgacgccctgacggcgctgtacccagcctttttccaccagttggtcgatggcgcggcgcagggtgtggcgatttacctcaaagcgcgccgccagctgctgctcggcgggaagatagtcgccgcagcggtagtgttgacgaagctcctgctcaagttttgcggctatctcctgatagcgtgttgggtagctggtcggatgtgtagacaagtgcatagatatcaatgcctcgcttatcagataaagtgcttacgcaaccgttgagagaggaaatccagcaggctgaccgtgacgatgataagcaccatcagggcgcaggtttgctggaactggaaaccgcgaatcgcttcccacagcgtgacgccgatcccgcccgcgccgaccatgccgacgacggtcgccgagcggacgttggattcgaagcgatagagggagtaggagatcagcagcggcatcacctgtggcagcacgccgtagaggatctcttccagcttgttggcgccggtggcgcgaatgccttccaccgggccgggttcaatcgcttccaccgcttcggaaagcagtttcgagagcacgccggtggtgtggataaacagcgccagcacgccagcgaacgggccgaggccgacggcgaccacgaacagcatggcgaagaccatttcgttaatggcgcggcaggcgtccatcaggcggcgaacgggctggtaaacccaccacggcaccaggttttcggcgctcatcaggccgaaggggatggagagaaccaccgccagcgcggtgccccagacggcgatttgcagcgtgacggccatttcggtgaggtaatcctgccactggctgaaatcgggcgggaagaagtcggcagcgaaggttgccatgttgccgccgtctttaatcagcgtaagcggggccatttccgcgccctgccacgagacgaccagcacggcgagaacaacggcccagctcagaagcgagaaccagctacgcttggatggggcgatggtgatggtttgcatgtttggctccgtttaatgttttctccctctccctcaagggagaggggaccgatcgagcacattactgcaccgctttactcaccgaactcatcgcgcttaacgcgttgttcaggcggtccaggtcatccagctgcgcctgaatctcggtggttttcgccagcttgtcctgctcattcagtcctttattgctttttacgccctgcatctctttaaacagtgcgagctggcgaatcggcaccagttgcaggtcgctggaggcgcggaacggggcccagcccaggcgttccagcaccgctttctcttccggcgtttttccgtagttcataaagaagtcgtagatcttgtctttggtggtttcggagagattcttgcgccagacgatcggatcgcctgggatcagcggcgacttccagatcaccttcagttctttcagcttctctggcgcggaggttttcagcttgtcgaggttttcggtgttgttggtggcaacatccacctgcttgttggcgacggccagcgcgttggtttcatgcccagcgttgacggtgcgcttaaagtcgctggcggagatattgtttttggcaaagacgtagtaaccggggacgaggaagccagaggtggagttaggatcgccattgccgaaggtgagatctttccgcttcgccagcagatcgttcaggttgttgatcggactatctttgttgacgatcaacacgctccagtaacctggcgatccatccgccgcgaccgtctgggcgaagacctggccgttggcgcgatccaccgcttccattgccgacaggttgccgtaccaggcgatatccactttattgaagcgcattccctggataatgcctgcgtagtctggggcaaagaaggcgttcaccttcacgcccagcttcttctccatatcctgtaagaatggcgtccattgcggtttcaggttttgctgtgattccgttgaaataatgccgaaattcagcgccttttcctgctcttcggcgtgtgccgggcttaacagggtgctgaggctgaacatgctggtgaaggccagcgaggcaattatcttagcgttcattcgttttcctcaatgatggggatgtcaggcagctttcgcgttctcttcgatgcgattaatgctgcggtagagatggtcaaaacgttcgttatcaaactgttggctgctgccgtcgtagaaaacgtgcccctggcgcagggcgacgatgcgttcgcagtagcgcagggcgtaatccacctgatgcagcgtgacgaccacggtgatgccgtcgttctgattgatgtcgcgcagggtgtccatcacgatgcgggcggattccgggtccagcgaggcgatgggttcatcggccagaatcaccttcgcctgctgcatcagcgcgcgggcaatcgccacacgctgctgctgtccgccggagagggtggaaacgcgttgatgggcaaaatgcaccatgccaacgcgggtcagcgcctgtaacgtgcgttgtttctgctcgcgggtaaaccagctaaaacaggtgcgccagaacggcgtgctgccgagcgcgccaatcagcacgttctccagtacgctcaggcggttcaccaggttgaattgttggaagatgtagccggtgttggcgcggcttttgcggatatcgcgcgccagacggccttcgcgctggactgtgcggcccagcagctcgatatggctgccggcggatttatcgccggtaatcaaaccgcttaagtgacgtaaaagggtggatttgccggaacccgacggcccaagcagagccaccatttcaccgtgatgaatgttcagatcaaccgcatgcagcgcctgatgctgattgaaggttttggcgagcttctcgacacggataatcgtttgcatgatgcagcctccctaaaaaagtggctccatcgtggcggattattgtgacgatttggttaattaaaagtgactaacagatgaggagttaacgggaattcgatgacagtgcgggagggcgggcctcccggcgggttattgcgttggttgttgtttgacgacattaatcatccacggtacgccaaatttatcggtgactttgccgaagccatgcgcccagaaagtttcctgccaggccatttcaatttttccgttagcggcaaggttatcaaaccagcgttttccttcttcgacctgttgcgaatcgagcaccagcgtaaagccggagtagctggcttttcctgacggtatagcatcgctcatcatgatgtcgcttccggcaatgcgcacgttggcgtgggcgatggcggtatcgggaaattgcattccggaagggcagttctcggcgctgtcctgcgctgattttggcatttcgccgaagctgattttatagagcagttccgcgcccaacgtacgttgataataggcaatcgcgtcggaacagttaccggcaaaagagaggtagggacttaacggcatgatggtgacctcagttaagagaagccagttaagtgtagttcgaaatttatacagatgagaggcggcctgataagacgcgcgagcgtcgcatcaggcagtcggcactgttgccggatgcggcgtaaacgccttatccggcctacggagggtgcgggaatttgtaggcctgataagacgcgcaagcgtcgcatcaggcagtcggcaccattgccggatgcggcgtaaacgccttatccggcctacggagggtgcgggaatttgtaggcctgataagacgcgcaagcgtcgcatcaggcatctggcaccgttgccggatgcggcgcgagcgccttatccggcttaccgatcacaatacaatcagttctttttcacaaactcagatttcagtttcatcggaccaaaaccgtcgattttgcaatcgatgttatggtcgccttcaaccaggcggatgtttttcactttggtgccaattttcagcatcgaagagctacctttcaccttcagatctttaatgatggtaacgctgtcgccgtcagccagcagattgccgttagcatctttaacgatcagctcgtcgctttcctgtgcaggttctgcgtcgttccattcgtaggcacattccgggcagatgtacatgccgttatcttcgtaggtgtattcggagttgcattttgggcagtgtggtaatgacatgtggatttcctcaaaagtcagcagggcaaaagcgccaaaaaacggcagattgccgaaaaaggccgcaattatacacaaaatccctgagtttgtcgggggtactgctgattttagacgacgatcgttttcatttgaaaggaaacgcaaaaagaaaataatctttttgcctctatttattatttaagataatgttaatgctctacttgttctttttttaattcacatgatatttttatctttctgacgttttaaacgtatcagaagacgttatttattctgataaaaaacaacacactaaatataaaattatttcttgcagtaattataaaagccgaaaacagaactcaaaaacaatctggctaaataaaataacaaaatttgctttaaggaagaattttctatgtacacacagaccctgtatgagttaagtcaggaggctgaacgcctgttacagctttctcgccaacagttgcagttactggaaaaaatgcctctctctgtacccggagacgacgcgccacaactggctttaccctggagtcagcctaatatcgccgaacgtcacgcgatgctgaataatgagttgcgtaaaatttcccgactggaaatggtgcttgcaattgtcggtaccatgaaagcagggaaatcaaccaccattaatgccattgttggtacggaggttctgcctaatcgtaatcgcccaatgactgcgctgccgacgcttattcgccatacgcccgggcaaaaggaaccggtactgcatttttcacatgtcgcgccaatcgattgtttaattcaacaattacaacagcgcctgcgtgattgcgatattaagcatctgaccgatgtgctggaaatagataaagatatgcgtgcgcttatgcagcggatcgaaaatggcgtcgctttcgaaaaatattatctgggtgcccagcctatttttcattgtctgaaaagtttgaatgatttagtgcgactggcgaaggcgctggacgtcgattttcctttttctgcttacgccgccattgagcatattcccgtgattgaagtggagtttgtccatctagcggggctggagagttatcccggtcagttgacgttactggatacccccgggccaaatgaagccgggcaaccgcatctgcaaaaaatgcttaaccagcagctggcacgcgcctcggcggtactggcggtgctggattatacgcaactgaaatcgatctccgatgaagaggtccgtgaggcgattttggcggtggggcaatcggtgccgctgtacgtgctggtcaataagttcgatcaacaggatcgtaacagtgacgacgccgaccaggtgcgggcactgatttccgggacgctgatgaaaggctgtattacgccacagcagatatttccggtgtcgtcgatgtggggctacctggcgaatcgggcgcgctatgagttagccaacaatggtaagttaccaccgccagagcaacaacgctgggtggaagattttgcccatgccgcgcttggcaggcgctggcgtcatgccgatctggcggacctcgaacatattcgtcatgctgccgatcagttgtgggaagattcgctgttcgcccagccaattcaggcgttgcttcatgccgcttacgctaacgcctcgttgtatgctctgcgatctgccgcgcataaactgttgaattacgcgcagcaggcgcgggaatacctggattttcgtgcgcacgggttaaacgtcgcttgtgaacaattgcggcaaaatatccaccagatcgaagaaagtttgcagctattgcaactcaatcaggcgcaggtgagcggcgagattaaacatgaaatcgagctggccctgacctccgccaaccactttctgcgtcaacagcaagatgcgctgaaggtgcagttagccgccttgtttcaggatgattcggagccgttaagcgagattcgtacccgctgtgagacactgttacagacggcgcagaacaccatcagtcgcgactttacgctgcgttttgccgagcttgaatccaccctttgccgggtgttaaccgatgttattcgccccattgagcaacaagtcaaaatggaattgagcgagtcagggtttcgtcctgggtttcattttcctgtttttcacggcgtagttccccacttcaacactcgccagctgttcagtgaagtcatttcgcgccaggaagcaacggacgagcagagcacgcgtttaggcgttgtgcgtgagactttttcgcgctggttgaatcagcccgactggggacggggaaatgagaaatcaccgacagaaacggttgattacagtgtgttgcaacgagcattaagcgcagaagtcgatctctattgccaacaaatggctaaagttctggcagagcaggtcgatgaatctgttacggcaggcatgaatacttttttcgctgagttcgattcatgtttgacggaattacagacgcgtttacgcgaaagtctggctctgcgtcaacaaaatgaatcggtggtcaggctgatgcagcagcaattgcagcagactgtgatgactcacggctggatttacaccgacgcccagctgttacgcgatgatattcaaacacttttcacggcagaacgatattgaccaagacgttacttgacggccccggtcgcgtgctggagtcggtttatccccgctttttagtggatctggcgcagggtgatgatgcccgccttccacaagcccatcagcagcagtttcgtgaacgactgatgcaggaacttctttcgcgtgtgcagcttcagacatggacgaacggcggcatgttaaatgcgccgcttagcctgcgtctgacattggtggaaaaactggcgtcgatgctggatcccggtcatctggcactgacgcagatcgcgcagcatctggcgctgctgcaaaaaatggatcaccgccagcactctgctttcccggagctcccccagcaaattgccgccttgtatgagtggttttcagcccgttgtcgctggaaggaaaaggcgttaacgcaacgaggcctactggtgcaggcaggtgatcagagcgagcaaatttttacccgctggcgtgctggggcgtataacgcctggtcgttgcctgggcgctgttttatcgttctggaggagttgcgctggggggcatttggcgatgcctgccgtctgggaagcccgcaagcggtggcgttgttgctgggtgatttgctcgagaaagcgacacaacatctggcagagagtatcaatgcggcaccgaccacgcgtcactattaccatcagtggtttgcctcttcgaccgttccgacgggcggggagcatgctgattttttaagttggctgggaaagtggaccacggcagataaacaacccgtttgctggtcagtgacccaacgctggcaaactgtcgcgctggggatgccacgactctgttcagcgcagcgtctggcgggggcaatgctcgaggaaatcttctctgtaaatttggcgtaaataatcagttacatcaatgagtcctaaacgaaatccatgtgtgaagttgatcacaaatttaaacactggtagggtaaaaaggtcattaactgcccaattcaggcgtcaactggtttgattgtacattccttaaccggagggtgtaagcaaacccgctacgcttgttacagagattgcatcctgcaattcccgctccccttttgcggccgtcgcgctgatttttctggcgtttgcggaaatgggccaactctgcgaggaaagctatgctgaaaaggaaaaaagtaaaaccgattacccttcgtgatgtcaccattattgatgacggtaaactgcgtaaagccattaccgcagcatcactgggtaatgcaatggaatggttcgattttggtgtttatggttttgttgcttacgcattaggtaaagtttttttcccgggggctgaccccagcgtgcagatggttgctgcacttgccactttctccgttccctttctgattcgaccgcttggcggactcttctttggtatgttgggcgataaatatggtcgccagaagatcctcgctatcactattgtgattatgtcgatcagtacgttctgtattggcttaataccgtcctacgacacgattggtatttgggcaccgattctgctgttgatctgtaagatggcacaaggtttctcggtcggcggtgaatataccggggcgtcgatatttgttgcggaatactcccctgaccgtaaacgtggctttatgggcagctggctggacttcggttctattgccgggtttgtgctgggtgcgggcgtggtggtgttaatttcgaccattgtcggcgaagcgaacttcctcgattggggctggcgtattccgttctttatcgctctgccgttagggattatcgggctttacctgcgccatgcgctggaagagactccggcgttccagcagcatgtcgataaactggaacagggcgaccgtgaaggtttgcaggatggcccgaaagtctcgtttaaagagattgccactaaatactggcgcagcctgttgacatgtattggtctggtaattgccaccaacgtgacttactacatgttgctgacctatatgccgagttatttgtcgcataacctgcattactccgaagaccacggggtgctgattattatcgccattatgatcggtatgctgtttgtccagccggtgatgggcttgctgagtgaccgttttggccgtcgtccgtttgtgctacttggtagtgttgccctgtttgtgttggcgatcccggcgtttattctgattaacagtaacgtcatcggcctgatttttgccgggttactgatgctggcggtgatccttaactgctttacgggcgttatggcttctaccttgccagcgatgttcccgacgcatatccgttacagcgcgctggcggcggcatttaatatttcggtgctggttgccggtctgacgccaacgctggcggcctggctggtcgaaagctcgcagaatctgatgatgcctgcctattacctgatggtagtggcggtggttggtttaatcaccggcgtaaccatgaaagagacggcaaatcgtccgttgaaaggtgcgacaccggcggcgtcagatatacaggaagcgaaggaaattctcgtcgagcattacgataatatcgagcagaaaatcgatgatattgaccacgagattgccgatttgcaggcgaaacgtacccgcctggtgcagcaacatccgcgaattgatgaataagctgaaacgaatggcctgatgtgacgctgtcttatcaggccaattgaactcttaaggttcacttaatctctgacgcgcatactctcctccaggttaacggaggagagtgcaatgaaaaaccgtgtttatgaaagtttaactaccgtgttcagcgtgctggtggtcagcagctttctttatatctggtttgccacgtactgatctttcttcagccgtacccaggcccgcgtgccggaagtctcttgccggttttgcaggaaaaactgcccgtgatgcaactgtgtaatgcggctgacaatacttaaccccagaccaatcccgccataacggctgtccatacgtacaaacgctttactcaactccccgcatttactctcatcaatacctggtccttcatcttcaactgccatgaccgctccgtcatcttcttgcagcttaatcataatgttgctgccttgcgggctgtaacgatgggcgttttctaccaggtttcgcaataacatccgcagcagggttgcatcaccctgaacggtgatgtcggcggcgctctctggcaatagcagggtttgctgtcgctggtcgagcatggtactgagttcgtcatacgaggggagaatgacatcttccagcagttttacatgttgataattaccggaagaaaatgactgtccggcacgcgccagttgcagcagctgggagacgctctccatcatctgatcaagccgtgccactaacggtgctacatcaatgtgatgcgttttcgccagcagttccagatgcaaacgcacccccgccagtggcgttcgcagttcgtgcgcgacgtcagcggtaaacaacctttcgttatccagcgtgctggtcaggcgactgaccagatcgtttaacgccgaaaccaccgcttcgatttcgagggtggcgctgtgaatggcaatgggcgttaagttgtcggcggtgcgcgcttccagctctttttgcagctccgccagcgggcgggtgatgcggcgtaccgcctgatagcagataaatagcgtcaggctgaccataaagacgccggggacaatcaggctggcgaccgcctcgcggatctcacgcatgatgtggcgatcgttgttgcgattgtcgcgtagcgcctgctcaaacagctgaatctgctcggtactttcatgccatagccagaagacgctgatcagctcaaacaccaacaaaatggccccgatggtcaatatcagccgttggcgcagcgatattggtcggcgcagaaaatgcatcagattcaattagttttcctcattcgcgaccagcatatagccaaagccgcgcacggtgcggatacgggctttgcccactttgtcgcgcagattgtggatatgcacttccagggtgttggtcgagggttcattgtcccagttatagatgtcgttgtagagaatttcccgatgcaccggactgcctgctttgagcattaaccgtgacagcagagcatattctttgggcgtcagaatcaactcttcaccgcccatccatacctgacggcgacccatattcagcgtcagattgccaacaatcagctcactttcgccctgattattatggcgtcgtagcagggcgcggatacgggcgtgtaactcttccagcgcaaaaggcttcaccagatagtcatcggcaccgacatccagcccggcgattttgtcggtcagcgtatcgcgagcggtgaggatcagtactggcagggtgtattttttctgccggatacgggcgagaaaatgcagtccatcttcgtcgggtaaccctaaatccagtaccaccaggctgtaatgaccggcctcaaggctttgttccgccatccgcgcggttgtcacgccatcgcacgcgtagccttcggtttgcgccgccagaatcaatccctgcaataacagcgtatcgtcttcaacaatcagaattttcattcactcactctcctgcaagtttgcagaatatcatccgcagcctggtaatacttcgtctcaacgccagttaatcccaatagcgtggagaataaattgtcttgtgaatagtgttgcgtttgcgcctgtttttgcaggcagttctggtcaacctgataccgtttttgataatcctccgacagccacagcagcattggcacctgtttttggctatccggggcgatggcataaggcagaccgtgcagatagatgccattttcacctaacgattcaccgtggtcagaaagataaaccaggctggtggtaaatttatcctgatgttctttcagcagattaatcgctttatcaacaatatagtcgacgtaaaccagcgtgttgtcgtaagtgttcaccagttgctctttgctacaggtctggatctcattggtgtcgcaggttggggtaaatttcctgaactgcggcggatagcggttgtaataggtcggaccgtggctgccgatggtgtgtaagacaatcacgccatcaccctgcaggttattgatgtactcttccagcccgtggaacagtacttcgtcatagcattcgccgttgatgcactgaccaggcagattcagcgcggtgacgttctggtgaggcacgcggtcgcaggcacctttacagccgccatcgttgtcattccacagcacgttgatgcccgctcgctgaatgatatccagcacgccttcctggtgctgtgccagctcttctttgtaatgctcacgcggcatatccgagaacatgcacggtactgaaactgccgttgccgtgccgcaagatgcggtattagggaaatagaccacgttatctttcgccagccgcgggttagtttcacgcgggtagccgttgagggagaagttctccgcccgcgaggtttcgccgacaatcaggatggtcaaatttttacgtttttcgttctgcattaacgggttgcggtgcgcgtcttcaccaattcgcaccagcggcagatttgccagtcgctgatgggagtaccatgaccagctggcaacaatgctgttagaggggcttaaggatttcaccagctctttgttattgcggaacaacgaggcgtagtctttataaaacagtgcggcgaccagcaaaatcagtagtacagaaaccagaatattggctccacggaaaagaacactgcgcagacgcgaggtggcaggtttgatttttatccagcaggcaatcagcgcagcaagcacgccgctgaatcccagcgttaataacatttgcggtgtcatcagcgcataactttctgccggagtggtatcaataatattggcaatcatcgagcggtcgatgacgatgccgtaagtcattatgaaatattgtgcagccgcgccaaccagaataaacaggcaggccagtggtcgattaagccataagaaagagcttagtgtcaggacaatattaatcacgctgaaagcgacgaccggcatcgacaagaaaaccagtacgttatgcagcgaatccagcggcagcgcctgcaacacctgcttaaaaaaggcaatattcaggcagatagagatataaaaagcggctaacaatagccaggcgagtaaattcaaagagggtctttttagtaggcgcttcaacatcacggtgtttccatcgaacaaagtgcgcatatgctcgcaaagcaaaattaagccaaccttaagttcttaaggttggcttttatgtgtgctggattaaggggaattaatctttgcttattggtgcatctaagggatacgggtttttatgcagccggttgtaattcagcgcatacatggcggtgatgaccattagggtgacaaatgaccacataacctctttcgccccggaccccaccacggcccagatgcagtagaggaaggcaatggtagtaactgccagatatgccgggcgtgctttaccaaagtgaccgtgtccgagcagcagtaacgccgcacaggtgtaaagatatggcaccagtgtaaagatgaccgagacggaagaaaccagaccgaactctttggttgcgtttggcgaaatgctactgagctggaagatggtcatcaaaataccgacgataatcagccccgccactggcgtacccgctttatttacacgggcaaaaatcggtgggaacagtccgtcatcggcagcggctttcgccgtttgacccgccagcaacgtccagccgcccagtgaacctaagcaacccgcagctgcgcagaaggaaacaatggccccggcggtgtcacccaacgccatccgtgcggcatcaccgaatggcgaagcagaaacgcgcagtgcggcattagggatcatccccataatcgcggtggtagaaagtacatagcaaacggcggcaatcaataccccaccaatggtggcgatagggacattgcgtttcgggtttttcaccacacctgcggcaacggaggcactttccacaccgatgaacgaccacagcgtaacgttaagggtactttgaattgcaccgaaggtgcccaggccgctgacgttccatgccgccatataggtttcaccacggaaccagaaccagccaaatacggcaatcccgacgatggggatcagcgccagcacggtggcaactgcctgcacacgggtgatcattttcggaccgacaatgttcagcaggacgaagatccacagcaccacgacgcaggtgatggttaataccaatggatctttcagaatcgggaagaagtaacttaaatatcctacgccaatgaccaccatggcgatattgccgatccagcaggccagccagtagaggacgttggtttgataaccgagaaacgggccaaagcagcggcgggcgtaagcgtaagaaccaccaggacttgggtcgaggaacgacattttggcgtataccatcgagagccccagtgcaccgataatcgtcaccaaccatccataaatggcaatcccgccagtagaggccaggtttgcaggtaacagaaaaacacctgaccccataatattccccgacaccatcagggtgacggggattaagcccactttgtgagcatcagcatccgaagacataattaaactcctgcgaaggcgagcttcgtgacaataaattacgtcatatcatacgcctgcattcgatagttgaattattatcgaccgggttatcgctgatgccgttattaatatagctcttcgttaaggttaaaaatcaggcgacagtgcgttctctgtgctgactaacataatgcagcggcgtcataccgtagaagtctttaaagacagaaataaagtacgacgtactgttgtagccgcaggactgtgatacctgagagatatttttaccgtccatcattaattcatttacggcataacgcatgcggcaggtggtgattatttggctataactggtgttttcgcttttcaactttttctttaacagacttgggctaagacataaacaactggctaccatactaagattccagtctttgtgaatatcgctttcaataatttgataaacgctgtcacttacacaattacgtaacatatacatcattaatgaaacgaattttttactgtcgagaaaacgggatagcaccgtgaataataatgcgcgtgttcgttccttttctgactcagtttctgcgggcatcatgctgtgttgcgcggcaacgcgaaagacgtctggcgtcaggcatggcagggtgagtatgggcgtagcgctacgttgccatactggtatttgcgagagatctttattcagaaaccggaggtaatctttgatgatgtcgtgactaatatgagcaaccaaagtgttgttaagagaggagacgtcgataatattattttcacaatttaataacgccatatggttagctttaaggctaataggttctttcccattcacccttatccagacatctttttcagtcaataaaacaatacaaggttggtcgctgcaaatcctcatacatgtactcctgagtgcgaataaaagaccagttctcgctaaagcaaagcgataccgggaaatggttatataattgtatgatgaatataaacatgcataaaaataacgagttttactaatagtacaaatttttatagtaatttctcatgtacatatttttttacaggataaataacaggcaaaaaaaagcgcggggtggggccgcgcaaaaagtatgacatttttgtttgcagcaatttttatgaaaacgttgccatactcaaaaggcctaaggccaggcggcgtaatgttatttaaacaattacgccttcagcggaatagtggttacgctttcacgcacataacgtggtaaataccgtcaataatttcagtcccttcagtttcgtgttcaaatccagggaaatggtggtcccaggattgcagcgagcgtaaataacttacttgcggactgtttttatcgccgaagttttcaccagacagcagcatcgggattcctggcggatacgggataactgagtttgccgcgatgcgtcctggcagattttcaatggataccagttcgacattgttgtcgacaatcgcgttgtacgcttcacgcggggtgacttccgccaccggcaggccggaataggcttcgttcaaccgtgcgccagggttgttttctttcagccaggcaaacatggtgtcacccagatcgtgaatccccatgttcgcgtaagtgtcaggatattgttcaacaagttccggcatcacctgcgccagcggtgtgttggcgtcatagtggcgtttgaaggagcaaagggtgttaaccagagttccccatttcccacgggttacgcccatagagaacaggaacataatttggaagtcagtggtgcgggtaggtacaatgccgtggcgaccaagccaggcagtgaccagcgccgccggaacaccggtttcttccagttcaccatcttcacccattcccggagcaaggatgctgactttaatcgggtcgagcatactccagttatccggaatatctttgaagccgtgccagctttcgcccggatgcattacccagcagtcctgaacggtggtcagcagtttggttggtgcgtcagcaaagtcataggttttgccggtttgtgggtcggtgacgacttctttgttccacggtttgaagaaccagctaccgtcagcggtgaactctttatatagccgcgccatcgcctgacggaaatcaaccgcttcgtcaatcacttcctgtgtcagtgacaggccgctgttgccgtccatcatcgacaccgccacgtcgttggatgcgcagatggcatacagcggggaggtggtggcatgcatcatgtaggcctggttgaagcgggagaagttaatcgccccacgaccttcacgtacatgaatataagaagcctgtgacagcgcattcagcagtttgtgggtggagtgggtggcgaaaacggtaggaccgttgtgatcgccaggttcgccgcgcatggcatagtgatcggcatagatcgggttgaaacgtgcatagccgtaccaggcttcgtcaaagtgcagacgatcggaggttttttccagcagatcctgcgcttctttagcgttataacacactccgtcataggtgcagttggtcaccacgcagtaagacggtttttgcccggctttgtctttggtcagcgggctttcactgattttcttctgcaaggtttcaggttgcatttcctgcggatagattggcccgataatgccgtagcggttgcggcttggcaccatatagaccggtttcgcgcctgtcagcatcaaaccttgttcgatggatttatggcagttacggtcaacgaccacgacatcgttatcggtcatgcaagcctgcatgatggtgcggttagagccggaagtaccgacgactaccgaccaggagcgatcggcaccaaatacgcgtgcggcatatttttcgctttcgccaaatgcgccagtatggtcaagcaaagaaccgagggaagttcgttcgatgcccatgtcggtgcggaacagattttcaccatagtagtcatggtagaaacgtccggcgggtgttttggtaaaaccaacgccgccctggtggcctggcgctgcccaggaatattcatggatgtcactatatttcatcagcgcgctgaacagtggcggcaacagctgctggcggtagcgggtcatcgcggcaacggcgcgtccggcgataaagtcggcggtatcttccagaatccaggcgaattcatcgacaagctccagcaggtcgcgatccattgcggcgagggctttttcccgatcgcccaacaggaagaccggcacgttttgttggcgctcatgaagcttaccgatcaattgtctgacgttttgatgttcgtccggatgttccatttgatagctgaacatcaggcagtcaatggcttcgtttgaagagagaatggcaaaaccatcatcaaaggaggtggatttaatcacggtaacgttttgctggcttaaagcatctgccagacgctcaacggcgttaccgacccaggtgtcttgatggagaaactcgctttcaacaattaatactttcatcattgcttacccggttatgaaggaatcttcgttgcgggtaagtatcttccggccttttcgggctgtaaagcgcgtgaaaaacaaacatttttgaaatatttatttttataaacaatgcgttatgtgattattttaaattattttcactgcttattatcgacggctaaactatttttttggctgatactgatatcgtctttagccgggaaacgtctggcggcgctgttggctaagtttgcggtattgttgcggcgacatgccgacatatttgccgaacgtgctgtaaaaacgactacttgaacgaaagcctgccgtcagggcaatatcgagaatacttttatcggtatcgctcagtaacgcgcgaacgtggttgatgcgcatcgcggtaatgtactgtttcatcgtcaattgcatgacccgctggaatatccccattgcatagttggcgttaagtttgacgtgctcagccacatcgttgatggtcagcgcctgatcatagttttcggcaataaagcccagcatctggctaacataaaattgcgcatggcgcgagacgctgtttttgtgtgtgcgcgaggttttattgaccagaatcggttcccagccagagaggctaaatcgcttgagcatcaggccaatttcatcaatggcgagctggcgaatttgctcgttcggactgtttaattcctgctgccagcggcgcacttcaaacgggctaagttgctgtgtggccagtgatttgatcaccatgccgtgagtgacgtggttaatcaggtctttatccagcggccaggagagaaacagatgcatcggcagattaaaaatcgccatgctctgacaggttccggtatctgttagttggtgcggtgtacaggcccagaacagcgtgatatgaccctgattgatattcactttttcattgttgatcaggtattccacatcgccatcgaaaggcacattcacttcgacctgaccatgccagtggctggtgggcatgatatgcggtgcgcgaaactcaatctccatccgctggtattccgaatacagcgacagcgggctgcgggtctgtttttcgtcgctgctgcacataaacgtatctgtattcatggatggctctctttcctggaatatcagaattatggcaggagtgagggaggatgactgcgagtgggagcacggttttcaccctcttcccagagaggcgaggggagcgtccgagcatcatgaggccgaaaactgtgcttttcaggtaacttattaccataaactcagatttactgctgcttcacgcaggatctgagtttatgggaatgctcaacctggaagccggaggttttctgcagattcgcctgccatgatgaagttattcaagcaagccaggagatctgcatgatgactgcacccaaaattacatttatcggcgctggttcgacgattttcgttaaaaatattcttggtgatgtgttccatcgcgaggcgctgaaaacggcgcatattgccctgatggacattgatcccacccgcctggaagagtcgcatattgtggtgcgtaagctgatggattcagcaggggccagcggcaaaatcacctgccacacccaacagaaagaagccttacaggatgccgattttgtcgtggtggcatttcagattggcggttatgaaccttgcacggtgactgatttcgaggtctgtaagcggcatggtctggaacaaaccattgccgatacgttggggccgggcggtattatgcgcgcgctacgtaccattccgcatctgtggcaaatttgcgaggacatgacggaagtctgccccgatgccaccatgctcaactatgttaaccccatggcgatgaatacctgggcgatgtatgcccgttatccgcatatcaaacaggtcgggctgtgccattcggtgcagggaacggcggaagagctggcgcgtgatctcaatatcgacccagctacgctgcgttaccgctgcgcaggtatcaaccatatggcgttttacctggagctggagcgcaaaaccgccgacggcagttacgtgaatctctacccggaactgctggcggcttatgaagcagggcaggcaccgaagccaaatattcatggtaatactcgctgccagaatattgtgcgctacgaaatgttcaaaaagctgggctacttcgtcacggaatcgtcagaacattttgccgaatatacgccgtggtttattaagccaggtcgtgaggatttgattgagcgttataaagtaccgctggatgagtacccgaaacgctgcgtcgagcagctggcgaactggcataaagagctggaggagtataaaaacgcctcccggattgatattaaaccgtcacgggaatatgccagcacaatcatgaacgctatctggactggcgagccgagtgtgatttacggcaacgtccgtaacgatggtttgattgataacctgccacaaggatgttgcgtggaagtagcctgtctggttgatgctaatggcattcagccaaccaaagtcggtacgctaccttcgcatctggccgccctgatgcaaaccaacatcaacgtacagacgctgctgaccgaagctattcttacggaaaatcgcgaccgtgtttaccacgccgcgatgatggacccgcatactgccgccgtgctgggcattgatgaaatatatgctcttgttgacgacctgattgccgcccacggcgactggctgccaggctggttgcaccgttaaaacgcgactaaacgctactgcgccgggggatttattccggcgcacacctctgacgataccaataacagaaggcgggcgttggtaacagcgacccgataccctatgagcatttcaatgactacaaaactcagttatggatttggagcgttcgggaaggattttgcgatcggcattgtgtatatgtacctcatgtattactacaccgatgtcgtcgggctgtctgtgggtttggtcggtactttgtttctggtggcgaggatctgggatgctattaacgatccgattatgggatggattgtaaatgctacgcgatcgcgatggggtaagttcaaaccctggatcctgatcggtacgttggcaaactctgtaatcttatttctcctctttagtgcgcatctgtttgaaggtactactcagattgtctttgtttgcgtgacctacatcctctggggcatgacttacaccattatggatattcccttctggtcgctggttccaaccataacgctcgataaacgtgagcgcgaacaactggttccttatccgcgtttttttgccagtctggcaggctttgttacggcaggtgtgacgctaccatttgttaattatgtcggcggtggcgatcggggatttggctttcagatgttcactctggtactgatcgccttttttattgtttcaaccatcatcactctgcgcaatgtgcatgaagtcttttcgtcagacaatcaaccgtctgctgaaggaagccatctgacacttaaagccatcgttgcgctaatttataaaaacgatcagctttcatgcctcttgggtatggctcttgcttataatgtagccagcaacattattaccggctttgctatctattatttctcatatgttatcggtgatgcggatttgttcccctattatctgtcgtatgcgggagctgctaacctggtgacgttagtattcttcccacgcttagttaaatcattatcccgacgcattttatgggccggagcatctattcttccggtgttaagctgtggtgttctcctgttaatggcattaatgagctatcacaacgtcgtcctcattgtgattgcgggtattttgctgaatgtgggaacggcgcttttctgggtattacaggtcatcatggtggcagataccgttgattacggtgaatataaactgcacgtacgctgtgaaagtatcgcttactccgtgcagactatggtggtgaagggcggttcagcctttgcggcttttttcattgcggttgtgttagggatgattggctatgtaccgaatgttgaacagtctacgcaagccctattaggtatgcagtttattatgattgctctaccaactctgtttttcatggtaacgctgattctctacttccgtttctatcgcctcaatggtgacacgctgcgcaggatccagatccatctgctggataaatatcgcaaagtaccgcccgagcctgttcatgctgatattccggtcggtgcagtgagtgatgtgaaagcctgacgtggacaatagctaacgaaaatggcctgatgcgatatgtttatcaggccacgtcttaatgtaatgctttggatttgcaaattttgtagaccggataaggaattcacgccgcatccggcatcaacaaagcgcaagttgttatccggttatcaagccaaagcgccgtagctggcggcaatgaaagcgagcgaggaatatcaccgtcgttaatgcgccaagcagcgcgcagaacatatcggattgcgtgtcccactggtcgccctgggtgccgagaaaatcatccgctccctgacccattgccagcgctgcccaccactcgattaattcatacatcgcgcttatcgccagcgccacgcagcagaccaggaacgccaccattttacgtccgcgcacgtacatcccgcgaacgagaatttctcgtgccaccagtgcaggcaccagcccctggaaaaaatgccccagcttgtcatacggattacggctcaaccccagccattcctgcacctcaaaaccaacggggactttcgcgtaggtgtattgcccgccgaccatcaggatgatggcgtgaaagaaaatgagcgtatagagcagcggcgttaacgggtaacgtctggcggtggcaaggagtagcggcacgacaataatcaccggtgtcacttccatcagccaggtgagtttgtcatgggccgaaatgccggtataaatcaggattaacgttagcgccagtgcgccggtgttaagaattaacggcttgagtgtgcgggtcatggtgagttcgcaagtcagggaaaatactgactattcaccagcaagcgtgaaattacaatcgcaaaagaggtggcccagggggatcacctggcagcatgctgccaggcgctgggccgaagaggttacttagtgcagttcgcgcactgtttgttgacgatctgctggaagaagtcgttacctttgtcatcgaccaggataaacgccgggaaatcttctacttcgattttccagatagcttccatacccagctccggataagcgacgcattccagatgcttgatgctctgctgcgccagtaccgccgccggaccgccgatactaccgaggtagaagccgccgtgtttatggcacgcgtcggtaacctgctgactgcggttacctttcgccagcatgatcatgctgccgccgtgggattgcagcagatccacgtaggagtccatacggcctgcggtggttgggccaagtgaacctgatggataaccggcaggggttttcgccggacccgcgtagtagatcgggtgatctttgatgtactgcggaagttctttaccggcgtcaatcagctctttcagcttggcgtgtgcaatatctcgacccacaataatggtgccggtgagcgacaaacgagtggaaaccggatattgcgaaagctgggcgaggatctctttcatcgggcggttaaggtcgaccttcaccgcttcgccttcaccggcctgacgcagttcttgtggaatgtactggcctggattgtgttccagtttttcgatccagataccttcgcggttgattttcgctttgatgttacggtcagcggagcaggagacgcccatgcctaccgggcaggatgcgccgtgacgtggcagacggataacgcgaatgtcgtgcgcgaagtatttaccgccaaactgcgcgccaagaccgagtttctgggcctcttccagcagttcctgttccagctggacatcgcggaacgcctgaccatgttcgttcccttccgtcggcagttcatcgtaatagtgagcgcttgctaacttgacggttttcaggttggtttccgcagacgtaccgccaatcacaaacgcgatatggtacggcgggcaggctgcagtaccgagggtacgcattttctcaacgaggaagtttttcagtttgccgggagtcagcagggctttggtttcctggtagagataggttttgttggcagagccgccgcctttcgcaacgcaaaggaatttgtactcatcgccatctaccgcgtacaggtcgatttgcgcaggcaggttagtgccggtgttgacctctttgtacatgtccagcgccgcgttttgtgaatagcgcaggttatcttcgatataggtgttatagacgcctttcgacagcgcttcttcatcaccgccaccggtccacacgcgctggccttttttaccgacgatgatcgcggtgccggtatcctggcaggtcggcagcacgcctttggcggcgatttcggagtttcttaagaattgcagcgccacgtacttgtcgttttcgctggcttctggatcgtgaagaatagccgcaacctgtttctggtgtgccggacggagcataaaagaagcgtcgtgaaaggcttgctgcgccagcagggtcagggcttctggttccactttcaggatggtttcgccgtcgaagtcggcaacgctaacgtaatcggaagtgagtagatagtattcggtattgtctttccccatcgggaaaggtgcctggtagataaagggtttgtttgacatagcttccagcctgtaactctgtatttgttattcgaaaatggcgtgccgcgtagtcacgggcggcacgcaaagtgcatttataagaacccgtacatcgcggcgaagatccagccgaagacgcacgatacgctcacaccaatcaaccccggcagaataaagctgtggttgatgacgaagcgaccgatgtgggtggtgccggaacggtcaaactgaatcgctgccagatcgctcggataagtcggcaggatgtaataaccgtagcaagccggtgctgaagccacgatgtatgccggatcaacgccgatcgccagcgcgaccggaacaatcgccgccagcgccgcagcctgagagtttacaaacttggaaaccagcagcagaacaatggcataggcccacggatactctttcaccatttcacccagtacgccctgaatttcagacatatgcgcaccgaacatggtttctgccatccatgcgataccgtacaccgccacgatggcgatcataccggaacggaagacttcgttttttgagatagacgcgggattggttttggtcaggataataatcagcgccccggtcagcagcataaacatctgaataaccagtaccatcgacagcggtttgccgccgaaggatggacgcaggtccgaatcagcaccaagaagtgcgactacagcgattgccccgaggaaaatccacattgccagccagttgcttttcggcagttttttatcgagcagcgtcgcggtatcaccgtaaacatactcacggttttccggtacggagatgaatttctggaactcttcgtctttatccagatctttaccgcggaaccagctgaagataccgatcgccaggataccgattaacgtcgatggaatggtgattgccagcaggtcgaggaactcaagatggcgaccatcaaaggtgacattactcagcattgcaaccagagacacgaccgcaaccgacaccggactggcgataatccccatctgtgcaccgatagaacttgccgccatcggacgttccggacggatgttgttcttaatggcgacgtcgtagatgatcggcagaatggtgtaaaccacatgacccgtaccgcaaagaatggtcagcgtacaggtcacaaacggcgcgacaattgagacatatttcgggttgcggcgcagcagcttctcggcaatttgcagcatgacatcaagaccgcccgaagcttgcaaggttgccgatgccgccaccaccgcaatgataaccagcatgacatcaactggtggtttacctggctgaaggtggaagacgaagaccagaatgaccagaccgataccgcctaataaacccagcgcgataccaccctttctggcaccataaaacagacatatcagtattatgataagttggatagtaaataacatgtgtgaaccctcgcgataatcctatttaaatttttgctgaatagatcacagtcacgttctgttttgtatgaactgttttcagagcctgactaaatatccgtttggtcgttaccggctttagcaaatacctcacagtgaatattggctgattaaagcagcggcaaatttatgcactgtgataagcggctttttcagagagaaagactctctggcgatgggtttaaagtttgtactgcgcagatgttaatgttttgtttgctgttatcttattgatatttatcggtctattttttgttctcagggcagatgtcattaggtttatagattaatctgatctacccatttgtgggtaaaaatacacataatgcgggtgacataatagttaattaacttttgttagcgttttgaaattaaaaacaccgttcacctgaagagatattaatttttagcgatgatggagggataattatatttgatctggcacaagttttactgatgaaggatgtaacttgtgccaggggtattttgcattacggtaataattattacttacagataaccagcgatccgttattggcaatattgtttcagtagtgagtagtgttctgcctgaatacggtaacggtaaactggacgccccgtgacgccataatggatactggtgaacaagatgtggcagttgaccaaccagatgaggtatttacggcaggaaacacgcgaaatgttaacctcgttggctagctcgtcggttgaaaactcatagtcctgatgcgcgtcaatccactggcacagcgtgcgtaacgtctgcggcgttaagccttttggcaagcgacgaggatcctgttcgttggagctgctgccgtggattagctgatcaagctcggcctggtcataatactgatgtttttccagcgccattttcttttgccgccagccggtgagcgcctcttcaaagcgggaagcctggaagggtttgatcaggtaatccacgacaccgtaatgcagcgaatctttaatggttgccgcatcggctgcggaggagatgacaatcacatcacttttgcaacgcgcgttatgcaggacaggcagtaaatcgagcccgttctctttttgcatatagatatcgagcaatatcaggtcgataggcgtatcgctattgaagataatctctttggctttctccagcgtcgaggctgttccacagcattgaaagcctgggatttgtgctacgtatcggcgattcagctccgcgaccattgcgtcgtcatcgataattaatacattgatcatctgttcgacctctccccgtcccagggtatctggacaaaaaattgtgtgaaaatcccgggttccgattccacggcgatgctgccgccgagattttctacctgttgtttgacaagtgctaaaccgacgcctcgctcgcttccttttgtcgagacacctttgtcaaaaatgtgatcgattttatcgggtgcgatccccggtccatcatcattaacttcacagtgcagccagccgtgacggtagtgcaatgttacgctaatttcgcctccgggttccggccctaatgcctccagcgcgttttctatcagatttcccaacgtggtaatcagcgtcgcgacctggtcctcactgccgctgtctggcagctggctttcactgtttaaaatcagcgtatggcctaaatcggtcgcgcggttaatcttgctgattaaaaaaccagcgataaccggagatttgatcttacccagcagagagccaatctcttcctgatagttattggctgttttgagaatgtaatcttccaactgcttataactcttcagatgcaataatccgagaatcacatgcaatttattcataaattcgtgggatcgttcacgaagtgcgtcagcatagttgaccagaccgtcgagtcgctgcatcagtttacgtacttcagttttgtccctgaaggttgaaatggcaccgatgataacgccattactgcgcaccggaacggtgttgatcagtaatagccggtctttaatcgtaatctcttcgtcgcggcgcggggtaccgtcgcgtaacacttccgagacatctaccacctgtgaccatgagtggcttagcgtcgacagtttctcatcgtcctgcgacttacggtaattcagcaattcttgtgcggcatcgttgatcagcgtgacctcgccgcgatcgtccacggcaacgacgccttctttgatagactgcaacatggcctggcgttgctcaaacagcgtggagatttcgtagggttccaggccgaaaaggatttttttcagtaccttaaccagaatgcaggtgccaatcagtccgaccagcatgccaaataataccgaccagataatgctccagcgactgtcattgatctgttgggtcacacggcttaactcaaggccgatcgccaccacgccaatttgtttatgattttcatcgtagatgggggtaaatacgcgtaaagcctgcgccagaaaaccgcgattgatagcgacattttcttcgccattcagcgctttaaggatgtcatcacctttaaatggctgaccaatacgctgggcttcaggatgcgagtagcgaagactttgcatatcggtaacgacaataaacagcagatcgttgcgtttgcgtacggcttccgcgatggcctggatgccactctcctgcggttttttctgcaagccctgacggatttccggcgagtcggcgagggtacgcgccactgccagtgccttgttggctagcccatctcgcgtcatatcactgatttgcgagaagtaaatcagatgcaccaccaatagcaccgagaacagtaccgcactgaccattaagatcactgtggtactcaatttcatcggacgtttgcgtaacatgcggtagggcaatgaatgtctcatcagcttccttgtgtgacaaatttcttaagcattatctctgatgaggcgggtaattcaaagggagtaagaatgattggctatataggggaagagactctggcaacggaaactgccagtgctgtatgaagattccggggctatgcttatagcgataatcatactgatgagagagggaaggtcatggatcaggcgctactggacgggggttatcgctgttataccggcgaaaagatcgatgtctatttcaacactgcgatatgtcagcattctggcaattgcgtacgtggcaacggcaagttatttaatctcaaacgaaagccgtggatcatgccggatgaagtcgacgtcgccactgtggttaaagtgattgatacgtgcccgagcggcgcgctgaaataccgtcataaataagcgagggtaaaatggaaatacgcgaaggccacaataaattttacattaatgacaaacaaggcaagcaaatcgctgaaattgtctttgtgccgaccggagagaatttagcgattatcgaacataccgatgtcgatgaaagcctgaaagggcaagggattggtaaacagctggttgcgaaagtcgtggaaaaaatgcgtcgggaaaaacgaaaaattatcccactatgcccatttgcgaaacacgaatttgataaaacgcgggagtatgatgatattcgcagttgatgggagagtacagattcacgatatttttcatgctctccgcggtgtgatgcaggagagcatctgaaaggtagggggatgcacaaagaatgggcagagagcgcgtttttttgtcccaagtcatcccctttactgagcaaaaaaaagaatatctcctatatgagaatcatcaatcggggttaataagttttgcgtcccctgagcgttcaatattgataggagtcatattatggaaggtaaaaacaagttcaatacttatgttgtttcttttgattatccatcatcttattcctcagtgttcttaagattaagatcattgatgtatgatatgaatttctcttctatcgtggctgatgaatatgggataccacgacaattgaatgaaaattccttcgcaataacgacatcgttagccgcaagtgaaatcgaagatttaatcaggcttaaatgcttagacttaccggatattgattttgacctcaacattatgacagttgatgactatttccgtcagttttacaagtagccaggaaggataagaagaacataaaaaatggcactattctctaaaatattaattttttatgtgattggtgtgaacatatcctttgtcattatctggtttatctcacatgagaaaacacatattcgtttacttagtgcattcctggtcggaataacctggccaatgagtctgcctgtggcattacttttttctctcttttaggagctgtagttgagtggacccgctggttatcgtgaaacgaagcgtctctcctcaaaactggatttgcggaacgatgaacgaagcagtcgcctgactgcttcgttcattaaagaaaagagaaatttatttctgtgggcgcatcgccgggaagagaataacgtcacgaatagtatgactgtttgtaaacagcataatcattcggtcgatgccaatacccagaacagcggttggcggcagaccatattccagcgcagtcacgtaatcttcgtcatagaacatggcttcgtcgtcacctgcagctttagcgttaacctgttcctggaaacgttcagcctgatcttctgcgtcgtttaattcgctaaaaccattaccgatttcacgaccaccgatgaagaattcaaaacggtcggtgatttccgggttaacatcattacggcgcgccagcggggacacttctgccggatattccgtaataaaggttggctgaatcagatgtgcttctgccacttcatcaaagatctccgtgacaatacgtcccagcccccagcttttctctaccgtaattccgatagattcagctaatgctttagcagcatcaaaattatccaggtcggccatatcggtttctggacgatattttttgattgcttcgcgcatggtgagtttttcaaacggtttgccgaaatcaaacacatgctcgccataagtgactttagtggtacccagaacctcttgtgccagggtgcggaacagtgactctgtcagttcaatcaaatcgtggtaatccgcatacgccatgtagagttccatcattgtgaactcaggattatggcgaacagaaataccttcattacggaagttacggttgatttcgaatacccgttcaaaaccgcctacaaccagacgtttcagatacagctccggcgcgatacgcagatacatatctaaatccagagcattatgatgggtaataaatgggcgagcagatgccccacctggaattacctgcatcatcggggtttctacttccataaagccgcgcgcgaccatgaactgacggatagcggccagaatttttgaacggacaacaaacgtttgacgggatttatcgttagcgatgaggtccagataacgttgacgataacggacttcctgatcctgcagaccatggaatttatctggtaaaggacgtagtgcttttgtcagcaggcgcaactcagtacagtgaatggaaagctcacccgtttgcgtcttaaacagcgtaccgcgggcaccgataatgtcacccagatcccattttttaaactgatcgttataaacaccttctggcaggctatctcgtgcgacgtacagttgaatacggccaccgacatcctgcaacgttacaaaggaggctttccccatgatacgacgggtcatcattcggccagcaaccgagacttcaatgtttaaggattccagttcctggttatccttcgcatcaaactcttcgtgcaactggtcagaggtatggtcgcggcgaaaatcattgggaaacgccacaccttgctgacgtagtgccgccagtttttcgcggcgatttctcagttcatcgttaaaatcaatagcctcattggctccccgtgtttcttgttcagacattttggttcctctaaatccagctttcaatttagcgtagataaagagacagatcggtacactgtattatctgcctcgactattagtaactcagtttatcttatcgaaactaacgcttacctcaagttgatatcactaataaataaccatcaaaatggtttaaatgacttattaatctcgatttgttagtgttataaactgaaagttaatttattcataaccaattgtttttacgacagttaatcgttgctctcctgtatcatattcgtcggcgtgctaaacagaaaacgggtagcaaaggccaatacgacgatgatcgcgacacaagccaacgtccactctcccatctgagaaaagaatcgctggtaagctgcaattgccataccgctaatttgcgactctgtcgtctgctgtgccacgacgcctgccagccagttggcgaccgcgcctgttgccagcatataaatcccggttaatacgccagacattttcagacgcgtgatttgcgcaatcgccaccgggtcaataaagagttcggcaaagcccattagcgccagcccggatatcatcacgcccattgacgcttgaccgtcagccgctgcatgtcgggcatcaaatgccaacaacataaagccacaagccatcagcagtaagccaaaggcaaacttcagccagacgcgcaatgttgagttgccgcggctttctggcgacgccagccaggccagtacaaccccagcgagcatcaccgcaattgcattcaccgactggaatagtgctgtaggtacttcaatattgaatgcctgacgattcacaaagcgatcgataaacaagctgatggtactgccgccctgttgtgccagtacccagaacaatgtcccgacaaacatcaacaatacaatttgccaaagagcacggcgatgttcggggaatttgatcatcatgcgggcaatgatttgtgcggcaatgaggcaaacgatcgccagcaaatatccggaccagtcgttctccagcagcagagtaaaaaatactggggctaaacagagcatcaccactaaccagctccatactggtaaggcaaatttgacactagtgagcgcttttttatccatactacgtgtggactggaaatgacgatgaccgcttaagaaaatcaacaaaccgataaacatgccgccacccgcaagggcaaagccaacatgccatccataccactgagcagccaggccgcaggcgattggggctgcgatagaaccgatattgcccgcagcatacagcagcgaaaaaccgccatcacgtcgatgatcgttctcgtcgtagagctcgccaagcaaacagctgatgtttgatttgaataaaccttagccacaaataatgattgccagcgccagatacaggctaaaggttgaatttgtatcaatacccagcgccacatggccaagggtcattaacagcgcgccggcaatcactgcagtgcggttgccgagcaggcggtcggcaagccagccgccgagaataggggtaacgtaaaccagagaagcatatgcgctgaacaggctgatggcatggttatcatcaaaaccaagctgatgggtgagatagagaatgagtaaggcacgcatgccgtaaaaactgaagtactcccagatttggatcgccacgatatagtatatcgcgcgcggctgtgagggtgttttcatgtgttctccttatgagcaaaaaagggaagtggcaagccacttcccttgtacgagctaattattttttgctttcttctttcaataccttaacggtatagcggccatcagcctgacggtatgcaccgtgaatatcggtttcaaagcccggatagtgagcgccgatttcacacagcatctgcaggaactccagaaccggacggctttcttcggtgatcatttcacccggcattaccagaggaactcccggcggatacggaaggatcatattggcgttaatacgacctaccatttcgtcgaggtaaacttcttcggtcataccgtgcagctctttctggaacgcagcatacggagtcattaccatcgtcggcagcacttcaaatgcgcgatacatcagatccggcagattgtggtgaacaatcagtttgtggatattttgagccagttcctgaatacgcatgttttcatagaattcaggatcttcacgatacagagacggcagcatgtttttcacacgcaggttcaggtcgaacgcacgtttgaagtcagtcagagcacgcagcaggctcagtgctttggtcttatcgataccgatgctgaacaggaacagcaggttatacggaccggttttctcaacaacgatgccatgttcgtcgaggtatttcgccacgatgctggccggaataccaaagtcgctcatggtgccgtctttttccatccccggagtcagcagggtgactttgatcgggtcaagatacatgtgctcgttatcgatgtttttgaagccgtgccaggtgctgtcagaacgcagcggccagcattcagtcgtatcgatatgatccggctgccaaacatcaaagaaccagccatcagattccgttctcagacgtttgatctctttacggaatttgatcgcacgttcaatggaaccgttgatcagacgcttaccagcattacccttcatcatcgccgcagcggtttcagtggacgccacgataccgtagtgcggagaagtggtggtgtgcatcatgtaggcttcgttaaaggtttcttcgtttacgtcacctttaacgtggatcatggaagcctgagagaacgccgccagcagtttgtgagtggactgggtttcgtaaatcactttcccttctacacggccaccgctcataccgcatttaccttcgtaaatcggtgagaagttggtgtaaggcacccacgcggagtcaaagtggatggatttcacatccagtgttttcttgatgaagtcggtgttgtacagcagaccatcataggtagagttggtaattacagcatgtaccggccaggttgcgtttggtgtttctttcacgcgcttagcaatggtagcgtgctggaattcactctgtgggataccaccaagaataccgtaagcgttacgggtcgggcggaaatagattggcgtaacatcgctcatcatcatcaggtgggtcagcgatttgtggcagttacggtcaatcagaatggtgctgcctgccggagcagagtacataccaacaattttgttcgcagtggaagtaccgttggtcaccatgtagctgcggtctgcgttaaagacgcgagcgatatactgttctgcttctttgtgtggaccactgtgatccagcagagaacccagttcagatactgaaatggaaatatcagatttcatggtattcggaccaaagaaatcatagaacaggctacctaccgggcttttctggaatgcagtaccgcccatgtgaccaggagtacagaaagtatatttaccttcacgaacatatttaaacagtgctttagtcagcggaggcagaatagtgttgatatattcgtcagtggtctgcttgatcttattagcaatatcttcagcagcacccagcgcatattcaaagaagctaatctgtaaacgcaggtcattcaggcttacatcgagagtggaatacgtattagcgaacgcgtacaacggcaggttctcgttcattttgctaatttcttcgcacagctcgagattatatttatcccagtcaaaaataacgccgcacagacgcgcattgttttcgatcagttttaataagtcgtcacggtcgttcgggtaaacaatctggaagttcagacgttcaagcgcgcgatgaagttcacggatgggttcttctttaaaataaacccccatgtgattcaatattgcaataacgttcatagtcatatctccaggtaaaaaaggcccctcccaacacatgggacaaaatgaaaggaggagcctcggaaaatacttttaattaatgtgcgttagacgcggtgtggttatccattgagtggctctggcgctcgtgcattttgcgagcgtagaacatcaggataatcaggctgacgatgaaggtacctgccagctcgaaggagcttgcgcccatcagcgcgatgaagcagaacacgcaacccagtacagagcagatcaggctgacaaagttgcggatgttaacgccttcaaaacgaatcaggtcaacgcaagagtagaagtacggcagcatagtcagcagtactgcgataccggtcagttcaccgaacaggtcagatgctttaccaccggcagagttcatcagagtgatgaggatcatcagggcagtcattttcactgcagccagcagcagaccttttttcggaataccgttgctgtcgacttcaccataaactttcgggaagttaccgtcgttagcggcacgtacacctgcctggcctaccaacatcatccaggagcccagagaagtcaggcacgcaaaggcggtgaatgcagaaaccagcggcgcagcccagttaccgaggatggttgaagcactgattgcaaacggagcaccggaagctgccattacagaagatggatacataccggaaagcacctgagtcgcagcgatgtaaacaatacctgctaaaccagtacccagcatggttgccagcggaacggtacgtttcgggtttttaaccataccagtacttactgctgcggattcaacacccacgaaggcccacaggcagagcagaatacttttaatgatcgcatgaccatcagtggtatccgcagtattccagttagctgcataagttgccgcatcaaaccaatgccagccaacaatagcagtcatcaccacaggaataagaaccagcaccagaccaatagtggttaaacggcttacccaggtaccgccgagcatatttacaaaggtaaatacccagacgatagcaatacaggcgatacccgccggaacaggatcatttaatactgggaagaaggtggaaagataagatacagcggtaataccaatcgccaggttaccaatccagttagcatggtaataaagaacacctgtctgaaaaccaaatgcaggggaaatttctccggcataagcaattgggccaccttgttgcgggttttttgttgccagtcgggcatatacatacgccagcgacattgcaccaataatagagataatccaaccccagatagcaataccaccgatacttgctaggttcgcaggtaataatgcaataccgctccccatcatattaccggcaacaacaccggtacaggcaaatagcccgatcttcttggcagaactcatgctcttctcctaatttcatttttgaatttggagtccgggtcatgatgtataactatttcctgaccagaccaaactggcgctaagaatactcacgaaaaaaggattaatcctaaagattaggtgaaataacacaaaagtttctgtaagtgagaacttgaggttttttattaacacatcaggatcgcaagttgatatcatgaaaagataaacattcaatgtttacaataaattgcggggcattctctggttaaatttatgtaataaaaattatgcagcaaataaattgccgcaacatattataccaacagtaacatacaaaaactcaacaacaaatattgccgagcataaatcaacccgggagttacttattctgaagcgagaaatttgtcgagataaggtacaacataaggaacagaagtctggaatataccattttcaatccagtaaagggtgtttgcccctgggcgtaaattaaaggcggtgagatatgcatcagccgcttcccggttcatccccttcatttcataaaccttgccaagcaatacataatttagccaggacatttcaagatcaatgccagtatttatcgcctggtaagactcatctgttttaccttttaccagagcactgaccgcttttatttgatatataatggacaggttattcaattccggtagtgtaacaatgttatctatttctgtgttcagtgctgctaattgtttttcatctaaaggatgttgagaatggcgcacgatatcaactaatgctttttctgctctcgcgtaggtaaattctggggatgattgaacaatctcacctaataattcactggcacggttcaatgatttatcatcgccatgcagtaaataatcatgtgcctgataaaaattagttaataacgcaccacgatgaggcaaaatttgctggagcgtctcctgcattcgttgtggccacggttggtttaacgcttttgataaactctccagtaaatcattttgaatcgccagctgattaccgttagtgatgacataacgtttatccagcatggttgaaccatctgcattgtctaccaattttatcgacataaagcattgttgagcacggtattggcgctgattaacaaacgcaatagataatgttttaccggaactgctcggttcatcaatgttgtagttgattttgtcatgcaccataaaggtggagaaggtgttaagtgatgtcgccaccaaatcacccacgcctatcgcgtaagagagctgatacggggaactccagctgttacaacttttatttaccatattaatgtcaatatcgcgtggattgagcaaaatacgcgatttgctcatcggaagacgtgtatcaagacttgaaaacgcgaccagtgctacacagatacctaacgacaacaggaaaaaaaaccatacccaaaaggtagtgaatcgtttgcttttaactggggattgttcaggtggcgttgcggtgttttgaatgttaagactgtgggagggagaatctgtggcaggagccgcctctggtatagggggaggcgaagatagcattatttcctctccctcttcttcgctgtaccagataaccggcaccattaatttatagccgcgctttggtacagtagcgatatagacaggactatcttcatcattatcttttaatgacttacgtagttctgagatactctgcgtcacaacgtgattggtgacaatacttctcttccagacattatcgataagttcatccctgctaagtacttcgccactgtgttgagcaaagaaaaccagaagatcgattaatctcggctcaagggtaagttgacgcccattgcggctaatttggtttatggacggagtaacaagccattcgccaacgcgaactacaggttgttgcataatagaaactcattcgaaaagggaatgatgcaatgataattgccacaacctatttttaccatctatagatgggtttatttacatattattggtgaatgcaagacgttatttttaccagccataaacttcttgattacatggtattaagaaaggattttactgagaaccagaagtaatattccttaccatcaaaattcatcatctttgccaaagaaaaatgttcagaaaataatccatggaaaattgtccggagcgcttactattttaatggattgttagtctttgcatgagcaagcggactgatacatttctctttgttctcattcagaaaatctcatcagtcggcgttcagaccggtgttgtgctttatggatgcgttacgctcctgatgacgtcatttgacgttcaacaacatcacggggccgcacgacatttcacgtcagttagtgctatcgctcaggaacaaattttcccgaattgggatatgcccgcaaattgctggtgatgtggggagaatctggttgagttcgggagaattgatttggaggcagaacgcttaaatcgtggcgtcctgaaacgaaaaacggacctccgtggaggtccgtttatatgaatttggtgcccggactcggaatcgaaccaaggacacggggattttcaatcccatagtgacaagcttctgataattaagagttcgtcaagtagtcaaaagagtttttttcatgtgcatccagtctcaacttataaatgagaaggatgtgcgtaatgaacattctgcccgttgtgtccaccaaaggtggcgaaggaaaatcaacccagtctgctaaccttgccggttttctggcagatgccggcctccgtaccctgctgatagacggagaccatgcccagcccacggcaagcaatatctttccgctgacgtatgaagcaccggccggtctttttgaattactgatgcgcacggctgacctcagccatcccgacaacatcatttcccgcacggctatcgacggccttgacctgatagtctccaatgacccccatgaacaactgaaaacggccatgcttcatgcgccggatggtcgcctccgtctgcgtaatgtgctccagcatccgcttttccagagctatgacgtcattgtggtggattcacagggcgcgcgttccgtcatgctggaaatgattgtgctgtctgccacggagtctgtggtggggatggtgaatccggttctgccggatgtacgtgagttcattcgtggcacagtcaacgtcatggaaaacctgttgccctaccgtgaactgggtatccccctgccaaaagtccgcaccctggttaactgcatggattatacggcgctggccagacaaacactggcggagctgaccgacattattaactccggtcgctacagcaaagtgcttcctgaaggcgcggtcaccctgctttcaacacagatttatgacctgaatatttacaaacagggacacgcagtcggtcagccggtgcaccgtcttgaaaaagcgtctgcccgtcgcagtgattctgcgctggtcaccatgcacagcctggcctgtgagctgttgccggagtggagtgagttttttgatgaactgctggaaaacggaggcatacgtcaatggtaaagccgtcgtttaaatccctgacaggtcgcagccggacagtgtgcgtcggatgtggttattccggtgtgcggtttggtgatgctgcaggtcaggacacccggcagtgggtgaaggtgaatcatgagagcgggctggggctgtgctcctgttgtgacgcctttcttttgcaggaacgccagcgtcgtcagcggcatgacccgcttttttcatgtggtgtttccggcaaaaagcgaaaagcggaggaagcggcatgacaattttggtaacgagcacctttgttcgcagcgaagtcatcaatgccggacggcagttgtgtttctgtattcataaaaattctcctttaaaacaatctgttatgagtatgcgaatgctgtccgtaccttctgaccggggtcgccaaacttaccggtctgaaaacgtacagacagttaccgggattttattcccgacaactgtacgtccggcaccctttttccttttttcacatagccaggtttccggcaatcagagggggagggtacgccatggctgaagtgtcagttctctgtgcatacgaagcagagcaggccgttctggggggcctgatgctggagaatgaacgctgggatgaagtggtgctgatgctgagtcctgacgatttttatgtggctcagcaccgggccattttccgtgccatgtccgaactggcggtgaatgaccagcctctggacctgattaccctgtcagagctcctggaacatcagggcaggctggatgtactgggcggttttgcttatctggccgagctcagcaagaacacaccttctgcggccaacatcatggcctatgcaggcattgtggtggagaagagcgttctgcgtcagttacaggccaccggaaacaccctgattgctgatgtggcggcaccgaacgccacatcacgggatgtgctggatacagcagagcggcgtctgtttgcacttgcgcagaacaggacgctccgggagcgcacggaagcctctctttcatccgcgctcgataccgttctgcagcaactggaaagtgtgctcggttccggcggtgtgaccggtacccccacgggatttgactgtctggatgagatgacctgtggcctgcagcccggtgacctggtcctgctggctgcccgtccgtcaatggggaaaacctctctggcactgtccatgtgtctcagcgccgcccggcggcgaacggaagagagcgttctggtattcagcatcgagatgccgaaggagcaactgattctgcgcatgctttccatgctgggacgtgtggaactgaatcatctgcgcagtggcaacatggatgatgaggactgggcgagggtgtcatctgcggttggcatggcgctgggtgacggaggaatggggtctctgggggagcgcctgataattgatgactgcagccagcagacaccgtcatcgctgcgtgccagtgcccgccgttatacccgcctgtacggtaaacccgctctgattatggtggattatctgcagctgattcgtgcgccggagctggaaaaccgcacccaggaaattgctgaaatttcccgttccctgaaagcgctggggaaggagctgggatgcccggtgctggccctctcccagcttaaccgtcaggtggaacagcgtgcagataaacgccccaataacggcgacctgcgtgattccggggcactggagcaggatgctgacctgattatgtttatttaccgcgacgaggtctataaccccgattcactggcaaagggggaggctgaaatcattgtcagcaagcagcgtcaggggcccacaggcacggtgcgggtcaggttcgacggtcgttacacactgtttacgccctctgaaaatgacggacagggaggatatgcgtgatggcacacaaaccactgaatctcggggctgccattatgcagcccggtcgtcaggccagtgctgccggtaatgtggtggcactgggggaaacccccatgattctgacgctggaccagttacgcccgaatccggataacccgcgcaccacgcgcaatccgcgttatgacgacatcaaaaactccattcacgcccgcgggctggatacggtgcccaaagtcacccgtatgccggacagtgagccggatgtgtatatcttcagtgacgggggaaacacccgttaccagatactgacggaactctggaaagaaacaggggacccgcgtttttaccgtattcatgtgctgttcaaaccctggccgggacggcttcagtgtgtgattggtcatctggcggaaaatgaagttcgcggtgaactgacttttattgagaaagcgcagggcatccacaaggcgcgcctgatttatgaagagcagttaaacaaaagtgtgtccatgcgggagctgtcgtcattactgacggagcagggactgccggttgacgcctccagtatcagcaggatggagaacgccctgaaatatctgtacccctggatccccgaactgatggagtcaggactggggcgacatcaggttacggcactgctggcacttcgtcaggacgcagagcgtgtctgggggcagtttgcgctggcgtccggcacggatgcggaatttgaccgtgtgttcggggaaagctgccggaagtttaattcgccggagctgtggtcactggagatgtttcgcgatgagctgatcggggatttgttgcaggcgctgccacatccctccctggactatgaccggtggctgctggagctggatccaaaagagcggaaccgccgtcaccattttggtgagccggaaccggtggtggtaccgccctcagtccgtgacagtggcacagggcagcccggtgcaccggtatcccgtacccggtctgaggcaccggagtgtctgccggatacggacgcagagccggtgccggaaagcactgcccccggtactgagcccggacagcagggtatcgcccgaccggagaacgctgtttctgacacagaccacactgaaaaatgcgggtttccttccccggaggagactgcagacagagcgccttcttctgccgggaaagtccggcgttcagagatacagccggatatgtacggtggtgagccggttttcagcggtgacgctgtggaagcggggattgccgggtccgctgtgccatccgttatgaccggcgatacagcgccgtccggaacacctgatgcacttcctgcatcggtgacgcattttgctgaaggacgggatgatatcgagcatctgcagaatgaggctttccggctggcatgggaactggctgaatctgccggctgtgctgaagaaattgccatggacagggaaagtgacctgtcggctggtttcgggactgcagaggagaaatgttcgccggtgacggcatttctggtggggctgaccggcgatgcgccgctgacagtgtctcccgtcagtctgacagacctgctgacaggtggcagtgcgccggaggcatggccactgctggatgatgaacatgccgtgaagctgctgcgtcttctgagtgtgctgcgccgtctgcgcgccctgcagcgcagtgtgttacccgaagatgatgaggaggatgaaagtgatgagtgatatgtcgcatcaggagcgcctggtcagacgggtcaggaaactgctggcgctgagccgcaataacagtaatgcccatgaggccgggctggcgcttgcaagggcgcagcagctgatggcgaaacacggtatcacggagcaggatgcgggactttcttcggtacagacgtcttcatcacagggggcaccttctgaggctgaaaaagttccggcgtggatgtttcgtctggtcatggtggtgtcacagacatttggctgcagggcgtattacgactggcgggagatgcccgggggtcggtatcgccggtgtgtgacgttttacggtttcagtgaacgtcctcaggtggcggcttatgcgtttgatgttctgtgccgtcagctgagggacgcaacggatgcgtatctccgtacacagagccggcggctgaaactgagcacccgccgtgcccgggccgcccagtttcgtgatggctgggttctgggcgttcgtcaggtggtgatgccattcagtgtgacagaagaggaaagccggctgatgcgtctctggctggagcagcaggagatggagacggtggactcccgggaggtgaaagcctgtcgcggcggtgacctggcccgctggcaggggtatgaggccgggaaaaatgcctcactgcatcatggtgtggggggaactgcccgccggatggtgccggggctgatgatacgggaggcgtcatgaataacagcttatctcaggcaaccaacggtctgctgatgcaactggtgatggacctcaagagtggctacctgcgtcgttgtgaatctctgggactggcccgggaggaaatgcagatgctgcagggactgaccattgaggaaatccattacctgtcgaactcggaagtgtcggttatccggctggacattaatcatgaaaacctgctgcgaatgctgcagcaggcccggacggagcagaaacgtctgcagcgcattgaccgtgcactggcgctggggggctccattgagctgatggcgttttactttggactttccagtgtggatgttgcggcgcgccggcgcattgccggtattgatgttcgtccgggacgtggtgtcacgctgagcgatgaggaaagtgcagagctgtggcggttatggcagaaggccggcatcacggatgtggagagtgcggacggactggatgtcatgatgctggctgcggagcagatgaatatcccgctgacggccatctggcacgcagtaaggggatggtgcgctgaccggcagacggagccggtaaggaatgcgtcatgaaaatgacagaactggcaccgggcattctggccagcccgtgcgttccgccggcctgctgtcgtaaggcgattcagatggtcagtctgttccggcagggtgtgcgtaattaccggcaactgaatgaccgggggaaccgttattacaagataaacgtcggacgcgcctggcgtctgctgagccgtaaccggggagaggcctgggaactgctcagccatgagcgttataacagcgccagacgtaaatgaaatgtgcaggccggaccggagtatcggggccggccctgttgacgacaagatattgcacaggaaattgactcccatgaatgagcttagctggaaagcgttgagtaaggcggtaaaaagatatcaggatgtgctgtcgtggagtcgttcagacagacacagtccgggcgctgagcgggaattagctgctgcagccggaaatatcaggaaggccattggtgatcaggaaattgacgtgattgtggaactggtgacggaactggaagatgcagaatggagaattacagtatacggcttcctcttattatggacgtgggcattaatcgccctgtacatcctgtatttccggtgaacaggaggcaaccaatgaacagtattcattatcaggcactgcgtgaggcagcgcaaaactatcagtcgatgctggcgtggtatgaagctatcccggatagcccagacgcagaggttgattgtgatgaagctttggctgcgtttaagcgtcaaattcgtcacagggaagtggatattatcgccgatctgctgaatgaactggaagccgcaaaaaagcgtattgcagaactggaggaagagaaagaaacgttgcgtccggttggtgttatgagcaggagagcattttggcggcttgagaatagagagtcacgatttattgcactctggcccggaccgggaatatgcctgctgcgtaaacgtcctgatgacggcgttattgtttacaccagaaccgacgccggcattggcgtgaagcagcaaaatgacacagggattaaggattaatcgaaaatgtttagccagccccctgcatccagcagggggctgtaataagcatttttgtaccggataaaaagcggcgatattgccgctactgaatgaggtgattatggcgttacctgcggaaagcctgattgcgtataccctggaaaaaatgaagtaccgtatggccaccggagcccggaaggaggaggggcgaatacgcagcggactgttgttcaccggcaatgtgcacgatgccattccgcgtcgtctgttgctggatacgcgtctttcaccgctggacaagatggcatggatgatgatccggctgtatgcgcagaataatgagggggccatttttcccacttatgacgaactgcaactgcagctggcatcgccgggaaagggaaaagcctccagagaaaccgtcagccgggtattactgatgttgcggatcacgggctggctgagcctgtgtaaacgggttcgtgatgataaaggccgggttcggggaaacatttacgcccagcatgacgagcccctgacgttctgcgatgcagaggcgatggatccacgttatctggatatggtggcagaagcctgtatgagccggaaccggaccatcagtcagacggcacgggatattctgggtgaaataaaaaatgatccgggaatgcgccactaccacagccatatcagtcagctggaagcccggataggaagtgcccagacaccggggcagatggccgcccgtcagcgggtgacggagggcagaatgcagccgggttcggaaaccgaaccgggtaaaaaaacggggcaaaaaagacagagttcggatcccgaaccatcaggaaaatcagcaggttatcacagagtccggaaaccgaaccattacgtacgtaatatcacacacagtgtgattaaaaacacgtacgtactgccggcgtcgctgacgggacaaattcgggaggaggatgccatcatgctgaccagtcagttgcaggcgttgccggaagcgctggcacagggggtgctggaaagcctgtcagggatgctgggcagtcagtcactgcagaatccggtgggctggctgcttgcggtgctgaaacgtgcccgggagggaaatttttatccggcgaaacagaaacagcgcgtcgctgtatcggctcccatgcaggcgggagcaggagatcgttccacttcgcaacctgttgtcacccggaaacgtacagaacccatttcagcagaacgtctgagtggcattgtggcagggttacgggcctccctgcgcaaccgttctgcgataagagcccggtgatggagttgtgctccacgttctcagagaacaaaaatcaatcagtgttgccagtggcaacagagagcaaaaattaatcagtgctgccagtggcaacagagaacaaaaatcaatcagtgttgcccggggcaacagagagcaaaaattaaacagtgttgcacggggcaacagagagcaaaaattaggcagtgttgcccagggtagcatagagcaaaaattaggcagtgttgctcagggtagcatagagcaaaaattaaccagtgttggcagtgccaacagagtgtaaaaattatgctgcgtcagcagcatggaaggcggcggcactgaatatcctgaaacatctgacggtaaaccgccgaagtccggcgtcagccggaaacaccctgacaggatgcagtgtttccctccagccctgccagaccctgtttgtttctgggaaaagccaggattgcataaagggaccggaagataagagtaaaacagaatacttgtcgccgtttttctcgtcagtatactttccgcgctgaaattttgactaaggaaggattttttatgaccaaaattaaaattctggcgctcagtatgctggccgccttatcagtaaacacggcttatgctgaaagtactctgacactgggggccggtgtcggcgtgattgatcagccttataaaggttacgactctgaagcgtatcttattccggcagtgtcttatgacggcgacagcttctggttccgtggtctgggcggaggatattacctctggaacgatgctgcagataccctgtcggtgatggcctactggtcgccgatgtatttcaaaccggatgacagcaatgatcatcagttacgccgccttgataaacgtaaaagcacgatgatggccggggtgtcctggtcccatcacacgccgtatggttttctgcgaacgagtctggcggcggatgttctggataacagtaatggtgttgttggtgatgtggcgtggttataccgttatgtgaatggcggattcatcctgacaccgggtattggtgtggagtggagcagccagaaacagaacgactattattatggcgtatcgcgtcgtgaatctgcgcgcagcggtctggagcggtataaagcggataatggctggtcaccttaccttgaagtcagtgcaaattacacctttgccagcaactgggggatctacggaaccgcacgttacagccgcttatctgatgaagttaaaaactctcccatggtggataagtcatgggatggactgttttccaccgggatcacttatcgtttctgatatcggtatgatctgatgctcaccggtgccggagcacgggcaccggtgtactgaacttccctttcttccccatttttctgtgccctgaatctggttttctgttgttccttctgcgcttcgtcctgacgatctcactttatccctgattgttataaggaactgatatgagtgaagataaactgaaccagaaagaagtgcgggccggtgcattgcagtcctcgctgttcattctgttacatacccattatgcaatccgcctgtgggaagggcgcttacccggacgagagtccgggaatgtgccccggattatgagtatgccgcaggcaataaaacgagcaggggggatttaccgggattcccaggcagataatccctatgccgatgaagctatgtggaaggtggaaaatgcaattaatgctgccagtgaaaaagtacacgctctggttggctggctggagcaggttctgtgtgccgtgccggcgaatattaccatgactgatgttgtatcccgttctccattaaatattggggtttacagtagttctccgctgggttatcgctgcgtctggctgcttgtgggatatgatcagatggctctgaaagcgtttcaggcatctcactttggtctgatttcccggcagaaacgggacgagttactgtcacatggtgggtatcttatccggaaaatttacggcattttaagggggtattatgccatccctgtcacgcgacaggatctggaagaaaaaacaccggcgggagaacaggcgatggcacgcctggggcttcctgctgctgagattatgaatggtcaattgcgatcatcattttctcccccactgaagaaaaagaagaataaatagtgggggataaatgcaactttatttgtgtgaaaaaccgtcacaggcgcgggatattgcccgggtgctgggactcagcgggcggggagagggctgtattgaaggcgatactgttacggtcacctgggctgtggggcatctgctggagctggccgctccggaagcgtacggggagcagttcggggttccctggcgtatggagtcgcttcccgttctgcctgaaaagtggcagatgacggttaaaccgcagacgaaatcccagtttacggtgatcagccgcctgctgaagcgtgcgtctgaagtggtgatcgccacggatgcggacagggaaggagaagtcatcgcccgggaactgctgacgtactgtcggtaccgggggccagtccgccggctgtggctgtctgccctggatgaggccagcgtccgggaggcgctggcaaatattctgcccggtgagcagacggcccgtctgtatgatgccggcctggcccgtggtcaggctgactggctaatcgggatgaacctgacgcgtctgtatacccttaaagcccgggtgtcggggatcccggatgtgttgtccgtcggaagggtacagacgccgacacttgccatggtggtcagacgggatcaggagattgccggttttgtgccacggccctggtggcaggtgtttgtcggactggagaaagacgggatccggttccgggccgtctgggtggcggcagagcagtactgcgatgaagagaaacggtgcgtgaacgttcaggcggcccgggccgttcttcagttgtgtcagcagacaccgtcagcggtggtgcatgaggtgacccggaagcgtgaaaaaacaccggctccgctctgtttttcgctggggacactgcaggaagcctgctcccggaaatttggtatgggggcgcagactgtgctgaatatcgcgcagtctctgtatgagacacacaaggccacgacgtatccccggacggactgtggctatctgcctgaatccatgcaacaggaaagccgggaggtactggcggcaatggcgcgctcagatcctgccctgacgccggttctggcacagctcgatcccggttttgtttcacgtatctggaatgacaaaaaaattacggcacaccatgccatcatcccgacccggcaggtctttgatatcagggcactgagtgaagatgagctgaaggtgtatctgctcattcgccagcattatctggcccagtttctgcccctgcaggagtctgatattaccgatgcaacactgacactcggcgggcaacggttcagggcccgcgggaaagtgaatgtggtgacgggctggcgaggcctgttttccggggaagcagcagaagatgctgaaggcgaagatgaacagacgacggaaatggcgttgccggcgcttgaacggggtgaacactgccggattagcggttcagaactgaagggccggatgacgtcacctccggcaccttttacggaagggaccctgattgccgccatgaaaaatgctgccagtcaggtcagtgatccgaagctgaaaaaagtgctgagggagaatgccggtctggggacggaggccacgcgggccggtgtgctggaggtgttatttgcccggcagtatctggagaagagcgggaagcatatccggtcaacgcaacggggcagggaactgacggccgccctgccggaagccctgaccagcccgggcatgacggcgctgtgggagcaggctctggatgatattgcacagggcagaatgtcactggatacctttatgggcagacagcagcagtgggtgcgtcatctggtttcatccggacgggaacagcccttcagtatgacggtgccggtgatgccgccgtgcccgctttgtcaggggccgacccggcagcgaaagggaaagcacgggctgttccggagctgtcagcggtatcctgagtgtaagggtgtggtgaacacgcagaaaaaggccgggcggcgaaaaaaaacgggaaaaactaaaacggagtaatcttaatttctccctgttcaggatcgggtagtgtggttaagctttgatgtatacccccgttatcagcgggaggctgactcaacgaaaacacaacggcgttcagtcagctactgataccacaaccggccatcgcacatcctgccgggttgtaaggcgcatgccctccgtgaaaaccgcgccgggatttatccccggagacaagtgagataaccaccgggctggtacccccctgtaacggcgctgtatttgcagcgccgttttttattccgggttgactttccgtggatgtgttttaaaaataaccgggcttctttgctgcatctgcagccagccaatgtttcagcagtctgagagaaacgccttcgggtgactgccagccaacgtttcaccggcctgagagaaacaccttcgggtggccggaatatcctcgtagcctgaaagaggatgcctgtgggcggtacatccgtttaacctctggaaacggatatcactgttcagtgattgaggtctttttacttctcagacagccggaattcagctgatccggcatccccgacgggaacattcactcccgtcagggacggtgatgttctccgtcatcacattttttaactccatggagaaatcatcatgtctgtaaatactgccaaaactgaatactttaatctgaccctcaaaggtctggggtatctcagtaatgtacgtcaggtgaatcaccagaacggctcgtttctcagctgtgtggtgaatgcgctgagcggacccacggacagcccgtcctacgtccgttttgatgtcacggttgccggtaaagaggcgaccgccctgattgcccgctgccagaaggcggtggatgaagatcgcaaggtgctgcttggcttcacgctgagcaacctgtccactgacattttcaccctgaacaagggagagcatgccggtgagcaacgcgtcagcctgaaggcccgcctgatcaaggtggactggatcaagataggccaggagatggtttacaaggctgaaaaatcagactccctgccgccacaaaacggcaccatgcaacagcaatacgcagaaaactctttctgatcgtacttttctcaaccgttctgatgaaaacagactgcctcatcagggcggtctgttttcttattgtctttatctttaaggaaacttcccatgcaacagccaaatggcattctggccgcacaggccggttatacgttaccccttcaggttctcagcagcgtacgtggttattatattggtactcagtgtgatgagggaccggtgtcccgcgaatccgtggagtattacagagaccatgagcaggcggtacaggcgctggaaaacggcacctggacgcagcggacgtgtgcgtgaggatgaggagggcatatggcgtcacgcggtattaataaggtgatactgataggacatcttggacaggacccggaactccgttacttccccaatggcggcggagctgtggcgaacctgaccctggccaccagtgaatcctggcgtgataaacagagcggtgaaatgaaggagcagaccgagtggcaccgcgtggtgattttcggaaaactggcggagatagccggtgaatacctgcgcaaggggtcacaggtgtacatcgagggccagttaaagacccggaagtggttcgatcagcagaatggtgttgatcgctacgcaacggaggtggtggtgagtgtcaacggcaccctgcagatgctgggctctccgcgccagcagggcagcggtgtcgcacccgcacacagcggtcagggaactgccggtgcaccggcgggtaactcaccgtcaccggcttccgggaacggcgggggaatgccgatggattttgacgacgacattcccttcagtggaccaggatatggcgctgaacggcggattatccatgccatgtaatgttaaccccggaggcatcactgcccccatttttaccaaggaggtatcgtgagtgaaaaaaatcataccacccccacgccacacgatgcggcgttcagggcgatgatggaaaccccttcggttgcaagggattttctggaagctgcgttgccgccggcacagttacagcggtgcgatatgaacaccctgaagctggagccggccacgtttgtggatccggatttgcgtcagtatgccagtgacgttctgtggagcatgaaaaccaccgacgggcgtgatggttacatctacgcgctgacggaacatcagagctctgcggatcgttttatggccctgcgcatgatgcattatgtgctggcgataatgtatcgtcacctgaaaacgcataatcaggctcccgttgtgatcccggtgcttttttatcacggtgaacccagtccgtatccgtacagcctgaactggctggactgtctggacgatccggcgcttggtcgggagctttacggcgaaggaaagccgccccgcgttattgatgtgggtcttcttgatgatgagggtatccgctgctatcagcagatggctgccctgatgcttctgatgaaggtccgtcagcggaagggcgatctgatggcgcagcttgactttctgtcacagttgcttcagatacagggaacacacgatcaggtggtggttctgttaaactatatgatgaaggcgtgcgattcggcttcaccggaatttatacgggcgatggcagaacatctgccccggtatgaggatgatattatgactatcgctgaacgacttgaactggcgggtatcgaaaaaggccgtcaggaagagagagaaaaggcgcttgagaagacgcttgaggctgcccgtcggatgcagaagatggggatgtcgcctgagagtattcaggagatcctgcagctttctgatgaagagctgcagaaagcgctcggttaatccgtttccgtattatcacggggcggggtgtggctgatatgagaggccactttccgcataatcaacatcacgccagcttttacgctggcgttttttttgtttactgataatgagttgttcgttgagcctgccggcgcttctttgcacagtgaccgctgttttatcactgcagaggagttatccggatgaagatgcaacccgggatcttattttccctggttaccctggccctgctggccgggtgtaacagcccacaaaaacttcagcaacgtgcgccggccatgccggtaccttccgtcagcgtttcccgcaatgtgcagccggtgtcacaggatatttatgcgcaggcggcaccggaggtggtgcgttacgaccgttacctgctggtcagcacggcaccacaggcagcgcagcgtgacccgctttcccaggtgattgatatccgtattccggcatcgttaaagcccactgtggccgatgccatgcgctatgccctgaaacagtccggttacacgctgtgtgccaccgggccggctaatggtgtgctgtaccgccagcccctgcccgccgtgcagtatcagcagggaccggtacgactgcgtacagccctgcaggtgatggcgggaccggcctggcaactggaggtggatgacgttcagcgtgtggtctgccacagcctgcgggcggggtatcagttaccggcaggccagctggcacccgtaccggcttctccggcaatcatggtcccggtggcgcaacctgccaggggaggcttcctgaaaaaatgagcgaacaacaggagatgatgacacctgttccggcagataaccccacaacacgccggtattcacttctgcggggtgtggcagtcggctccctgagcctgctggttgtggtgacgggcgtggcgctgtatctgacagggcgtggcatggcggagatggatacccgtctggcaacactggaacaacagcagggggagcgtctgacaccggctgcgctggccccgctgcagtcacgactgagtgaactggagacgaagctgcaggcggagagtgcgcgtctggcgcagctggcccggcagcccgttctgacggaggttcagcagatgcagcttacggaactgccggcgtcccttgagcagattcaggcagcacagaaagccctttccctgcggctggacacactggcggcactggcagagaagccacagccccgggctgttcagtccgaatccccctctgcttccggcaccgggaaaaaggacgtatccggaacgaaagaaccctctccggtggtacagaaaactgcccgccctgcaacagcacgtacaggtatgtcgcacactttccgtcaggcactgtttgtgctgaccggcaccgagcgccggggggcgcagtcatatgcggcggtggcaccccggggatataccagtctgtcgcaggtggcactgctcggggaaggtgagagtgtggccggctggacactgattcatgccggtcacgaacaggcgacgttccgggtgaacggacgtcaggtacaggtcagggtggagtgagtgaagatgagactgaaatccctgttactggtgatgctgatacctgcactggcgcaggctgcagaccagaacacgaccgtgacggacgcgtcccgtacggatacgtcacagcatacgcagagcaccatgcagtcgctgcaacagcaggctggacggtgggggctgagtgaggaggactgggggcgttatcaggcactgatggcggggccccgcggaatacagtcgccggggctggacccgctgacagtactgggtattgaggcccggacaccggctgagcgccgggcgtatgccgaaaagtgggtgaaggaagagtatgcccgtacggagaaggaactggcttttcagcgggaggttgatgcggcatggcagcgtctttatccggggcggttgccggtgagtatgggtaatgccggcaataccggaggcagactggccttgtttgtgaaggcgaaggactgtgcgtcctgtgatatccgcctgagtaaggtgctggcatccggtaagccggtggatatttacctggtggacagtcaggggaaagacggattgcttcgtcagtgggcacgtgagcacaacatcccaccagagaaggtccgtagccggcatatcaccctgaaccatgatgcggggcgctggctgcgttctggtgagggacagatgccggtggtactgcagcagggggcggacggatggcgcgtggctgcattctgaccgttctgctgatgctggcaggcagcggtatgtgtcaggctgttgcgcagaccattcctgacgggtatgtgcaggtggcccgtgcacacggtattccggcagaagtgctgtatgccgtctccctgacagagaccgccatggcgcccggtgatatggccggcatcatgcagtattcccgccgcgacgggcgtcttccggatgtctcccgcccctggccctggacactcaatgtggccggaaaggggtaccgttatgccagtcgcctggaggcctggcaggcactgcaggtgtttctgaaacgttatccggccagacgcattgatgtcggaatagcgcaggtcaatctggggtggaatggtcatcgttttccgtcaacatgggcggcctttgacccgtacaccagtcttgagacggcggcggtcattctgcaggagtgccgtcagcgccatcccgacagctggctgaagacagccggttgttatcaccatcctgccggtggaaagccggccgcccgttacaccaccgtggtcagacgtcatctggaccggctgaatgcaaaaggtatgacgccacagcagacagccatgctggcaccggctgcggattatatctggacagagccccggaggcgtgaatgaacagactgagactgattactttttattttcctgtatggcttctgttttcagcgagcgtcagtgctgaactgacggtgattgctgacctgggcggcagggatgctgctcctttttttgagggtatcaaccggcaggcaccggcttctgcaccggttgtttcaccaccgcctcttctgcagggggaagcggcgatgctgccggtcagcacaccagaaatgtcacccggcgaggtgacaccacgcccgcttcagctaccgggcatcggtgcacttttccttgtgggggatgatgcgtattcccgtgagtggctgcagaaaaatgctgctgcgctccgggcgcgtcatgctgccggaatggtggtgaatgtggctgatgaaaacggcctgcgcacgctgcgtgaactggctcccggcgtggcgatggcaccggcatccggttctgcgctggcccgccggttacagctgaaatcttacccggtgctgataacggacaacgggctgtcacaggaggtggtgccatgatgcaggcacctgtgataaccgcagccctgctggtcagcccggtgctgatggtctgtctggtgttctgcctgctggccgtgttgctgatgcttatcctgcggggagagtggcgaaaacagaaatgcgcccggacccgccgtcatcagcgttgccgcgccaccgccgcccggttactggccaggctgacactgtggccggatatcgaactggtcagcggtcagcgtctgctgaaactgctgaatggtacgttactgaccgataagggagaaagagaatcatgagtatgccactgctggcccgtgtgcaggcaaatgttccggcctgggcaaatgaacaactggctgcatgggatgccgcagagtttgcggcaatgtcggattttattacggaacactactggacgggacagggcagtatcaatgtgtaccgcattgtggggactgaccatccacagtatgccggaatgacctggctggagctgctggagcgcggtaaacgcatggacatcaatatcccgttactcgaaaagaatccgggatattacacgcaggcagagcaacagcatgccgggatgagttttgtcagcacggatggcattcactggtatgtcagtgctgacggtaatcaccgcagttgtctggcccgctttctgtttcacctgcagggggaggggcgcacacagcttcacaatgtggcccagagtgtttatcacacagaccaggcgttccggtctgcctgtcgggagattcacaacctgacagaaccgttgtcccggcatggtgtgtatcttcgtctgcagacccggcggcagtgtgtttcccgcgaagacctggcctgctggaaagtggaccgtttcagcacagaggcgcagctgacagtggatgatgtgcgtgcaggcggacatgacaggacaccagtgtataaggcattactgctgaatgcggcagacgcatggcgggaggtgatggtgttacagcgcagactggaggttctgtccgcatcaccggagaacgatttgccacgctcatggtggctgcgtcttttacagagaggaacccggtcatgagtaaccgctatgtcattgaggccctgctgcgaccggcggtggagctgaacactgccgtggtggcggcaacggcggccggtgtctgtgtgacggctccctgggcggtggcgctgaccccctctgtcagttatgccactgctgctggttttggtgttctggcagcggtccgttttcgccagggaatgaaggttatccgctaccgtcgcaatctgcggcgtctgccccgttatgtgatgagtacccggcagatgcccgtgagccgtcagcgcctttttctggggcggggatttcgctggacacagaaacacacccagcgccttcaggatacgctgcgcccggaggtggccaggtaccttcagcccggctggctgtaccggatggcccgtcagcttgagctgaaaacggagcataccgtcccccgtctgggcgcacttttgcgtcaggactctccgctgaatccggtacgccccctgccgccggtgggcgggaatccggccctgcatggtattgaaccggatgaacaggatgtgacactggcgctgggagagcgggtgggtcacaccattgtttatggtaccacccgtgtcggtaaaacccggctggcagagctgctggttacacaggatatccgccggggagaggtcaccattgtctttgaccccaaaggggatgcggacctgttgctgcgtgtctgggcagaagcacaccgtgccggcaggggcgatgagctgtatatctttcatctgggctggccggaaatctctgcccgctataacgcagtggggcgttttggccgggtgtcggaagtggccacccgtgtggcggggcagttgtccggtgaaggaaacagtgctgctttccgggagtttgcctggcgttttgtcaatatcattgcccgcgccctggtggcactgggagaacgcccggattacacgctgattatgcgctatgtgaacaatattgctgacctctatattcgctatgccggaaaggtggtcagtgaacagatgccagaactggaaagcgccattctgaataacatgaatgtgctgggtgaagatgatgtgccccggaccatgcagaaccagccggatgctgtgcgtatctgggctattgaggtggcgctcagcagtgaagccgggaagaaactgtatgacccgatactggatggtctgcgaagcgcagtacgttatgaccggacctatttcgataaaatcgtggcctccctgctgccgttgctggaaaaactgaccacaggaaagacggcagagctgctggcaccggactacctggatatgagtgatacccgtcccgtgtttgactgggaacaggtgatacgtaaaaaggcggtggtgtatatcggtcttgatgcgctcagtgacagtgaggtggccagtgccgtgggaaactccatgtttgcagacctggtgagtgtggccggacatatctacaaacacggtatgaatgccggattgcccggtgccggggagagtaaaaatgtggtcaacctgcactgtgatgaattcaacgaactgatgggcgatgaatttattccgctcatcaacaagggcggcggtgccggtatgcaggtgacggcgtatacccagacgtcttcggatattgaagcccgcatcggtaatgcggctaaaactgcccaggtacagggtaacttcaataacatgattatgctgcgcgtcagggagaaccggacggctgagctgctgaccagtcagctgcctcaggtggagatttacaccaaaacactggtgtcggggcatcaggataccgccgatgtgacgtccggacaggattttacctccagcacccaggaccgcgttggcacagtaaaggttcccttactggagccggcggatatcgtcaccctgccaaaggggcaggcatttgccctgctggaaggcggacagttgtggaaaatacggatgccgctgccggcgccggataaggacgatacgctgatgccggagagtattgcaaaagtggctgaagccatgcggcgtcattaccacaccggagagggatggtggcatgaagccccggccgtgaatgtgccggaaggagacggacatggctgattcccgtcgtgatgtggaccgtcctgacgccgcacaaccgccacgccggcacgggctgctgtataacctgctgtgggggtggccgtggacactggccgggatggtactctcttccctgttgctgagcctgctgattgagtacgtgggtattacgtttttctggcccgggcagggggccgggcacagtgaagcggtcatgaacaccgagctgggctggttatcctcggaattcacccgcagtctgctgctgtccacgccgtcagtgacggtgatgaagtgggtgtccacggcgtaccagtggctgtttgtggacagcggatttatggcctggatgaagcagggggctttggccgataacagtgtgatacaggaagtggataccctgggccgctggctggcgcattacctgcatgattacctgatggccacggtatatgtgacggtggtgacgctggtccgggtgacgattctggtactgtcagtacccctgtttgtgatggtgtcactggtggctgtggtggaaggtctgggaagacgtgacctgcgtcggtacggtgctgcgtatgaatccagttttgtttatcaccatgccagaaagtccattaaaccggcgatatacattccctgtattctttatctgtcctggcccacggcagtatacccgaacctgctgatatggcctgcggccatgctgctgggggtggccatcactgtgaccatggcgtccttcaagaagtatttataacccacagatgccggacatcccggtgcaaaactggttttgtgccggggtgtcggcagacaagccacgtgacagtcgtcagtgcgcgtcagtgtgctgttttatttacatgtcattatctgacttaattccgttttttgccagcccggatgtcggtgcaaatgtgtgagtttgccagccaacaccatcagaatccttgctcagcgccggaaaatcttccggtgttcagccaagccgcttttcccgtaaaaattttcagttctgtaaacagagtttattgctgacctgtttccctgccttacgcatcctgtacgcaccgtttaactctgaaggaggtgcgtatgcgttcttttccggcatcagtctgtcgtgccggccgtctggccggggctgcggggatgctgtttcttttcacccttgccatacccgttcaggcggctgaacaggatgaactggctaccgccatgcgccagcttgaccaggtgcaggcggcgctggagcgggcccggggggccgctgggcagtccggcgcgtctgagccaccccgttacttctttgattatccccgggcgcgtgccgatctggagaccattcgtgatggcatcgatcgctatctcacgccttcccgggcccagccccgtacaacgtcagccgtgaacggtcactacaggcgggagcgtccctgatgggcatgtctgccgtgcagtcttccgcctttaaagcggcttccggggaaatggatatcagtgccctgcatctgctgtcacttggactgctttttgccgtgctctttctctgggcggcctgggcgctgctggatgtctgggcgggctggagtaatgagaaggtccgcagcgcaatgctggggcgcttttttatccggctggctctcctgctggttctcagtatctggatgtttgccagctgaggtgagttgttatctgaatcatgattatgaggattttgtgtttatgaagtggtgttttcgttttctgaaacgtcttgtttctctgccgcacacaatgctgttacgcctgtggcagaccgtgttttcagtgtgtctgttgctccggatgagtatgcaaccggccctggctgatttgccccagatggagccgccgtcatcgggcggtggcagcgggctgttcgggcagattaaaggctattcccaggacggtgtggtgctgggtggcctgattatttctgccattgctttcattgttgtggcgaatgctgcgatttccacgttttcggaaatccaggatggaaaaaaatcctggacgcagtttggggccattgtggtggtgggggtgatcctgctggttgcggtgatctggctgctgaccaaatcggcctccatcattctgtaaggaatacgtccatgcagaccattcattttttacccgatcgcctcaacgtggagccggccgtgttccgcggttttaccacgccggagctgggactggccgcactgaccggtgccggtctcggcctgctctggccgttaccgctgcttccgctgaccggctgggtgattatcccgacaggaatgatggtcacgccgctgctgctgatctggtttggtggaagctggatcacccggatgaagcgtggcaagccggataactggctctggcagcggctggaggagaaaaagtgtcgtgccggtatgggccgttcatcgctgattatggaggcgcagggctggtccctgcgccgtacccggccggtaaggagcgttttatgagtcgttttcgtcacgcccttcaggacagggaccagcatatccgcagcctgcgcattatcagtaccgtactggcaggatttctgttactggcctgtattggctggatgacagcccccagtcgcctgaccattcataacccgccggatttgcgttccggcagtacccgtccgtggtgggaagtgcccccgtcgacggtttactccttcgccttttatatcttccagcagttaaatgcctggccgaagaacggtgaagtggattatccggctaaaattcatgccctgtcagcctatctgacgccgtcatgccgtgaactgatggagaacgatgcccgccgtcgtaaggatgcgggggaactgctcgaccgcgtgcgcgtggtgtatgaaatccctgagcacggatacggtgggcgctacaacaaaaatccggtcaccgtacagggccgggataactggctggtacgtctggacctggtggcggatgagtattttcatgccgagccggtcaaacgtgcgctggtgcgttatcccctgaaagtggtgcgttgggagggggacccggagcataaccccttcgggctggcgcttgactgctacagcagcacaccacaacggctggaagccgcgccggtggcttcaggcccgggaggtgcacagtgatggcagtcaccgtccgtcatttcctccggaatagcctgatggcgcttccgttactgatacccccgtttgtgctgcatgctgacgaactgatgaagtgggagcgtattccgttatccgtacccctgaaggtggggcaggagcgggtgatttttgcggacaaaaatgtgcgggtgggattcccgccggcactgaacggtaagctgcgggtgcagagtaccggtggtgccgtgtacctgaaggcggacagtgcctttccacagacacggctgcagttgcaggatgtggagaccggggaaatgattctgctcgatgtcaccgccggtgaacagggaccttctgagccggtacgtattgtgtatgacggtgaggtcagcacggtcagtcaggcgactgacctgatgaaaccggcgtcctcatccggtaaaacctccgccggtcagtcgcgggcaccgggacaggatgacggtacgcaggcccgtcgtcagccggttcgttacagcgcgcccctgccggtgttactgacccgttacgctgcccagtccctgtatgccccgctcaggactctggaggcggtgcctggtattcacccggtcagtcatcacctgcccggacgcatcaccaccctgtatccgtcagagcccctgaccgtcacgccactggcggcatggggcgctggcggacgcacggtggtggcgctgaagctcatcaacacgatcagccgtaaggtggtgctggaccccagggcactgcagggaaactttgtgaccgccaccttccagcatcgctggctgggacctgcaggcacaccggaggacaccacaacactgtatctggtgacagagggcagaccggacagggcgtttatcgcagagcctgcccggcgtaacgccaccgcaggacgtaaggccggggaggtgagccatgcagattaaatccaacacgctggtcaaatttgtggtgcccgttgtggttgtgggcggggtattcatcgggcttaaaagctgtggtgatcccgcgtcgtcatcagatccgtcagcacagcagacacaggtcctggggactctgtctcaggaggaactgaaggcgctgggtgttgagggtgacacgccggaagataccctgcgcacgcttatcgggcgtctcaatcaggtacgtgaacgtcagcagacgctggacgaacagaacagcagactgctgaaggagaatgaacaactgcgcaaacgcggaacggatgtgtccggtcagctgaacgatgccgtggcaggactgcagaaaagttatgaggagaagcagcgccagttacagaacgagcagaacgccctgatggcaaaggtgcagtccctgacggagcagctggcgcagcagggtggcagcagtaaggcaaatactgacagcgatattcccctcgggctggggcttgacggactgagtggttctccgggaagcgcggtgtcacagggggccgatggcctgatgtgggtgacgccggctgaccagtcacagcctgacccacgggatgtggcagggggcaaaagtggtccccgtttccccacctcctttctggatgataacccgctgacccgtcagaaggcggcgtatgaacagcaggtgaagggatacagtaacgagaaacaacaggccacccaggccaccacacaggccgtctacaccctgccggagaatgccaccctggtcgggagccgggcaatgacggccctgctggggcgggtgccggtcaacggcacggtgacagacccttatccgttcaaggtgcttatcggtaaggacaacctgaccgccaacggcattgaactgccggatgtggaaggggccgtggtgtccggtaccgccagtggtgactggacgctttcctgtgtgcggggccaggtgaacagtatcacctttgtgtttgctgacgggcgggttcgcacgctgccggcaccggatgtgaatggcaccaccaacagcaatcagcagacgaagaacgggaataacaccggcggcattggctggatttcggatgaggacggcattccgtgtatcagtggcacccgtaagtccaatgctgccacatacctgcccaccattttcggtctgtctgccgcgggagcggccggtgaggccctgagtcaggggcagtacaccacgcagaataacgtcaacggcctttcttccacgctgaccggcagtgccggggaggcggcactgggtaaggcgatttccggcggaatgaatgagacagcggagtgggtgaagcagcgttacgggcagacgtttgatgccatttatgtgccaccgggaaaaaggctggccgttcacatcacccgccagctggcaattgattacgaagaccagggccgtaaggtgcgttatgacttcaccctgccgggagaggcggacacacagggtggtctggactgaaggagaatgagatgaaaccagattgttcacgcctgcgtgtttcaggcagaacgctgttaccgttactggtactgacaggggctgtgctggccagcggttgttccacgtcaaaagaggaactgctgcccgccggggagcagacgatgctggaaatctggcaggggcaggcgggcggcggaagcgcccgttctgctgcgacagcccgtgacacactgcggcgtccgctgacagaaacggaacagcaggacgcggcgcagacggaccgcagttacagccggacacaggagagtgaaatcagccagcagtttccacgcctgcccaacccggacatggcgatgtatgtctttccgcaccttgcagaggggaactcaccggtaccgggctacagcacggtgttttcattttacagccagacgcagtatgcgatgcccggtgaacgcacggcagcgttctgacggggcggatgagctgagtgatggtgccggcatgatgccggcggtttatcaatgtatgttaagggggcaaataagatgggtttcccgctgtttaaaaagaaagtgaaaccggcaatatctgcagagacgactgtgccagcagaatacgcgcagcattccggagtcgatgacgccggtactccccgtaacctgagccgccccgggcgaatgacccgccgggaggaggcgaagatttaccatgcgggcccgtccattattgattttctgccctgggtggaatacctggatgaagcgcagtgcctgctgctggatgacggggggtcggtcggcgcggtgtatgaggtgacaccggcagccacggaagggcgcacggcagagcgtcttgagcaaatccgtgacacggtggaggatgccctgcaggacagctttgatgaatacgacacccacccctgggtggtgcagttcttctgtcaggatgaaaatgatgtggatgcgtatcttgaccatctgaaggggtatgtgaagccccatgcgcagcgcaccgcttttacagaggcctggctgggcgagatggaacggcatctgcggggaattgcccgtccggaagggcttttcacggacacgctggtgaccggtcagccctggcgtggtcagcagcgacggacccggatggtggtgtaccgccgtatcgggaaaaacagccatgacccgatgccgccggtggcgatgctgaaccaggtgtgtgaacgcgtggtgggggcgctgggcggggcgggggtgcgctgtatccgtatgaacggtctgcaggtgcatggctggctgctcaggctgttcaatccccgaccagagtgggtggacagggacacactgtactgtctggccactcgcgcggcaccgcaggaggccccggagggcatgatgccggtgatgaccgactttgcggaaagtctctggttcacgccgccggtgtcggatccggaaaacggtgtgtggtggctggacgggctgccgcatgccgccgtggtggtggagaaattgcgtacacccccggaggcagggacgctgaccggtgagaaggcccggggcgaaaagacggtgaatgccctgatggatacgttccctgaaggcaccatgctgtgcatgaccattgtggtacagccgcaggacacactcgaggagcgtttcacccggctgtcaaaaaatgcagtcggggagaacacagagtccatccgtgcccgtcaggatgtggccaccgtgaaggaatatctggggaaccgccacaagctttaccgggcggggatcagttttctgttacgggcagaggatatggacagcctgaagcgtaagcgggtggccctgaccacagcactactgggcgccggtctacagccggtacgtccggagtttgatgtggggccactgaacagctggctgcgtgcgctgcccatgtgttttgatccggatacggacaggaagcagtggtacacgcgtctgatgtgggtgcagcatctggctgggctcctgccggtgaccgggcgggagacgggcaccggtcatcccggattcagtttctttaaccggggtggggatgtgctgacctttgatccgctgaataaactggaccgcacccagaatgcgcacctgctgctgtttggtccgaccggcgccgggaaatccgccacgctgtgctcctcgctgtcgcagatcatggccgtacatcgcccccgtctttttattgctgaagccgggaactcatttgggctgctggcggattattttgagagtctcgggctttcggtgaacaaaatcagcgtgaaaccgggcaccggtgtcagcctgccaccgtttgcggatgcacatcacctggtggcacagggacagaccctgcaggatgtggatgaacagacactgccggatattgatgatgacacgcaggatgagagcgaggagcagcgcgatatcctgggagaaatggagatctctgcccgcatgatgatcaccgggggggatccgaaggaagagacggcactcaaacgggcggacagggcgatgatccgcgaagcgctgctgatggccacacacgccacgtaccgggaggggcgccagatgctgccggtggatttgcagtcggcactgtgggaaatctcccgggacagtcagcgaaatgaactccggcggacgaaagcggcagagatggcggaagcgctggggatgttcacccagccgggcagttttgaggcggagctgtttaaccgggagggggcgctgtggccggaggcggatgtgacgctgattgacctggggcatctggcccgtgaagggtatgaagcccagatggcgctgaccatggtgtcgatgaccaacatgattaacaacatcgcggagcgtgaccagtatctggggcgggatattctgtttgcggtggatgaggcacacattgtgacggtgaatccgttgctgtccccgtacatgaccaaggtggtgaaaatgtggcgcaagctgggcgcctggctgtggctggccacgcagaacctgaaggactatccggatgtcgccgagaagatgctgaatatggccgagtggtgggtgtgtctgaccatgccgccggaggaagtgaataacattgcccgctttaaggccctgacagaggagcagaaagcggtgctgctgtcagccggcaaactgtcggggtgttacacggaaggggtggtactggcgaagaaggtggaggcactgttccgcgtggtgcccccgagtatttacctcgcgctggggatgacggagaaggaggagaaggcggagcgccgggcgttaatgaaagcgcatcagtgcagcgaactggaagccgcatttcatgtggcccggaagctggacaggctgcgtgggctgactgacggggagtaagacgatgctgtgtctgaaatatccggagccggaagaggtttcacaggggcatcctgccggaagtgtgtttgtgctgccgccacagggacagcccggtgccagtagtgccacccgggataatcttgagcgtctgcgcgggcatctgcagaagcagctggggccggtgacgcgtatctgttgccagcctcagcgtgtgggggtgaacagcagcgtggcggtggcactggaagggcggtcgggtcagcaggtgaatctcctgctgacggtgagtggccatgagggctggccgtcggaggcggaatatgcgcatccccgctggtatatcccggtgaccgatgctgctgatttgtgttatctgctgctgtggctggcagagttaaagtgagggggaggtgtaccatttccgggcatccgctgaggtgcgggggatgaaaaagtctgaaaaataaatcaggctattacaaaaggtggcatgtttttattactattgtcgggcagacacttttattttgtatgcagccttataatacactttccagcattttccatttgccgcactccggtgcggttttttatttctgacgctggcagagaaaggaaaaatctcaaaatatcattcaggggttgaaaccagctgaggtcaacgggcaaaatttacgggattttgttgtttcattgtttatcattactcacaggacgatttgcccgcaggagaggcgggcttttttttagcatatcttcgcatgagccattgccatactgctgactttttttcgcgcttacgtcacaggtgatggctcagtcgaagatatactgattgcagagatgaggtatggcggctcgttataaaatcacggcaacgataatgaagcccggtaatccgccggtattctggacccgttactccggaaataaaatgacccggacagagtgtgagaatatgttttccattccaaaagagcccggccgctcttttggcgataaggtcaaagtgcaggattttcggtgtgtggcggttgagaacgaaaaagtctgaaaatatcacgctgtaataaaaatgaatgttatatggtgataacatttcgcccggccagttaactggctcgttatgatatgaaacatgaatgataatctccttgtattgagacgtaatttttccgggcctggttgcccggtttttttatacatcagcagagtgaatatgtaaaagcccccctcatccggtatttctgaacatgaaatgaccaatgaaaagtctgaaaatgccactctgcaataacaaggtgcgttatatggtgataatatatccttcgtcagttgactggctcattatgacatgaaacacaaatgatggcctccttacattgaaacgttagatttccgggcacggctgcccggttttttttattacggaatacaaaaaaatccgaaaattttatctgacgcggggagcactggcacacgggtatagggttgcagtatcatcagatgcataattacaccttcctgcatttgttgagttttttggtttagtgcatttgtaccccacctctgtatgaggtggtttttttattccagtaaacacggtcgccggatgagtctgctattacgatacaggaacgggacgtacgggcagtaaaattcggtgagttttaggataaggcgttatcacaggggatgtcagcttcataattaaggttaatcagaaacgtgataacgccttatccgaaaagaagagagtgttccctcaggtgtcagatttccaggtcgtcaagaagagggaacactctcagttttccagatggcatacctatgctatgagcatcttattttgatgccttatggcctgacaggcaataaaaatatagtgtaaaaaattcctaatttcagtgtgccgtgattcttccgggtaacatactgttgaattattttctgaaagcttttctgagcagagcgcccgcggttaataagccactgcatatcagtatgagcagaattgagatgccaaaagcgggaggtgggcattcccattcattcgggcattccccgttcagataaacaatgtatgtgctggtcgcgatataacccgcaatcagtattatcagcaccagtatggtgttaaatattttatacatcgacatactccgtgattgtcctgtgtcctctccggaatgctgacagcgctttgagctgattgttcatgaattttacctgttgttcttcccgttaattttcagtttccggttttgaatttattgatgaccttcccgatggttctgcgcacgctgtcagatatgtattgtctgacggagtcattccatgtaccggaagctgttgtattcctttcttgccctgccggtgatatcagttgccggcactaccgtttataccgacccggcacatctgccggttaatccgccccctgatgtacaggttgtgttgctcgacgggccacagcaactgcaggatgctttttttggtccgttgccggctgaccctgaagccgctgaggcggctgtccgtgagcacatgcagtttcctgaatggcagtctgtacaggctgaccttgcagaacgttaccgccaggtgacccacgcctggtcgctggggcttaaaaaatacccggcggtggtgttcgatgaccgggaagtggtgtacggcaccaccgatgtggcacaggctgaacgactcaggagtcagggaggccagccatgacgggtctgcgaacacgacgttatgctggcgcatttttgttgtggacagcgactgtttctgtggccggtgcttccctgaatacggcacagatagtggccggtgctatttctcagagctgcatcagctggcgggtcagcggtatctgttactggctgcactgctcctggtcggggtgtcgggtcagaacgtccgtgaaggtctcacattttatccctgaagcagtggtgtccacctataccgcaccgggcggtaatccctggcgggaaatggctctggtcagtcaggcatccggcggtgtggagaacaccatcagcagcgggattgtggggttatctgccggcgggggaaacccggcagatatgaaatcgccggggcggcgtaaatctgccatccgtttcaaatacgcggatgcactgggacatccggccacgttgcttatcgggggcagcattcccgggtattcgtgtgagtctgctgccacaccactgaggccttattttctcagcacactggacagccttgcctggcgtaccggcatgcctgaatccctgtatcccgaagccatgatacccggcagacgtgagctggggaatcagcgcaatgcggacatgtggggaaatatctacccccgttccggttttgtcagccagaccgatgatgacaaagcggcagccctggtggcccagcgggtggcggatatcatcacccgcaccggagagccccacgtctatcagtcgctgaaaggccgaaaaaaggatggctactggccaccggatgcggtggaagaaaacaccggcacccgtaatcacaagtggcagcgactgaccccttccgtttcttcatcctgcgccgtgtttccggatggcagtcatgccgcgccggaggacggtaatgccgcgtttgccctgtggcgtccctacagttgctgcaaaaagcggggccagaaattcctgggcagtacgaatttttagaggaaagcaaatcatgaagcataaacctaaaccacaactgataaatgtcgtggcactggccgtcatgctggcctgcagcacaatggccggcgcggcggagaatgaacgcagcacgttcggtctctccctgccacaggtgaatgacagtgccatcgggtacgggaaatccattgatggtgccatttcggacaaactgttttacaccctgggaggcgggtcagtgatatcgcagccggcgacccggagcaacatgaagaagctcggggtggatattggctggagcagcaacctgatgtgcggcaactttgacctgaaaaccacggtgagcaatcagctgaacggggtgacggacggttttaaaaacctgatgggggatgtgatacagggggcgacgggggcggtggccagtctgccggcgatggtcatccagcgggctaatccggggctgtatgacgcactgactaacggggtgttacaggcaaatgtggcgttcgacaaggcacagctgaactgtcagaacatggcgaagcgcatgatggagttctcggacagcagcaagtggacacaggctgcggttatggaggagtacaagtcactggtcaacagtggtgaagcggatgccattcgtattgatcatcaggcgcagaattttaaaggaaattcaggacgtagctggattggtggtcagaaacggggaggtgcagggcaaccagctatccgtcccacacatgatctggctgcagcgggttttaacatgatgaataacctgccggttaccagtacatcaacggtcgggagtaccagttgtaccggaagtgtgtgcagtaagttcagtaatgctgaagaggcggcaaaggcggtggtgaaagtgctgggtgatcgcactatgcgaacctgtagtaaagcaaatgaatgcaccagtggtggtgaagagcagcagtctggtgcgatcgccggaaccggattcacgccgatgctggaagaagcggtgaaagtgaatacggagcaactggtaaaactggttaatggtactgaaaaaccgacagcagcaaatctggctaaactccggtcaggcagtctgacagtaacggccggagtgattaaggcgctgcaacgggatccggataatgctgcactgaccggacgtctggccggcgaactggcaatggcggatacggtggagacggcgctattgatgcgcagaatgatcgtgacgggaatgtctgaaccgaatgcgatgttacaggatgatgcattggcagagggggagcgtcgtattgaagcgctggatcgggagattgccgcgctgaaaaacgagatggagctgaagcgtgaactggcccgcaacagcgtactgaccattattgagcgtgagaatcagcgagttggcgttaacccgcagacggaaagtgcagacagctctgatacccgaattaatcaactggagcagggaacaggtgaagatgaataaatgtaacgcccgtcagcgtctgaaagcggtgctgctcacaggcggtatcctgctggcatttatggtggtggcgctgttcattgcggatatggccattcgtcatccggaaggaactgccgcattcagtacgtggatgcgggctcaccgttctggctggctgctctggcgtctgtgcatttatatcctgctgggttggggtatctggcgtatcgcgcatgcgccgggattccgggcggaataccgccagccactgatacgtatctgttgcgccagtgtggcgtttattctggtctgtgaatacgcgctgctgaaggcgcagggaggctgatgatgacaacaaacagctatcttgaatattttctgaccctgctgggctggctgattaataatggcctgtgggatgtgctgctggggaccgggctgtttgcactgccgctggtatttaaggttattgggatctggctgcgggtcagggaagaaggggaggatgaggggaataaggggctgctctcgctgccccgtattgaacatgcgctgtacatgggattctttgtgattatcagttgctgtgtgccgctggtcaatgtcagtctggggactattgagtatgacggcaaccgtgcgaagcagtgcgggacatggacaccgaaggcaccggataagaccgggtatgccggtgtgatttccagcatggacggtaaaacggcgcagatcccgctgtggtggctgatggtgcacaaactttcaaaaggggtgactcaggccgccgtggcatccattccctgttcgcctgatatgcgacagatgcgttttgaggttcagcatacccggatcaacaataaggcgctgattgaagaactgcaggatttcaccaatgactgctactcactggcgctgtacagctggaagcaccaggatcagggaatgacaacggataaaaatacgctgcgggatattgagtggattggcagcaggacatttcaggcgcgttattacaatgaactgcagtcgaagatgccgagaagtgcgtttccgtggaatgcatcccgtgacagtggacgcccgaacaccggtcggggtggttacccgacctgtaatgagtggtggagtgaggcggatgtcgggctgaaaagtcgggtgatgaagcaggctgaccccggtatgtggctgcgtctgtcagcaacgatgaaaatgatcgggaatacaggcaaggagtatgaagaagcggtgatacgccgtctggtcagtccggtgaatatgacagtgtcacatggtggcagagcctatgctggttatggtgggaatgcggatttgtcgctggataacgctgtgagccgcgtgttctcaacggggggcgtggcgctggggagtctggcggcgtttccggccctggatgcgatgcgacaggcattacccatggtacaggggatcctgttgatggctatttacgtgatgttgccgctgattctggcgtttgcggcgtacgagataaagacggtgattacactgacgtttgtgatttttgcgactaatttcctgacgttctggtgggaactggcacgctggctggattcatggatgtttacagcgctgtacagttctggaacgcacagtcgcttcaatatggcagggtttcagaatacctcagatgacctgattatgaatctggtgatgggcagtatgttcctgattctgccagcggtctggatgggggcattatcctgggccggggtgcagattggagtcgttatgtctggagctattgcaaatggctcagaaggagctcagaaatcagggggggcagcagttgatttatttcagagaagttttatgagcggtatgtctacaccaacaccgccgccgccacaacaagctcaatcccaaaacaataataaaaagttataacgataaaatcagagataagggatttcccttatctcgtttatttttgctcgtcatcaacacggatgaatccgtaataatagccgtatccttgattcccattccgtagttgtactcctgatacatattgagagtctcttttgtattcagaactatttccaacttttccatttgcatgctgaaggatatatgcaatagcccagataaacgccagacacccgagaactgccgtgatactgaagagtgcacaaaccacaattccggttaatccaatagccaacggaagccgcccagtccaggctggcaggtgtttttttctggccgcatgaacccagaagttgtcccaccgacgaagggtttttacaagttgtttccactgaatggcaaaccgttgtcctctgagataagcggctttgttagtcgttttcataagaaaaactcctaattttcagtcctatgtgatgaatttaatgttcaaactataagccatttttgtataaatataggtgaaaaaccatacagaatctaccgataaatgtctcaaaaggaggtgtaaatgttgagtaaaaaattgttattggtttgtgtttcatgcctggcgttaactgcctgttctgttgatgaaattgcttcggttaacaagcaaattagtgatggtgcttttgctttaacgggggcattgcgtggaaactcatcgtctacggattcaaatggaatgccatttttagctcaggcgcaaaaaccagcgacaaaatccagtacacaggaatattctgtgcctgttgatattgatactgcagctgcgcgtctgaagcgatattatcagtttgtatcaaatgatgaagttgatgctattcgtaaaaaagacagaaatggtagttgggtcgctggcgcaattacagatgcgaatcaggaatgggaggctatgccgggaagttattataaaatggggaatgactggaatgaatacgatcatctgactattgagcttgaaaaaaatggagcagggagtaaattatacattacatttaaatccccatcggacaaacgactgaatagtgaagagcttaagaaattaatgttaaatattaaaggtgttgctgaaggtacaatcaggtaattatggagggattgtgttgaggaaaattcttctcgctttattaattatagtggtggctgttttatcgttcgatttcggccgaagctgggaattatccaaaacagcggagtattgttcttcaattggcaaaaaattatctgatgctggtcctgcatattgtgtcagcaagtgaattttatgatgagaatggaggtggtcctccattctctgatatatagactaaaagtcttttgttcgatataaatcctgacggcactgaaaacaataatgaactcgtcttccttgcttattgttccacagataactttttatctggttagagccacagtaataacactttattccattttttgttttcgtatctgggtgaatgcgccagtattcctccagtgtaggataattttcagtccattctctgtcatcaatttgtataacataccacaacagcaataaaacaagtagagatgaaaatataagtaaaatatgtgagtaatgtacattaaaaacaattattatggtggcaaggcttattatgtaccacccccatgacggaagtttttttaatgttttcccaaaacggtacgccttttcttccattggatgtactttatcattcttctccatgagcaatgcctttttaattatagaacataattcaaattatagagtttgtgtgtgtaatgggaagtcttgacatataaacccccatcttgctagtctttttccgctttaatgtcgctgtatgcgaccatccaaatccccagtagtctgagaggggagccttcgggcggctaccagccaatgctttagcgatctgagagaagcgccttcgggtgatcgtaatgttctcgtagcctggaagagaacgccttacgtggcggtacatccgtttaacctctgggaacggatatcacggaacagtgattgaggtcgtgctggcctgaggccagttgttctatgcaggcatcctgcagatgccatgattctttacttacaggcttatcacgcctgcatatcaatacgttaagtctttcagagacatatctgaacgaactgacgtctttaatctgttcgggcattcgccccgggcttcttacgactgtacgcacggcataaggccatctgaaatctggccgcttgcgtgcgtatgtggagtttgaagctgcgcggcgtcacttttgtcggcgtgtaacgatgacaaagtgacgcatgcgcgtctgctttacgaacccgcacaaaccgtcgcgtcacgggatgttttttaacatttgaagaagtgaccagacgtgagagtgttttttcaaccttctctgcaaacgtacagacgataccgtgaataacgttcatctgccgttcttcttgcagaattttattgttttttaaggagttttatgtagtgagatgccgaaccggcgataccacttattaggggtggtatcgggggcgacctggaaacaggtacagcgaatgctgcagtcggtgtgcaacaccggtttgttacccctcaatacctaaacagtctgcgctaccctggcgctcaggcactcattacccgaaggatcgcaacgattaaccgtgtcgccagggagaatgcagatgaattttgctgttgtgttcacggcacaacagcaaaattcatctgctgtacgtacagctgtttaagacaaagaggaggtatctgtgtccagacgtgaaaaattactgaaacaggatttggttgctcatatccggaaagaccgggggagtttcaagaagctgagtgactattcccggatcatgcaccggtttgcggaaagactggctaaactgaatatacagatcagttctgctgcgcaggtaaaagtgcgacatattgaattatatatgaacagcaggagtgacgtttcaaagcggaccagagaaaatgaaatgtctgcaatacgggttatgttacgtcaggccggtaaacataaaatggcagatcctgaacatccccgtctcagcaataaggcgttaggtatttcaggaggaagccgtaaaggtacaaagaaattaattacggatgagcgtttccgggaaattcttcagcgcgtggaagcaaaagataaaggtgtggcagctgttgttaaactgtcacgttatctcggtctgagaaatgaagaagctgtccagtcggccaaatcgttacggacgtggaaaaaagcattacagcggggagatgaaaaaataagagtgatttttggtacgaaaggaggacgggaaagaatgacaacggttgttgaccgggataaagttcttgatgctgttaattatgcactcaaatatgccagtgaacataatgaacgtctgatagacagagataatcttaagtcggcaatggattattatcttaatacgttacgacgttatggagaactgaaaggcggagatgagaccgcacacagttttcggtacagttacgccgcaagtgccatgaaatatcatattatgaatggttacagttataaggaggcacttgcactgacatcaattgatcttggtcatggcgatggcagagggcgatatattgaacaggtttattgtcagttattaggctatgagtaataacttatatcgattttgtgcgggtaaatatcatggattgtactgttttaatgaaaataatctctgtaaaggagattacaaaagattcgcctttgtggtcacactacctggcgcgatatattgattccggatatcaggctgagtttgaatgtgaaggaacagcagataaatggggcatctatgatgaatgggacatctgtgagtcgattgcggattattttgacgtggtgggagattttgactgtgatgaaccgccccgggtttcctggagagtgttttatctgtgaactcaggctgccagatcattgtttccgatggaagcataataagctttttctgcttctgccggaggagtatggcccagccttcccagcaatcgtcgattgttataccagtccacccacgttagtgtggccagttccacttctgcacggtttttccagctcttacggtgtattacctccgctttgtaaagaccattgatgctctcagccatcgcgttgtcatacgagtcgcctgtactccctgttgatgccagtaatccggcttcttttagtcgctccgtataggccagtgacacatactgagagcctttatcgctgtgatggatggtgccagacggacgacgggcccacaacgcctgctccagcgcatccagcacgaatgtcgtttccatagacgatgagacccgccaccccacgatgtatccggcaaacacatcaatgataaacgccacatagacgaagccctgccatgtgctgacgtaagtaaaatcagccacccacagctggtcaggtcgttctgccacgaactgacggtttacgcggtcgcctgcggcaacggctttccggctgatggtcgtacggacctttttaccccggagaacaccggcaagtcccataaccgccatgagacgtgccactgtacatctggccaccctgattccttcccgtaacaactgacgccagactttacgcacaccgtacacctgatgattttcatcgtatacgcgctgtatctctctcttcagccagtcgtcgtgctgcgcacgggcactgcgtttatccggatgatgtcgctgttgctgacaatggtaatacgttgacggggcaatatgcagttcgctgcataccggtccgaccccgtactgctcacgcagcttatccagcagtggcatcattttttccagaggcggtcgaactccgccttcgcaaaataagcggaagcctggcgaaggatatcgttactgcggcgcagttcacgattttcacgttccagctctttcagacgctgacgttcagcgctggtgagcccaccatcaccgcccccggtatcccgctcatgctggcgaacccagacacgcagagtctccggcgtacagccaatctttggggcaatggaacaaattgccgcccactgtgagtcatattcatcctgactttccagaaccatacgaatcgcccgctgacggacttcgggggaaaaacgagtatttttagtcatcctgtttacctctttctcagggagtttagtctccaggatttccggggcggttcagtgatgtcagacgggcgggaagaaaaatactgatgaaaggtacctgtgtttttcctctgggagaaccggttaagggcacgcataatattcctctttgggtcgatgttgaataacttgacattcatcttttgtgacttaaaaatgtacaggctaactttgtcaccttcgggtgaccatccaatgtttcggtagtctgagagaaacgccttcgggtgactacagttatcttcggataaccatccaaatccccggtagtctgagaggggagccttcgggcgactaccagccaatgctttgacgatctgagaaaagcgccttcgggtgatcgtaatgtctccgtagcctgaaaggggacgccttagagggtggtacatccgtttaacctctggaaacggatatcacggaacagtgatcgaggtcttttatacttaacccgtgcgggagatacattcccgtatggtgattgtatctccggttttactgtggaggtacatgatgccgttatcttcttttgttcaggagctgctggctccctggtattcttttcgatctgtctgtcggcgcattcttgtggcttttccgcaactgcgggcaactgtattgcgtacccgctggtatctgtcgttgacagggcaacgagaatattgcccggatgtctggtttgatggcagtgtgtaccattgtgctgtgttggtgcgggaatgtcatgatgcccgtaaatcagtaccaaaggtgcagtactatatccccggatatttttcttcgtatcgttcagcataccggacagccaggagaacggcgattgcgctggcgacgataaaagtgtcgtgcagggctgtctgattcattattaccgaaccggagcatcagcgttgttgtgatgcctccatcccctgacgggtgtttttgtccgtcggggcgaagactcccgtttctttttacaggagtctttatgtcaacgtttattttgtgccctgaaccgggcatctcttcttttttccggcgaatgacggctcagttgcgggtgtttttttcccgcaataacctgtcatattacagtcgctggtacaccaatccggccggcaatctgagcgtccgggtctgtatgttccgtcgtggcggtgtctggacaccctgtctgtactaccggcagggaatgcaccgcaacgcgtacacaggctggtatcagccgttgccgcgtgaggtcatttgtctgaaccggtttaccgggcggatatcccgtcgcaggacctggcatgctgcctgccgtatggcggaacaactggccaccctgcgttaccggtttggtctgcaggctgatgaaagcgtcgtacaaccctgctgatttatcatttattaccctgtcgggaacacgcttcccgcagggggtgttcccgtaattttttatctctgaggtgaacacatgaatagtctgttaatactcctttacgttgttatatggcgtgtctgcaccattcttcgggtaatcgcacccgtgtcggctgtccgtgcgtggtgtgagtatcaactggaaggtatgacgatacttcgtgatgcgtacagctcgctggcaaaggcggctggaatgcagaatgaagcatttgaatatcttaaaggtattgcacgtcatctgggctacgaaagcggtggtgaccaactgaaatcagggcttttccggccgtttctgtggcatatacgtgcgaaaggccacaggctgggggctgtcatggagatggaggtatggaagacatggaagaacggctgtaacgatgtctgcaatccatgggaggatatctacaatccatgggagcgtggatggaacgatggctggactgaatgtctgaatcaacgtgtagccggcatcctgaagcaggcctgtgttgacttttccgacgcagactgaacggtttttcttttacttactgcaccgtgtgtctgcgccggtgttttccctgacgggagttttgttccgtcaggggcaggacttcctgaacagacggaggtcattatgtactcacccttacttgttcattattcagcactgcagacgcagtccgctctgctggcgcatatcagccagctggaaggtgagctgatgcggttacgcgcctggcaacggctgggtattaccccggagccggatgatgagacggagccttcactggtctgcgtgcatctgtgggataccggcgaggcgctgggctggctgctgtatgacctggagcaggagaacattcctgctccgggagttcaggcccgtcaggcgcttgacagtctgatggcgctggggcgtgaaattaatcatgaaatctggactgacagtatcagtaccggaaagctgacggccggagcggatgcctgtttggcccggcacgacatgatgtagttcataacctgaccctgacggggtgtgccctccgtcaggaaggcattccccgtagtttatttttaatctgaccatgaggaatgttccatgtctgaattatcttcacgtccggcccgtaagccggtggtatatacccttgagcaggttgccacaataccggaaaagcagtggcatgcttttgttctggccgtaacagaaaccttctggcagttgccggaggcgttacggccgcagaatgcgtatttcggctccctgacccgggcgtctgagttgtttccggtaacggacacactggcgttttacagccggtctgcagacgggctgtggtcggtgaatgtcaccattgaacgggagtatcgtcagaacattctggtgcttaaggagctgaatttcggacgccagccgggggatttctttgcccgtacggtgtttgtgctgctgcacaatctgtgtccggattgtttccgtattcattccactgccggtggtgccagctggtcactgccgctgaaatggataaaacggtacctggggcatgagaacttttctgcaccggagtctgtattaaccactccggtaaggggagatgcgtttgaccgtttactgctgcagtttctgtccggtcaggggcgacagttatccccggatgactggtcagcgctggaagaggctgaacatcagctttactggctgcgggcacttgccggtggacactgacagaacaccgttgtttcttttcatttacccggaataacgccatcgcgtattccgtcattcatataacccggcagggacatatccctgtggggagagtccctgcgttattcaggagaattgttatgggactcgatatttactttatggctcgtgataaccatcagaatggtgccgttgtggaaacacaggaacatcaggaagtggggactttccgtaaggtgatgccgcttctgacatggttccgtaaccatactgatgcttcagatgagcagcatactttcccggtaacacgccggtcactgactgcattattgcgtgacctcagtatgctgacgccgggaaactgccacagcctgtttccttatgtcagaaactcgcgtttacggggggaagactatgctgatgactactggtatgacgtgaatgacgtaaaagcgtgggtcagcgatacgctgaggacgtttgattttgaacgtcgttcactggtgatgctggcgttgtggtaagtccggcctgtctgattttcgttattaatttaaccgtacggtgcatgttcaccgtacggggagcatgcatcttttttatggagcgtgctcttatgaaaacgaaaaaacatacttcacgtgccgtgaataaaacgccggaacgtgacctgtatcaactggtgaccgacaggattgtgacggctattgaaaatggtgtgccaccctggaaacgtccctggcgctctgcgcgtaacggcgcgggcgagccggagatgatgccggtaaacgccctgaccgggaagccttatacgggcgtgaatgtcctgttgttgtggctgactgcggatgaagccgggtacgccagtaatcactggctgacgtaccgtcaggcgcaacaactgggtggccacgtccgtaaaggagaggtggccacactggcggtgatttacaaagactggaaaagacaggccgtggatgaacacggtaaccggctgacggacagtgagggggaaccgctcatggaaacggtaccggtactgaaagcgaatcctctgtttaatgtgggacagtgcgacggtttacctgagcatctgatggtgaaggcggaaggcagcgcggatgcactgccggctgataccatcagtgagcgggtgctgccggtactgaatggcagtggcgtcagtgtttcgtcacttccacaggacagggcattctaccggcctgacactgaccgtatcgtgatgcctctgtcgtcacagtttgactcagtggccgattactggaccaccctgctgcatgaactggtacacagtaccggtcatgaaaagcgtctgcggcgggccgggataagttcttttgccggtcgtaaaagcccggaatatgcgttcgaagaactgattgctgagatgggcagtgcttttctgtgcgcacatctgggaattgccggtgacgtacagcacgaaagttatattgacggatggcttaacgtcctgaagtctgacaaaaaagcgctgtttcgcgcctgccggcaggcacgtgaagcatcagagtatttactgacgctgcggacttcgcaggcgcgggtcgcataatctgaaccgctggcggagggggtaacctgaccgccattcatcccgtgagggcattgttcctcacgggacagtgccctctttttacatctgacaaataaaagaggagcgtaaaccatgtctgaatggtgccagaatcgttttgaaattaccggtaagtcagtctgcctggatgtgctgacgcagtggattgaaggatgtgagacaccgcgttaccgccatgccatacagcagagtatacagctgtttctggccggttgtgcagggctggtgaaacccacccggacgacgcagtatccgccatatccggcgctggttcgtcacggaacggggatgtcatctccggctaaccaggcatttgaacagtggctggggctgctggtaaaagatgccgtactggatgaagagacgataaagaccattgaccgcctttatcaccagtcatgtattggcgcagtccgctgggggaatctgccggataatgcccgggagataatcacagcgttaatgcgttgtcagtattctgactggtttggcctggtcggactgagcgaacacattgatgccgaagcctgctggagccggctgtcggattacccggagcaggcgcagccctgtgacatgctgatggtcataccctcccgtctggccacagagctgaacggttcaggtggactgctgcagggcatttccaccacgaccagcctttacagcaggatatacggtgtggagtggccatcaggtcacaatgtccgctgggtgcgtgatgagatgagcagtctggtgctgctgacagacacgccctggtatccgccttcaggtgagctggttggtgaaatctcgaaggtgttcgactgtgagatacggcactggtacagcgaaccagtccggggcatacagggttacaactgttatgacggtggtgaacatacggacagtgacccgcaggccgaatggccgggcagggaaacacttcctcagccccggctgtatctggtggaggagcgcactgaagaacagacagaagccgcgcctttaccggttccgctggcttcaggccagtaattaacctcagggtgtcacattcgtggcacccgctttttcctgtcatctttcatttcagcccgaaggggaacacctgttcctccccggggccatgtgttccctgttttttacggagatttacatggccacctttatcgaccatcagaaagccttcatttcgctgtttaatcagaccgcccgttatcacaaacgccataaggtgtttgaggactttgtcagctgcagtgtgattgccctggagaaccggcttcagttcagtgaggcacgggagcagaagtatctgcgaatcgtcagtggttatgaaaagcaggatgttatcaacattgcgcatttgcttgctcatgtcattgaggggctggagcagggattctgcgactttctgggcagtgtgttcatgcaactggagctgggggacacataccggggccagtttttcacgccctggagtgtggccagcatgatggcacagatgcagctggggaatgtgaaggcgttgtttgaggacaaatcctttatcacgctccgtgaaccagcctgcggagccggcagtatgattctggctatggctgacaccctgaaccgttcggggtatccggcataccgcaggatgtgggtgtcggcaacggatattgacccgctggcagccggcatggcgtatatacaactgtcgctgtgtggtgtggccggagaagtggtgataggcaactcgttgtgtaatgagcggcgccgggtgctgctgacgcccggacattacctggggaactggtcatatcgtctgcgccatgttcaggaacaggcagcggcctgatgctgaatgttttactatgactaagccagccttcgggctggtttttgttgttatccctaaaccacctcctcaggaggtggtcttttactttgtgaaaaatggtagtagagatagcctcttaattagattaaatttttattctgatacttgaaatcaagcgaagcggcaccactttagctctgtttgcaataaatgcgggggcaatatgagtcttcagaataaatttaagaattttcatgatgctatcaagttaggaaggaaggatcttgagtacacgacggctcgtcttaaggacgatagcattactgctgatattgttgaacgcttcaaagaggatggatatccagtcattgaggatttcattcagggatctttggctacttctactggtatccgggaaaaggggcaggattacgatattgaccgtgcgattgtaattgaagcaaaactggctccagaaaacccgataacaccgaaacttgcagttcttgaagtgttggaaaaacgaggttttaaaaatgctaagattaaaaaaccttgtgtgactgctgattacaaggttgatgatcttcatatcgatattcctatttaccgtaagtatgataacggtcagtacgaattggccgttggaaagagatattcagacgagaatactcgtgagtgggccagagctgcgccacgtgaacttattgattgggtgaataattacgacgctaatgaagcttatggctcgaataagcatgaccaataccggcgtattgtcaggtacctcaaacgttggagaaatttcacatttggcgatgatgtacgtcgtaaaatttactccatcggtattgcggttatggttaaggaatccttcttctcttcaatcaacgatgaagggtttcctgatgatctctctgcgctgagaaagacaataaattatattctcaattatcagaactatttcaccttggttgaggatggtaaatacagaatcaaagtcacgcttcctgtaagcccttacagagatatttttcatggtagcagtatcgtgacaggtactcagtttcgcaataagctaagtgcgctattaaaaatcttggataaagttgcagacgaagatcaagagtccaggcagtgtgaattgctgcgaagtgtatttggtgaagatttccctgagtgtgcagcagcgtcatctacttcgtcatccactgtaaaaacggtttttgcatctgctggagtagttgggacatcgcaaggcgcatgaattattcagccattttgattcatttaaacaaatgcggatacaaagtatccgcaattccatcggagacggcagaggtcggatttttaactgtcgaactggagatcaacggtatacaagttactcttttgcatgccgctgttcctgaactctcgaaattgccgagtttcctcttggtcaatccatcaacattgcccagacttgcacacaccatgttctatcctgatagccaatttgcaagtatttgtgtgaatgtccctgatgcagtatccgtgaattttgagtgccctgagttggccttcgaggagtcgcttaaaagacatatatctttgttgagccgagctttaacggatagcgaatggaatactcaggaattacttcgggaatttgaagctggatggttaaatatagttgagccggacacatctccttttctttgtttaactgaaagtgcaacaccagaagagttgtgcgttcttaagccacgaaaagattatataggtctggctaaatattacttaggctatgtagagggagctatccccaagaatattttttcacctatcaatagggtcataaaagaacggcaggccgcaaatggtaacggatttgttataccgttgaacgtgataaaacctgctccatggaaaaaggatgagcttactgactggtatcttgacctgttgtcaggtctatcggcggatgttaagatcaaattaatgcaacagtttgctcataagcgttcacatgagttttggttagtttttaatgcccaaactccttcaggaattacatggtttggaatccatttcacccaaaagaattctggtaaaggtcgaaaaactttgcccttcaagcattcacatctggccgaatggaagcttgaacccgtcaaggtattaacctttaataaagaaaggattatgccaagaagtggcgcgaaacaatctcttaatagcaagaaagttatgcttatcgggtgtggttctgtaggaggtgatgttgcagataaacttgcagcttctggtgttggccatatagatttatatgatccagatatcctttcgttgaataatctttatcggcatattctgccaccgcaatatgtttcacttcataaatcaagagcattgttgcatagccttacaagcaagtatccatggctcgagattaggagttacactggtaaactacttgatttgaggcatcgtgacttactaatgaagtatgatcttatcatcgtagcaataggatcaccgactcaggaacgattgtttcatgattatttgattagagaaaaaattaatgtaccggttattaacgcatgggttgaagggtatggtataggtgggcatgctgttctgacgattccgggaacaaaaggttgtttacgttgtgcatatgttgaccctgtagatttttcaagaggattagcttccaacttgaatttccttgctccaaatcaggatttaactaaaaaccatgcagggtgtggtgatgcgttcctgccttattcatacatagctctgatgaatcccctaatgatttttatcaaaatcattaagttaaggtagatacacatcttgtcatatgatcaaatggtttcgccaaaaatcaataatcagacaacaaaatgtgcgaactcgatattttacacgactctctttaccaattctgccccgaattacacttaaaacgactcaacagcttaacgttggcttgccacgccttacttgactgtaaaactctcactcttaccgaacttggccgtaacctgccaaccaaagcgagaacaaaacataacatcaaacgaatcgaccgattgttaggtaatcgtcacctccacaaagagcgactcgctgtataccgttggcatgctagctttatctgttcgggcaatacgatgcccattgtacttgttgactggtctgatatccgtgagcaaaaacggcttatggtattgcgagcttcagtcgcactacacggtcgttctgttactctttatgagaaagcgttcccgctttcagagcaatgttcaaagaaagctcatgaccaatttctagccgaccttgcgagcattctaccgagtaacaccacaccgctcattgtcagtgatgctggctttaaagtgccatggtataaatccgttgagaagctgggttggtactggttaagtcgagtaagaggaaaagtacaatatgcagacctaggagcggaaaactggaaacctatcagcaacttacatgatatgtcatctagtcactcaaagactttaggctataagaggctgactaaaagcaatccaatctcatgccaaattctattgtataaatctcgctctaaaggccgaaaaaatcagcgctcgacacggactcattgtcaccacccgtcacctaaaatctactcagcgtcggcaaaggagccatggattctagcaactaacttacctgttgaaattcgaacacccaaacaacttgttaatatctattcgaagcgaatgcagattgaagaaaccttccgagacttgaaaagtcctgcctacggactaggcctacgccatagccgaacgagcagctcagagcgttttgatatcatgctgctaatcgccctgatgcttcaactaacatgttggcttgcgggcgttcatgctcagaaacaaggttgggacaagcacttccaggctaacacagtcagaaatcgaaacgtactctcaacagttcgcttaggcatggaagttttgcggcattctggctacacaataacaagggaagactcactcgtggctgcaaccctgcttactcaaaatctattcacacatggttacgttttggggaaattatgaggggatctctcagtacatagcttcaactcaaacagctctcattaccgctgatctcggagtcaaatatcttcttgataagattcgacaatcatccagagtgagctggaaagggagttctgaggatgctatagcaaatggatttaaattgagcgggaggtaccacacattcacccgtatattagaagttctgcctttgttcaataacgagtgtgatatctgcaatggagaattttgatgtgttaattatcaatacagaacattttaatctccacatttcaaagaaagttaatgatatctggcaggagtatcgacagctcaaaccaatggattctgaggcatgtggagtactcattggtgacaaagattttgagattgagcgttactgtttggttgaaattacagtgccgcagaaaaaggacctatgtacaagaatgagttttactctcagggatcccgagcatcagaatacagttgatcgactatataagaattctagggggcacttggcttaccttggtacatggcatacgcatcctgaaaaatatccttatgcttcatacatcgatattagagactggaaaaattgtaagctacgaaatcctgggcagatgcttttttttataataattggtattaaaaaaaacgcgctttactatttttacaatgaaaatctcctgcggcaagaattctgaggtcatcatggataaagcaactttaatttaccttattaagcttctctttaagccaaaagatcaactctccagactttcatttaggttgatgagtttaggtatggcaggattagttggtgggtggggattaaacattattttttcagatgtttttcttgaaaaatatagtgatgttattgatagggtaagtttaaattatcaaaaatactcagacattgctcaaataataagtttgttttttcttgtggcaggttttgttttatggtgtgtttgcgtatatttttcccttcgtgacttgaataaacgagatattgcattaatccgggcgtatgggtttgaaaatacagacccccaagctgcagagaaaatgttatcttttagagaaaaatcaaaaattttacatgtggactttaaagcatttgattcaagaaataaaaataacaatttatccaatgcaggttttattcggcaagtaattcgagaaagaatacatcacagcggtgcgacagctgcttatgtagctgcgcttggcagtgtaccgtatctttatatgattggtagctttatgactgatggacacttgacattaaagttatttgactttgaccgtgataaaaaaatctttcatcctcttgatgctcctccaaccaatgcaaatatagttaaattatataataatcagctaattaatgatagcaaatgcgtgccagcaaataatgaaggagctattggtctcgcaatttcatttacgatggagatattagaacgagatcttccaactgagtttgttgggcatacactacatgttcaactaaatacagggtttcgatttgataatcttcctgaggaagaagaacaagaaaaaattgtgaaaaaacttagctatattattgctgaattaaaaaaacaggcggatgaagtacatcttttcatttcggcacaggcgtcagtaattgttcggcttggttctctataccaggaggggttacatggtgcaatcaatgtttggcactggaattctatagcgaactgttatgagtggtgcttaaagatcactagtaaagatttatattagcaatgccttattatggattaatatagcgcgatgtttagcttgttcctttttgactcgaagcggataagctaattgaccttaaggttcgctgtgagcaacgtgattggtgctgagcaccgtcttggcagatactgaaactccagcgaggatagtggataccaaagcctcgtgtccactattgctgggtaagatcaattttaaaatgactttgtaaaagtgatatgaattgatctctttcacgataatacgcattcggcttagtgttattacctctagattgtcagtttaagttatttttttaaagttatgtttgtcatattgacaaagaggtctttgttattaatcttaaaactcatgattaaaattattaaactagagtttatttaaatgaaagcaatattcaatgtgatgaatggttttgataagatttttctgccattgaagttttctggttttcatgggcggaatgggtactgttatttaagggttcagattaagcatggttttattgttttctcatgtgctcaactattgaactattatcgtacgtcagtaacaaatgcaattgagcaggtcagagaggctgcagttaatgctctcttaagagagggggtgctgtcatatacgcaacaaaaagaatttctggatgtattaaagacatcacaacgagtaagcaaagaaattgattcgcagttatgggattacataaatgccaattcaatctggtttgaatactataatcatagtgaatcattatttctgaatgatcattttcatattgcttcttttgaggggaacaaaaaatcctgtgtggagaaaaacttcactggcagatttagagaaaacatatcctgaatttgattttattattcataaacaccatcttgaaaaatggatgaatggaggccttacctctgaaaatgtaaaaaaaatgatcaaagaaaaaggctggaataacaaaatgttggctgcgcgttgggggtgttcggaagtttgggtgagtaaaattattaatgatgaaaaccgaaaggttcagtggaatgatgctatcaatggacttcctgttataagtgacaatatggtttgattaggtgaatgcatgagtatttgttttaactttttcagattacgctcaatatattcatatgcatgggtaaataaagaacccacaattgctttcgagacatgtattggtcgaggccattttgtatttatgatcttttttgcaccagaagataaaaatatatctggagatagtttgtttatttatctccgtaatgttaatgttttattgcgactaaagctgtatggaagtcgaaaaaacggtgtttttaacgtgtatataacgccctcgcagcagcaaattttgttagatgaattacagttgacacctggtggcagccatttttcatttaataactttctgaacgaattaaacgacgcgattccgcagacgctttcctttaaaagaaaaatagaaactatcagaactgtatggccgaaagtatgtaactcattaaatggggttattgatgatgctcataaaactatattaataggcatcaagaaactccccgaagatcaacgtcccagggaaaaaacgctacgaaaattgtttacctgtacaaacagcccggcaaatgatgtccaacactttattgatatcttgaaaaaacataactacacactgatgtggaccagtgatcagagccggataccaaaatcttttgcagagttaattaataaaattatataaataaatctattgcattagaacaacagacagaacaatgatatctgttttatggatacgatgtagccagtgatttagtgcattgctggctatattacttttcccattttgtgataagtctgctctgaaacgatagcgtccctccccctgtattgtgaaagttgccacagttttttctccatacccctgaacatacccgtcgtgccttatataatcgactccattgagaagcagtcgaataattatttctgactgtaacggcgttaatttcagtgatggtaaagatgtccgtggcaccataacgcatttttcatcatcagtatagtggtatgcgtgaacatatatggtggcattttgtctgatgttgttaaggcttttcagcaggtctgtagtcaactccatcgcggtgtccttcaggttgttatcatctgttgataatgcggccagttgaaagcgttgacgacaattaattctttttcccttctgagaaatttacagaatacgaaaaagagttatttgttcacagcctgttgttttctgatgatattccctgcttcatttgctgaagcaggagaatattgatggtaaagacaaatccatcttctgtaagacgtgtcgcagtttatgggctggctggattgcagttcttttttcaggttaccccggcatttgccggcgtctttcaggctgatgagcagtctgtggcacagacggcgatggaggccggacgtgtgctgcagggcagcaacagtggtgacgcagcccgccagctgctgaccagccaggcttccgggcaggcagcaaatgcggtcacgcagtggctgaaccagttcggtacggcgaaaacgcagctgagcgtggacagtgatttctccctgaaaggctcgtcgctcgatgtgctgttgccgttttacaacaccccgaagaacgtgctgttcacccagctcgggatgcgggataacgacggacgcttcaccaccaacgccgggctgggccaccgttacttcacggataacggctggatgctgggatacaacgtgttttatgacgtggactggcgcaacaccaaccgccgctacgggattggcgtggaagcctggcgtgattaccttaaagtatccgccaacggatacaaacgtctgtccgactggcggcagtccccgaccgttaccgattacgacgagcgtccggctgacggctgggatatccgtgccgaaggctggctgcctgcgtacccgcaactgggcggtaagctggtttacgagcagtattacgggaatgaagtggcgctgttcggtgagtctgaacgccagaagaatcctcacgccatcactgccggcgtcacctggacgccattcccgctgctgaccaccggtgtcgattaccgcaggggcaaaaacggggctgacgacacccgcctgaatctcggcctgacataccgtatcggtgaaccgctggcgcatcaactggacagcagtaaggtgggcgcacaacgttcactggccgctaaccgccttgaactggtgaaccgtaacaatgatgtggtacttgaataccgtaaacagacgctgattaccctgcagctgccaccggatgtgtacggcgcagaactgacgaccgtcaccctgacaccacaggtaaacgcaaaatacgggctgtcccgtatcgagcttgacgacgcagaactgcgtcaggccggcgggaagattatcagcaacaccggcaaccggattacgctgcagttacccgcctggtctgccgaaaatcagagtgtcacactctccggcagggcgcgggatacccgtggcaacctctctgatattgcccgtacccgtattctggtctccccggctgtacagcagcaactggcagtcagtacggataaaaccacggccactgcagacggtgcggacagtgtgcactacaccctgaccgtcacgggcagtgacggaaaaccggtcagcggacaggctgtacgctgggagcataacggcggcacgctgaatggtgagaacaccacgaacgctgacggtgtggccacagccaccctgaccagtcagactgccggtattatccgggttacggccaccacccgtaaccagacggcaaaagcggctgatgtgaccttcgttgccgccatgcagggagaactgctggctgaccgtactcaggcgctggcagatggtcaggaggcggtcagctacaccctgacgctgaaaaccactgacggtaagcccctttcagggaaaaacgtcacattcaccaccacaaccgggcaactgagccggacacagggcaccaccgaccagaacggtcagttgtctgtgcaactaaccagcacccgtgccggacaggcggtggtgaatgcctctgtggacggcaccaccatcagtgccgccccggtgacgtttgaaaaccacctggattccgccattgtggtgaacaaaacctccgccgttgccgacggccaggacagcatcattctgaccgctgtcatccgggatgccgccggcattccggtcgccgggcaggctgtcacctggcacacagacaacgggcagttcacacagcaggatgcagtgacaaatgctgccggtgccgcttctgccaccctgaccagtacacaggccggtaatgcacaggtatcgctttccctgaacggtacgaccaccacagtaagtgcgccccgcgtcagcttcacacagcagttgtatctcaccctgcaggccggcaggaccaccgctgtggcagacggaaacgacgccatcacgtacaccctgaacgtgcgtgacgcggcaggtcagcccgtgaaggataaggccgtgcagtggagcaccgacctgggcacactttcgaccctgcagggcacaaccagtgcacagggcgaagccacggtaacgctgaccagcacgcaggccggacaggccgtggttaatgccaccgtggacggcagagcggtcagcgcacagtctgtcaccttcacccgtaccgtccgtggtgtcatcacggttgaaaaagagcgtgtttatccgggaagcaaacagactgtcaccctgacgctgacggatgccgcaggcaacccggtcagtggcgaacgcgtggactggcatgctgacagcggtaatctctggcagacacagggcacaacggatgcacagggccgtaccaccacgacgtgggaaagtaccacgcccggaacggccaccattaccgctgacgcgtatggtcagcagtacacagctcccgtcattacagtcatgcctgccctgacggtcagcagcgtcaccggcatcgatgccactggcgcagatggtcagaactttggtaagcgtgttcccaacagcacctggccgggcgcgaaattccgcatcgatacggagaatgccgccggcacagtcacctggaccgcctcctctccggcggtgagcattaacggcaatgtcatgaccgtgaagagcaatccggcaggtgtcaccctgaccggcacggatacggacgggcagaccgttaccctgaatatgggcagcaactggtttgcgcagagtgcaacggaaagcggttttctcaacatcgatgttccgggttcggctatcaatacctgtaaagcacttaatgcaggcgttgcaaccgaaggtcagttgagcggaatcatcagggaatggggtgaactccagaaatatccgggctggacatcgctggccagcaactggctgtacagcagcactacagtaatactgagcaacggcagaacttactaccgggcattttatctgccacagggtacggtcagcgaactgtccgggccgagtggttattacgcctgccgctaagcagtcatatagctgatatgtaccggacggaataatttcctgacaccggtaaagagttaatgatggtgtgcacgttctgcagtgatgcagagtgtgtgcaccatttttctttacaggggcctgtatgtcactgacacccaccgatgaacagtctgccattatccactggcaggggcagaagctggttgtgaacgcctttgccgggacaggaaagaccagtaccctggttcagtatgcactggcaaaccccgacagcagaatgctgtatctggcttataaccgttctgtacgcgatgaggcagagcgtaaatttccgtttaatgtggagtgcaaaacctcccaccaactggcctggtcgcgctttggcagacattaccggaatcgtctggttgccagtctgcgtatcacagatgtggccagaaagctgaacacccgtcactggctgctggttcgtctggcgctcagcaatctgaatcagtttctgtgcagtgctgacaaggagccggggccgcagcatttgccgggtgaggacgcccgggccggtacggatgtctcagccatcctgaaggcagtacaggtgctctggcatgaaatgagtcgccctgatggcacattccctgtcacgcatgatacctacctgaagctgttccagttgtcatccccggacctgtcccggcgctgggacaccattctgtttgatgaggcacaggacgccaatccggtgacgtctgcgctggtactcagtcagtcctgccgggtaatcctggtgggcgaccgttaccagcagatttaccgctttcgtggtgcagataatgcgctttctcatcctgttctgaacgatgcagaccgtctgtggctgacacagagcttccgctttggcccgtcggtggcccggatggcgaatctgcttttgcagcgtgccggtgagacacggcaggtgaccggcagtggcggggaagatgaagtactgatgagccgtaccggcgcggataaaccggaagggcaccggacggtactgagccggacggtggcaggtgtgatatgcacggcgctgatggccagtctgagtggcaggaaggtgtactgggtgggcggtattgaaggttaccggacagaggcactggaggacctgtactggttttcagctgatatgccggaaaagatgcagtctgatgcactgcggcgggattaccgcgattttgatgaatactgccggatagccaaatccacccgggatgtggagatgaatcaggccattcgtctgctggatatctgtttcccgttgccggtgaaactgaagcttctgcgggagcataccgtcacgagtgagaagtatgcagatattaccgtgtcaacggcccaccgcagtaagggactggaatggccggtggtgatactggatgaggattttgcggatatcagcgacccgctgatgccggaggatgaacggagggatgaaactaacctgttgtatgtggcggtcacccgtgcccgtaaaaccctggtgctgaacagtctgatgcgccagctggcagaagaggctggcagagatgaacaaagccagaaagcagcagaggcatccccgtcagaagacggggagaacgataccgtatacgggcaggagagtgaaaatgcttaatcgcctgaaaaaactgcttcctggtaacagcaatgccagcagtgctgagataaccgccccggaagccacacgtcagccggagcacctgccggaaggtttttatatgccccggacagctgaggagctgatgtccgcaccgcgcaggaaacagtgcctgaaacagctgtgggaaaacagcagtatgccagccgatgtgtatcagcagttctgtctggcaccggtacaaaaactcctgatggcggcgcagaacgttcccgctgccagaggctcccggtgggcagatgccaacggttttggcgacctgacgctgcagttcaccacctatgccgttcgtctggccaggggatatatgtttccgcccggagccacaccggaagagcaggccgcacagtccggtgtatggaatgcagtggtgttctggtcggctctgttttatcacctgccacttcttacacacctggagggggaactggtcagtggaaagttatggctgccggggatgtcatcaccggatgaagcatttcgttttcgctacagacagcaacatctgcagggcacagaggctcagcaactggcagcggtgatggccgggcagttgttgccggagggggcgacagcctggctggccactgtgccgggggcattacagaatctggcgggggcagtctggcatcagcatccggagatggcattgattcgctcagtcctgaaaacggcggcagaagaggtggagagtccgcttcttgcgtcgccagtaacggaacccgtaacggcacctttgccttcagaaaccactgtgcagtctgaaggcgatgtgccatctgagagccagccagaaacatcaacagaggccagtgcgccagagacgccggcaaccgctacggaggagaaaggatttacgctgcagccctctgtttcaggaagtggtgaggccgaagcagtagtcccggatacgttgcagtctgcaacagacacggaggaaaaggctccggaggagtcgagtgtccatgatgataccgatatgctactgagcttgttttctgctgcagatgaccatgctgctgtagtgacagcagacggagaatgcttacaggaaacgcaggtgctgattgataatgatcattctcaaagaaaacatgaggataccgctatcacattgatttccggaagctctgctccggaagctgttatttcagaaggagagatgtttataaactggttaaaaaaaggagtgaggaacggggaaatcagcctgaacggaaaaaaagataaaattcatattgttgccggctttgtttttttacctgtaccgggaattttttatgagtttacgaaagcagcaggcatcccggcagacaaaaaagatgatattcaggcatcgtttgaacgcctgagcattcataagcggcgggataaccgacgcttttattttgcacatttgtgcgaagagcctgaaaacagaagtcgttttaaaacgctaaaaggttatctggtaaaaggcaggcagctcctggatggacaggaactacaggacagccgttatctcttttttccatgaaatgcgttccggaggtgagccttgttgttgaacggatatatttaaaggtaaagaaatatgaaaactcacgatgttgacagcctctgggataatctgatggatgagtattttttttgtaagtcgttacggagagccacggagtggagttatcgcaaggtgttgtcggggttccggaagtttgttggttttcaccggactcctgacagcattgttcgtcgtgatgttcaggaatggcgtcgttttgtgctgaaagatcaggggttaacttcccatacctggaataacaaggtgaggcacatgcgtgcgatttataactttggagaagaatctgggttgatcactgtttcagaaaatccttttagtggcatgctggttaagcaggaaaaaagacggaagaaaacgctgacaaaagcgcagatcacgcgggttgtgcttattctgcagcaattttcggaagcagagaatcagcacgccggactttatatcaaatgtgccataaggccggcgtggttctggctgacggtggtgaataccctgcgttacacaggaatgcgtctgaatcagttactgcatttacgtctgaaggatgtttgtccggcagaaaaatggatcgatttacgggctgaaggtagtaaaactcacagagaatggcgtattccggttgcgcgtcagttacagccacaactgcagaaactactggatgaagccgtcagacggggagccacaccggaagactatcttttccactacaagcgttttgttgtgccggtgtcagaagcaaaacgtataacgggtctgccggatgagcagcctgtgaaatcgtttttccgcagattatctcaggagtgtggttttcaggtgtctccacatcgtttcagacatacactggcgagtatactgatgagcactccggagcgtaatcttcacttggtaaaaaacatgctcgggcaccagaacgtatcaaccacaatgggatatgtggaaatgaatctggagattgctgcacaggcactggagcatgagctggaggtgttcactgacaggctgtaatcgcagacagattgacaatccactgaagggttgtaatcatatatagtgatcgagaaaagggagcatgcgacaacatgctccctttcgagaagaaaaatcatgatgtacatgaaccagactcacgacatctgacaccttcccgatgacacccgtcaggtttctcactcctgaccagtggctttgatgtaaggtggtgcccggactcggaatcgaaccaaggacacggggattttcaatcccctgctctaccgactgagctatccgggcaacggggcgcattaaaccgtaatctgcacatctcgtcaacctaatttcagtaaaagcgattcaactgcttaagattgcggcaaatcgcttcttttctgtgtttctgtcaggtcaatgcaccaccctggcggcagcgggcgaagcgcaggatatcttccgccagccgatgtgcagtgtcgacatccgcctggctacgattcaccagcattcggcttaaacagccttccagcaccagttccatctgctttgctaccatcgccggatcgtcaacttccagtgtggttaacagttcgtgggtgaaatcgtaggccgcgcttttttgctgatcggccagttgatgaatagggtggccaggatcgggataaaacgtacaggcagcgataaatagacagcccggatagcggttgtttttaacgcactccgataacgcctgataacgtgccagcagcttttgttcggcggtttgcgtttcgtccagcatcagctgacgacgccagacatctatctgttggctaagataacgcagcgcatcgtagaggattgcctctttgtctggccagaagcggcgtagctcgtccagtggataatccacacgttcagcaaccatctccagcgtggtgttggcaatcccttgtaattctaataatttcagggcttctcccagtacatcttcacgttgcacgctattttcctccgtctttcccactgcaagtgtcgttcacggttggcgatcgcgcaaatgtgcgctgaaggtttcagcatccataaagcccgtgacgcgtgcttgtggatgctcctggccttgtccgtcaaaaaagagaattgtcggtaggccaaggacattaagatgctttaacagcgccacatcttgtgcgtcgttggccgtgacgttggcctgaagtaagaccgtgtctgctaacgctttttgcacctgcgggtcgctgaaggtgtatttctcaaactctttacaggcgacgcaccagtcggcataaagatctaacatcaccggtttgcctttggcttcaacgagcgcctgatttaactcatctaccgttttgatttgtgtaaagttgagatgcgtctgagtttgcgcggtatgcgtcgcaccaaatgcccaatcctgaagtgggcgcacgctaaccaatgccgctgccagcaggattatttgcaccacgcgcatccagccgcgtttagcctgtaggctggtgataaaggcccagccaaagaatgcgacacccagcgccgaccacaagcgtaatccccatacatcaccaatcactcgctccagcaggaagaccggcagtgcgaggatcacaaaaccaaacgcggttttgacttgttccatccacgggccgcttttcggcagcaagcggttaccaaagacggtaattagcatcagcggcaggcccatgcccaacgcatagagataaagcgtgccgccgcccagccacatgttcccgctttgggcgatatacagcagaatcgcgctaagcggtgcggtggtgcatggtgaacagatcagtccggcaatcgcccccataacaaacacaccgccaggtgagccgccctgttggcgattgctcatcaacgtgagacgtgtttgcagcgaagaggggagttgtagagtaaacaagccaaacattgacatcgccagcaaggtaaagacgatggcgaggccaatgagcacgtatgggtgctgtagcgccgcctggaactgtaaccctgcggcggcaactaccagacccagcgccgtgtaagtcagtgccatcccctgcacataaataaaggtcagcaacaatgctctggcagtggagagccgctgtttaccacccagcacgatgccagaaatcagtgggtacattggcagcacgcatggcgtaaaggcgataccaataccgatcaacaacgcccagagcgcggaaaagggcaattgcgcggtgtgctgctcttgctgcggaacagacacaggctgtgacgctgcgttgttggctaccacttcgcttaacggaacggttttggtttctggcggataacagaaaccggcatcagcacagccctggtaggtgacagttaacgtcgctcccgcactcgcctggttgatggttacgggaagcgtcagccgatcgcggtaaatctcgcttttgccgtaaaactcatcttcatgccagacgccttgcggcagctgcacgtcggcaattttcgcgtgttccggcgtaatgcggatctgtttacggtagaggtagtaaccgtctttgatctgccaggtcagattaaggtcatgttggttttgctgaaaatcaaaagcaaaggcttgatccgctgggacaaattgtgaacgtcccggcgcgtcgaataatccggcaaaaacggaagtgctgcaaagtagcaggatcagcgtaaagatgcgttgagccatgagaggtaatctgtgtctccgtgtgtaacaggtaaaaccagaagttccggggtttgatatggatgatgagacttcaggcattccagcagtgcctgctggtgagatacggtagtttttaaaatcatctgcacttcgtattcttgctccagcttaccttcccagtaatagagagaggtagcgccggggatcaaggtcgcgcaggccgccagtttttccgccagcactttggcggctaaatcctgggctgtcgcttcatccggtgcggtacatagcaccacgacagacgcggtattcgaacttttttcatcaagcataaacacctcgcaagaacagatggaaccgcaagagagaggtcactatacaacggacgggggaaggatgttagtcggcgggaaagaaagcggggcgtgaacgccccgcgattggtcattacagcatgaagctacccagcacgaagccgaagcaaacggccagggcaacacccagagtacccgggatgaagaacggatggttgaagacgaatttaccgatacgggtagtacccgtgtcatccatctgtaccgcagcaaccagcgtcgggtaggtcggcagaatgaacagaccagacaccgcagcgaaagaagcaacagcggtcagcggagaaacgttcagtgccagagccatcggcatcagtgcttttgcggttgcagcctgagagtacagcagagcagaagcaaagaagaagatgacggccagcagccacggatgaccctgaatcacttcaccagcggtatctttgatccagtcgatgttgttggaaacgaaagtatcgcccagccacgcaacacccaggatacaaatacaggcgctcatacctgctttgaaggtgctggagttgaggatgttgtcggtatcgactttacagataacggtggtcagagttgcaacgctgagcatgatgatcaggattgcgttggtggtgttcatcagcggtttttcaaccagacccatgcttgggctgttgatgattgcatagataaccacgccaactacgcccagcaggaacagccagacggacgtttttgcaccggatttgatttcaatctgcttttcaccgcgcagttcaaccaggccctcttccagacgcttgcgataaatcggatcgtcagagagtttggagttgaacagcatagtgaccagaaaggacatcaccagaaccgccagcagggtggacgggatgaccacggagagcagatggaggtagctgatgccatgaccttccatcacggaagacatgtaaaccactgccgctgagattggcgatgcggtgatcgcaatctgcgcggataccactgcagtagacagcggacggcaaggtttgacgccttgttccttcgcaacttcagcgataactggcagtgtcgccagagagatgttgccagtaccagcaaagatagtcaggaaataggtcacgatcggtgcgaggatcgtgatgtatttcgggttacggcgcagcagcttttctgtctgatgaaccagatagtccagaccgccagcaacctgcatggcagaaatagcggcgataaccgccatgataatggaaatgacatcgaacgggatgttaccgggtttaacgccaatagcggcaagaaccagcacccccaatccgcctgcaaaaccaatacctattccccccaatctggcgcccaagaagatcgccagcaaaactatgatgagttctacaactagcatattagccttccttgttttttaacaagttgatattaggttgttatttttaagttactgctcacaagaaaaaaggcacgtcatctgacgtgccttctttatttgtactaccctgtacgattactgttcgctttcatcagtatagcgttttgctttgtaagccgggtgcatcagattctgtacggagaaaatatcgtcaagttccgcttcagtcaacagaccgcgttccagaacgacttcacgtacactcttaccggtttcggcacagattttacccacgatgtcaccgttgtggtgaccgatgaacgggttcaggtaagtaacgataccgatagagttgtaaacgtaaccttcgcacacttctttgttagcagtgatgccgttaatgcatttttccagcaggttgtagcaagcgttggtcagaatgtgaacggattcgaacatagcctggccaatgaccggctccataacgttcaactgcagctgacctgcttctgctgccatggtaacagtggtgtcgttaccgatgactttgaagcatacctggttaaccacttccggaacaaccgggtttactttagctggcatgatggaagagcccgcctgcagttccggcaggttgatctcgttcaggccggcacgtgggccagaagagagcaagcgcaggtcgttacagattttggacatcttcacagccaggcgtttcagcgcgccgtgaaccataacataagcgccgcagtcagaggtcgcttcgatcaggtcttcagccggtacgcatgggaagccagtgacttcagccagttttttcactgccagcggagagtactctttcggcgtgttcagaccagtaccgattgctgttgcgccaaggttaacttccagcagcagttcagcggtacgttggatgtttttcacttcttctttcagcaggatgctgaaagcgcggaattcctgaccgagggtcatcggtactgcgtcctgcagctgggtacgacccattttcaggatgtcctggaattcgacagctttacgttcaaagccttcacgcagttggttaatcgcatctaccagcttaatcagggaagagtaaactgcgatacggaaaccggtcgggtaggcgtcgttagtggactgacatttgttaacatggtcgttcgggttcaggtactgatattcacctttctggtgacccatcagttccagaccgatattggccagcacttcgttggtgttcatgtttacggaagtacctgcgccgccctggtagacgtctaccgggaactgatccatgcattttccgttgttcaggacttcatcacatgcggcaatgatggcattcgctacacttttaggaatggtttgcagctctttgtttgccatagctgcggcttttttaaccattaccataccgcgaacaaattcaggaatatcactgattttgttgttgctgatatagaagttttcaatcgctctcagagtgtgaacaccatagtaggcatcagctggaacttccctggtacccaacagatcttcttcgatacgaatgttgtttgacatgtgaaccttctttttcaagctgccaatgatttgctttaaacacacagaatatatgtggtttcgaatgtttttcgaccgacgattatcccctgcatcgaccgaatacccgagatcatatgctgcttgaggatttctaccgtaatctggatcactttaagtgtcggtttttaccccttaattattaatttgtgaaatagatcaccgctttgggattactaccaaaaatagttgcgcaaacatcttgaaattttgctaatgaccacaatataagctgaacgcgattcgcaacccattcaggtagccgggttttaccggctgctattacaggagaaacctttgcgctggttaccttttattgccattttcctttatgtctatattgagatttcaatctttattcaggttgcccatgtattgggggtattgctgaccctcgtgctggttatattcacgtcagttatcgggatgtcactggtacgtaaccagggctttaagaatttcgtgctgatgcagcaaaaaatggcggcgggtgaaaacccagcggcggagatgattaaaagtgtttcgctgatcattgccggtttgctgcttttattaccgggctttttcaccgacttcctcggtcttctgcttttattaccgccggtgcaaaagcatctgacagtgaagttgatgccgcatttgcgcttttctcgtatgccaggcggcggttttagcgccgggaccggtggcggtaatacttttgatggtgagtaccagcgaaaggatgatgagcgcgaccgccttgatcataaagacgatcgccaggattaatgtcgaaacgccggattatgtggttatgccattttccggcgtttttcgttttggcagaaacagccataaccccgccagcatgatcagcgcatagagacttttccagccgaccattgccagtaacagaacgcataacagcccgccaaccaccgccagtagtcgataacgtccttgcaataatttacagcctgccagcatgcataacagataaatcataataaagatgccattggcataaataataagagcgtccagattgatctctaaagcatgaatcaccaacgtgctcaccacgcagcagccgagcaccgcattgagggcattattcgggatatggcgagaagagaggcgtgccaggtagtggtcaggattatgttgcgcctgcgaccagaccaggcgggcgaagctctgtatataaatgttgagactggcaaagcaggccagatagccaattacgcaggcaatccataacgctcctacaccgaacagttgcactacaatttttggaagcgatgctgccgcggccatttgttcaccataggcgtcgaagtgtaagacaactaccgtacagccccagtagactaatcctgccagcagcagaccaatcatcaaagcacgaggaaaatcacgctctggatttttaaattccgaggcaagatgggcaaatgcttccagaccgacaaaacaccagaacatcactgataacgcagcaaataacccggtaagttcgatatttcctggcgcagggaaggggatactcgcaggtttgatatcgcccgcccaccagatagcgacaatcagcgcgacgataagtccggcaataacggtttgtagatttgcactggaactggcaccgcgagtaccgatataccacaccaacgccagcgtaccgagttctgccaacaacagttgccagctatgccagccaaacattgcctggccgaatccggcagcaatttgtagcgcggcaggcaaacccacgggaatgaccgataaaaacaaccagccggtgactcgctcaagccgcgaaccaaaagccataccgacgaagtgcgcgacaccgcctgcgctgggatagtggcgacccagaatcgcaaacacaatcgcaatcgggaacactaagataatcaaaacgggccacgcccacaggctgttattgcctgctaccagcgcagctaacgcaggaacggcaaacacgccagtgcctaataatgacgtcgatagcaggccaatgccctgggccagccccagttcttgtttgagtccactcatgggttgatgtccgattgcgcccaaattttgggcaactgcgtagattttcgatggtagcacaatcagattcgcttatgacggtgatgaagaaattgcgatgaaatgtgaggtgaatcagggttttcacccgattttgtgctgatcagaattttttttctttttcccccttgaaggggcgaagcctcatccccatttctctggtcaccagccgggaaaccacgtaagctccggcgtcacccataacagatacggactttctcaaaggagagttatcaatgaatattcgtccattgcatgatcgcgtgatcgtcaagcgtaaagaagttgaaactaaatctgctggcggcatcgttctgaccggctctgcagcggctaaatccacccgtggcgaagtgctggctgtcggcaatggccgtatccttgaaaatggcgaagtgaagccgctggatgtgaaagttggcgacatcgttattttcaacgatggctacggtgtgaaatctgagaagatcgacaatgaagaagtgttgatcatgtccgaaagcgacattctggcaattgttgaagcgtaatccgcgcacgacactgaacatacgaatttaaggaataaagataatggcagctaaagacgtaaaattcggtaacgacgctcgtgtgaaaatgctgcgcggcgtaaacgtactggcagatgcagtgaaagttaccctcggtccgaaaggccgtaacgtagttctggataaatctttcggtgcaccgaccatcaccaaagatggtgtttccgttgctcgtgaaatcgaactggaagacaagttcgaaaatatgggtgcgcagatggtgaaagaagttgcctccaaagcgaacgacgctgcaggcgacggtaccaccactgcaaccgtactggctcaggctatcatcactgaaggtctgaaagctgttgctgcgggcatgaacccgatggacctgaaacgtggtatcgacaaagcggttaccgctgcagttgaagaactgaaagcgctgtccgtaccgtgctctgattctaaagcgattgctcaggttggtaccatctccgctaactccgacgaaaccgtaggtaaactgatcgcagaagcgatggacaaagtcggtaaagaaggcgttatcaccgttgaagacggtaccggtctgcaggacgaactggacgtggttgaaggtatgcagttcgaccgtggctacctgtctccttacttcatcaacaagccggaaactggcgcagtagaactggaaagcccgttcatcctgctggctgacaagaaaatctccaacatccgcgaaatgctgccggttctggaagctgttgccaaagcaggcaaaccgctgctgatcatcgctgaagatgttgaaggcgaagcgctggcaactctggttgttaacaccatgcgtggcatcgtgaaagttgctgcagttaaagcaccgggcttcggcgatcgtcgtaaagctatgctgcaggatatcgcaaccctgactggcggtaccgtgatctctgaagagatcggtatggagctggaaaaagcaaccctggaagacctgggtcaggctaaacgtgttgtgatcaacaaagacaccaccactatcatcgatggcgtgggtgaagaagctgcaatccagggccgtgttgctcagatccgtcagcagattgaagaagcaacttctgactacgaccgtgaaaaactgcaggaacgcgtagcgaaactggcaggcggcgttgcagttatcaaagtaggtgctgctaccgaagttgaaatgaaagagaaaaaagcacgcgttgaagatgccctgcacgcgacccgtgcagcggtagaagagggcgtggttgctggtggtggtgttgcgctgatccgcgtagcgtctaaactggctgacctgcgtggtcagaacgaagaccagaacgtgggtatcaaagttgcactgcgtgcaatggaagctccgctgcgtcagatcgtattgaactgcggcgaagaaccgtctgttgttgctaacaccgttaaaggcggcgacggcaactacggttacaacgcagcaaccgaagaatacggcaacatgatcgacatgggtatcctggatccaaccaaagtaactcgttctgctctgcagtacgcagcttctgtggctggcctgatgatcaccaccgagtgcatggttaccgacctgccgaaaaacgatgcagctgacttaggcgctgctggcggtatgggcggcatgggtggcatgggcggcatgatgtaattgccctgcacctcgcagaaataaacaaacccccgggcagaaatgtctgggggtttttcttttggtcatctttctagtataagattcagacacggacgacgcgagtggcgtccagctcattgattatggggaataacatgcacgtaaaatacttagcagggattgtcggtgccgcgctactgatggcgggttgtggctccagcaacgaattgagtgctgccggtcagagtgtacgcattgtggacgagcagccaggcgcagagtgccagctgattggtactgcgacaggtaagcaaagcaactggctttccgggcaacacggagaagagggcggttctatgcgcggcgcagcaaacgatctgcgcaaccaggcggctgcaatgggcggtaacgtgatttatggcatcagcagcccgtcgcagggaatgttgtccagttttgtcccgacggatagccagattatcggtcaggtttataagtgcccgaactgatgtgatccagaggctgggtgacaaacgtattattgcctgatgcgcttcgcttatcaggcctacagcaggcattgcaactgattgaatgcttgagaatttgtaggccggataaggcgtttacgccgcatccggcatgaccaacgatcacgttatcagtcatttcaggctggatggctccagcctcgcattagcaaagatgagattatttcgcctgtggtgcagttttgctggtggattgaacacgtaagtgatgcagcgcgcgtaagcattgatcctgggttagcggttgggcgttattcgccgctacggtgcgaacatagacctgacatggcacacccgcgagttttttcagtcgtgggctgaaatcaagcattcggcgagtgatcgcctctatttctttacccggcgttgcttcacgcgttttcaccactgcgccgctaaattgttctttgccactttcatctttaaagcggtaaagcaccgccagataatggtcgaacaagttatgtttccattccggttgggaataggtgtcatattccagattgccattttcctggcagtcaacgtcatataacggcaggaaatctaacagtgaggtaatacgtaatgccagttcacgcatttccgcattattaattgcatgaatgattgctcgcgccagcatttcaatctgcaactcattgacgactaactcacatttgctaccgtcatgtagcgttaatacgaaggtaagattttcgccttgattatcggtaagttccagcgtgttaacccgacgattaatatcggcatttttaagctcatcaaccagaatttctgggatgttttctgccattttcttaatgactttatcgcgagcttgctcatactgaaggcgtgcagcagcatccagtttatgcttttgatgcagacgactttccagcgcaatcagcaggtcgcgcagttccatgacagacataaagaacaacgattctttattgcgaggttctttaattttcagcgccagtgcaatgaaattattactcttgcgaataacaccggtattaacacccttgatgcttatggccatgtaggttctccctaaccatttctcaattaaataattaattttaatttataagccagataaatgggcttggtagtaatagttgttaaaataacataaatagccgtgctcactctatataaacagaaaagaaaggttaattattggtgttagctatataaaaagtaacaacagcaatgcatatgaataattaaaggttatgcaacgtgcaaagattaaatttctcagtttaatgacaggttgctgtacttgcgtttgttgctcttgccggatgcggcgtaaacgccttatccggcctacagttcattgcaaatccattcaatttcaatgcacgatgtaggcctgataagcgtagcgcatcaggcaattttaatgtttaacttccctgtttaatcagttactgctggcgtagctggagatccaacggcgttttgctgggttcgccaccaatttcacgcgccagtttcggcaccagatatcccgacaccagtgtcagcaactcacgcataatctgccgtgcttcgtcatcactcaccataaaatgcgccgcgccctgtacgttatcgagcacatgcaggtaatacggcatcacgccggcatcgaacaacgcattactcaggtttgccagtgtttgcgcgttatcgttcacgccacgtaacagaacactctggttcagcaaagtaacgcctacccggcgcaacttagccattgcctgacggaatgtttcatctacctcattggcatggttgatgtgattcaccagcaagatttgcagcgtagtatgtgaaaagcgttcaaccagcgcatcagtgacgcgtgccgggatcacaatcggcagacggctgtgaatccgcagacgtttgatatgcgggatggcttccagttgcgtgagcaaccagtccagctcgtgatctttcgccatcagcggatcgccgccggagaaaatcatctcgtccagttccggatgtgcagcaacatactcaagtgcagtttgccagttacgcttgttgccctgattttcggcataggggaaatggcgacggaagcaataacggcaatttaccgcgcagccgcctttgaccagcaaaagcgcccggttgtggtatttatgcaacaaaccaggcactacgctgtgctgttcttccagcgggtcggtggagaatccgggcgcgacgacaaactcatcttgcgaggtaagtacctgacgcaaaagaggatcgtccggattgcctttctccatacgatcgataaatgagcggggcacacgcagggcaaacagctttttggcgctgcgtccggccaacagtttttcgtccgcgtctatattcaaaagacgcagaagttcatcaggatcggtcacaacatcggcaagttgcgttaaccaatcttctctggatggggtatttagggttacaatatgcgccattttgtggcttagctaccaattaacaaatttcagagggccttatggcaacgtactatagcaacgattttcgtgctggtcttaaaatcatgttagacggcgaaccttacgcggttgaagcgagtgaattcgtaaaaccgggtaaaggccaggcatttgctcgcgttaaactgcgtcgtctgctgaccggtactcgcgtagaaaaaaccttcaaatctactgattccgctgaaggcgctgatgttgtcgatatgaacctgacttacctgtacaacgacggtgagttctggcacttcatgaacaacgaaactttcgagcagctgtctgctgatgcaaaagcaattggcgataacgctaaatggttgctggatcaggcagagtgtatcgtaactctgtggaatggtcagccgatctccgttactccgccgaacttcgttgaactggaaatcgttgataccgatccgggcctgaaaggtgataccgcaggtactggcggcaaaccggctaccctgtctactggcgctgtggttaaagttccgctgtttgtacaaatcggcgaagtcatcaaagtggatacccgctctggtgaatacgtctctcgcgttaagtaatgcggttgtggtgcggcctgcaggctgcaccatcacttattcaggtcagagatgatgaaacgccttatcgttcttgttttgcttgccagcacgctgctcacgggctgtaacaccgctcgcggtttcggcgaagacatcaaacatctcggcaactccatctcccgcgctgccagctaatttttcttctcttccgaaaaatcatcagatttccatcatttttggtgatgttgtctattattaatttgctataggcaaacataaataacattacctaaaaggaagacgttatggtgaagaagacaattgcagcgatcttttctgttctggtgctttcaacagtattaactgcctgcaacaccacgcgtggcgttggtgaagacatttctgatggcggtaacgcgatttctggcgcagcaacgaaagcgcagcaataagcaataacggtacgacagctgtgtcgtgccgtttgttttttctgtgatagtcataaaggtaatagttgaaattcccctgccacctggcaaaatatccgttcaaccatcagctttgcaggacgacctgcaaacgcctcttttcaccggggacggccccaattctccggagcctgatatgtcctggattatcttagttattgctggtctgctggaagtggtatgggccgttggcctgaaatatacccacggctttagtcgtttgacgccgagtgttattactgtgacggcgatgattgtcagtatggcgctacttgcctgggcgatgaaatcgttaccagtagggacggcttatgccgtgtggacgggtattggcgcagtcggcgcggccatcaccggcattgtactgctcggtgagtccgctaacccgatgcgcctggcgagtctggcgttaatcgtattggggattattggtctgaaactcagcactcaataactaccgggctgctgtacccaaataaacttactgacatcaaacccttcccgggtcgcgactgccagcatctcctgtttcacttcgtcagaaatggttggcgtgcgggagagtatccacaggtagtcgcggtccgggccgcaaaccagcgcatggcggtattcccgatcaagtgcaatgacgttataaccgccatagaaaggaccaaagaatgacactttcagcgcagcgcgagttggtgcgccggtaaagtacgctttcccttcactctgttgccacattcctctgtcagggttatagcctttattaatgacattcaggccgccgtcatcacgcaggctgtatgttgcggtgactttttccagtccacgttcaaagcggtgatcaaaacgggcaatctcataccaggtaccgagataacgtttggcatcgaaattattcactacggtcacgccacgcggcggcgtaggagaactgcaggcaacgaccagaaatgcagctgtcgctgcggcaacgagagggagcaggcgcataaatgtttccttactggtttttttctaagtgtagatgacagcaaggaaaagcgcagaaaaggtccgaaaattcggacccgatgaaattttactgcagagcgttgagaatctgccaggcggcggcgactctcgctggattgggatagtttttgttagccagcatcacgatacccagctctttttctggaataaacgcgacatagctaccaaatccgccggtcgcccctgttttatgtacccatgatgcgcgtactgcaggagttgggggcgtaatcgcttttacggggcgtgctgccagtgcaattttattgtcactgccgttaacgatgatgtcaggatttaccggccagtccagcatttcccagcccagaccctgatacatatcgccggtttgccagtagcgagattgtgccacttgtatcccttgttgaagcgttttctcattgatatcaaggggttttaaattgatttgcacccagcgggccatatcttcaatggtcgacttcacaccataagcttcagcatctaacgcccctggcgaaacatgcactgccttaccttcgcgatatccccaggcgtaattcttttcttctgcgggcggtacattaatccatgtatggttgagtttgagtggctggaagacacgagtttgcatcgcctgctcaaaactcaaaccagacggcttcacagccagtgcgccgaacaaaccgatactggagttggcatacagacgttgtgttcctggagcccatgcaggctgccagttttgatagaagcgcagcaagtcgcttgaggatttcacttcatccggcacctgcaatggcaggccgccagcagtgtaggttgcgagatgtaatagtgtgatcccattccactgtttagcggtaagttcaggccagtattttgttgcgggatcgcttaacttgatttcccctcgagcaatagcgtcgccaccaagcacgcccgtaaatgttttgctgaccgaacctaactcaaacaacgtttgctgtgtgacgggctgctttttggcgatgtccgcatagccccaggtaaagtaataaggtttaccctgataaattaccgccaccgccataccggggatcttttgttgctctataagcggggtaattgtgcgatgcacaatatcgttgattttttggggggcagcaaatgtggagcaagaggcggtaattaataaggcgcagagcgtcgttttgaacatagggtctggtttccatacaaaacggcccgccataggcgggccggatttacattggcgatgcgttagattgtaacgacaccaatcagcgtgacaactgtcaggatagcagccagaccgtagaaaacccatttgcccgcaggtacgtggattttcagatcgtgcatcgcgtggtgcatacggtgtaaaccacaccacagcggcagaacgatcatcaggaacaggaatacgcgaccaatgaagctctgcgcgaacgccagaacgcgctcgtagctcagtgcatcacccggaaacagccccagcggcagcagaatacccaccagcaggatcatcaccggcgcaataattgcgctccacataccaccggccccgaagaggccccagaataccggttcgtcagaacgctttggatttggattgatcatctcaggctccttaccagtacagggcaacaaacaggattacgatggtggcaaccacagttaccgcccagagacttttgataattggctctggacccattttttcgtcttttacaatgatattggccgctttcggtgccagttcaaaccaggttttggtgtgcagcagagctgccgccagagtgatcaggttaatgatcacaataaccgggttttgtaaaaagtcgacgaatcccgcccaggcttccgggccatttttcagggcaaacagcccgaaaatcagttcaatgctgaaccacacagccggaaccgccgtgccttcgcgcagcatgtaaaagcgataaaacggcaattttttccaccaggtggacgtcattggccgtacatacggtttacgtttagtcgtcatgttgcactccttagcgtggtttcagggtcgcgataagaaagtctttcgaactttctactttgccctgctgaatggccgcagccggatcgacgtgtttcgggcagacttcggagcaatagcccacgaaagtacagctccatacgccgttctggctgttcaactgcgccatacgctccttcttaccgtggtcgcggctatcttcgttataacgatgcgccagcgtaatggcagccggaccgatgaactctgggttcaggccaaactgcgggcacgcggcgtagcacagaccacagttgatgcaaccggagaactggtgatacttcgccatctgcgccggggtctggatgttagtaccctgatccgcggtgcgggagttgccgatgatgtacggtttgatcgcttccagactttcgatgaagtgggtcatatcgaccaccagatcgcgttcaatcgggaagttagctaacgcttcaaccttcataccgtcggtgtaatcacgcaggaaggttttacatgccagttttggcacgttgttaaccatcatgccgcaggaaccacaaatcgccatacggcaggaccagcggtagctcaggtccggtgccaggttgtctttgatgtagcccagcgcatccagtaatgaggtagttgcgtcataaggcacttcatagaatgcgctatgcggtgcggtatcgacttccgggttatagcgcaccacctcaattttcaggtttttcatctcagccattcgccttctccttcttattggctgcttccgccttatcggctgcatccgcttcgccaccgtaaacgcgtttagctggcggcagcgtagtaatcttcacgtcgctgtactccaggcgagtcgtgccatcagcatcgcggaaggcgagggtgtgtttgaggaagttgacgtcgtcacgctcggtgcaaccttcgtccagacgctggtgtgcgccgcgggactctttacgtgccattgcggagtgcgccatacattcagcaacgttcagaccgtggcccagttcaatggtgtagagcaggtcggtgttgaacacgctggaagtgtcggtgatgcgcacgcgcttgaagcgttcctgcagctcagccagcttgtcgatggttttctgcatcagttccggcgtacggtagataccgcagccttcttccattgccaggcccatttcgtcgcggatcttcgcccagttttcgccgccatcctggttaaccagatctttcagacgttgttcaacgccagctgcctgcgcttcaattgccgcttcgttgccattaccggcagttgctgcacgctctgtcgcttgttcaccggccagacggccgaagaccaccagttccgccagggagttggagcccagacggtttgcaccgtgcagaccaacagaggaacattcacccacggcgaacagacctttaatgcgggtttcacagttctgatcggtttcgataccgcccatggtgtagtgtgcggtcggacgtaccggaatcggttctttaaccggatcgacgccaacgtacgctttcgccagttcgcagatgaacggcagacgttcatgcagttttttctcgccgaggtgacgcaggtcgagataaaccacatcaccacgcggcgtggagatggtgttgcctttacgccattcgtgccagaaggcctgagaaactttgtcgcgtggacccagttccatatatttgtttttcggctcgcccagcggagtttccgggcccatgccgtaatcttgcagataacggtagccatttttgttgaccagaataccgccttcaccacggcagccttcggtcatcaggataccggaacctggcagaccggttgggtgatactgaacgaattccatgtcacgcagcggaacgccgtggcttagcgccatacccataccgtcaccggtaacgatgccgccgttggtgttgtaacgataaacgcgacccgcaccgccggtagccataacgaccgcgttagcacggatctgcaccagcgtgccttccatcatgttcattgctaccaggccgcgaacatgaccatcatcaaccagaatatccagcacgaaatgttcgtcaaaacgctggatctgcgggaattgcagagaggtctggaacagcgtgtgcagcatatggaagccggtcttatcggcggcgaaccaggtacgctcgattttcatgccgccgaagcgacgtacgttgacgctaccatccgggcgacggctccatgggcacccccacagttccagttgggtcatttcggttgggcagtggtggacgaaataatccacgacatcctgctcacacaaccagtcgccacccgctactgtatcgtgaaagtgatattcgaagctgtcatgatcctgcgcgacagcggcggagcccccttctgcagcaacggtatggctacgcatcgggtatacttttgagattagtgcgatttttgcatttggatttgcctgcgcggcagcaattgcagcacgtaatcccgcgccaccggcgcctacaatggcaagatcggcttgaaaggtttgcacgacattcctccagattgtttttatcccacagccccgtacttcagggtaagtgcctgaaagttacggtctgcgaacgctattccactgctcctttataggtacaacagtatagtctgatggataagtctgaaatttgacgagatcgatttttttagtgcgcaagagggctaaattatcactgaagatgattaatttaattactaaaccatcagatcgtgctttttttagtcactgcccaccgttgtttgattcctgcgtaaaatttgtctcgccgtcgcgttgcgagtagacttcgtgcccttgtcaaaaactggagatttaactatgagcgaaacggcatcctggcagccgagcgcatccattcctaacttattaaaacgcgcggcgattatggcggagatccgtcgtttctttgccgatcgtggagtgctggaggtggagacgccttgtatgagccaggcgacggtaaccgatattcatttggtcccgtttgagacacgtttcgttggccccgggcattcgcaggggatgaatctctggttaatgaccagcccggaataccatatgaaacgcctgctggttgccggttgtgggccggtattccagctgtgccgcagcttccgtaatgaagagatggggcgttatcacaaccctgagttcactatgctggagtggtatcgaccgcactatgatatgtaccggttgatgaacgaggtggacgatctcttacaacaggtgctggactgcccggcagcagaaagcctttcttatcaacaagctttcttgcgttatctggaaattgacccactctctgccgacaaaacgcaactgcgggaagtggcagcgaaactggatttgagcaatgttgctgataccgaagaagaccgcgacacgttgctacaattgctgtttacctttggcgtagagccaaatattggtaaagaaaaaccgacctttgtgtaccactttccagccagccaggcatcactggcgcaaatcagtaccgaagatcatcgggtcgctgaacgctttgaggtttattataaaggtattgagctggcgaatggtttccatgaattgacggatgcccgtgagcagcaacaacgctttgaacaagataaccgtaagcgcgcggcgcgcggtttgccgcagcaccccattgaccagaatctgattgacgccttgaaagtcggtatgcctgactgttccggcgtggcattaggtgttgatcgtctggtgatgttggcgctgggcgcggagacactggctgaagtcatcgcctttagcgttgaccgggcataattctgaaaaattactgaattaacagcgaagaatggcgtgataagcgccattctgtagcatatgttttcatttttccgttaaaggccacaatttaagactggatatttgatatcatccaggtatcaattctgtattggtttttacgctgcctgctcaatgttgcgcagtgcagttcagtgggcgcgtgttatacacgcgctgaaatgaaggatggtttcatgcctcacacgataaaaaagatgagtctgataggactcatattgatgatctttacttccgtatttggatttgccaatagcccatcggcttattacttaatgggttatagtgcgattcccttttatatattttctgcattgttattctttattccattcgccttaatgatggctgaaatgggagctgcttatcgcaaagaagaaggtggtatctattcctggatgaataatagtgtcggaccacgttttgccttcattggtacgtttatgtggttttcctcttatatcatctggatggtgagtacctccgcgaaagtttgggtaccgttctcaacattcctctatggtagcgacatgacccagcactggcgtattgccggactggagcctacgcaggtggttggtctgctggcagtggcatggatgattctggtcaccgtcgttgcttctaaggggattaataaaattgcccgcattactgcggtgggcggtattgcagtaatgtgtctgaatttagtattgctgttagtaagcattactattttgttattaaatggtgggcatttcgcgcaggatattaatttccttgcatcaccgaacccgggttatcagtccggtctggcaatgctatcgtttgtggtatttgctatttttgcctatggcgggattgaagcggttggtggtctggtcgataaaacggaaaatccagaaaagaactttgccaaaggtattgtttttgccgctattgttatttcaatcggttattcgctggcaatatttttatggggcgtcagcacaaactggcagcaggtattaagtaatggttccgttaacctcggcaatattacctatgtgctgatgaagagcctcggggtgacgctgggtaacgcactgcatttgtcacctgaagcgtcattgtcgctgggcgtatggtttgcgcgtattaccggactttcgatgttcctcgcttataccggtgcgttctttacgctttgctattcaccgctgaaagccatcatccaggggacgccgaaagcgttgtggccggaaccgatgacgcgcctgaatgcgatggggatgccgtctatcgccatgtggatgcagtgcgggttggttactgtcttcatcctgctggtttcgtttggtggcggtaccgcatcggcgttctttaacaagctgacgctgatggcgaacgtgtctatgacgcttccttacctgttcctcgcgctggctttcccattctttaaagcacgtcaggatctcgacagaccatttgtgattttcaaaacgcgtatgtcggcaatgattgcgacggtggttgtcgtactggtggtgacatttgcgaacgtcttcaccatcattcaacctgtggttgaagccggagactgggacagcacattgtggatgattggcggccctgtcttcttctcgctgttagcgatggcgatttaccagaactattgcagtcgcatggcgaataaacctgagttagctctcgactgatcatatgaaatcctgcaactcatcgtctctccggcgatgagttgtcaggaagtaatgcgtatggatgatactctccagggccggtgataactgaagatgatgttaagctgctaaatgagccacgttgacatcatttggcagcttcatgcattacaaacttcccgcctgacgacctttgcccgcagacgtcagcgttctccccgtttgtttaccgttgaggctttccagacgcatctggaagggcgggaatggcatatcgataccgtgggcatggaagcctgccagaatcagctggtggatctcatggcgtagcggcatacggtgacccatctcagcggcgtaaatacgcagctcgaaaatctgaatcccctgttgcagatccaccaggaagacttccggtgccgggttgtcgatcaccagcgagcagcgacgcgctgcggtgagcaggatttccgtcacttcttcgctattggcatcggcaggggccggtatcgtcaacaccacgcgcgtgaccgagtcagagagcgaccagttgataaactgctcggtaataaacgccttgttcggcacgattatctctttacggtcccagtcgctgatggtggtggcgcgggtgttaattttcgtcacgctaccggtgagatcgcgaattgtcaccgtatcgccaatgcgaatcggtttttcgaacaggataatcagaccagagataaagttggcgaaaatttcctgcaaaccaaaaccgagaccaacaccgagcgcggcaaccagccactgcaatttcgaccactcaataccaatcattgagaagccgaccagcccgccaatcagcatcagcagatattttgtgatggtggtgatggcgtaacccgtacccggcgttaaatccaggtgctgcaaaatcgccagttccagcagcgcgggcaggttgcgcaccagctgcgtggtgatgataaataccagaatggcaatcagcaccgcaccgagggtaattggctccagactttctacgccctgtaccgtggaggtgacatcccacagcgaaatattttcgaggaagccgaaagcggaatggatttctgaccacagcacaatgacagaaagcagggcgatcaacatcaaaattgagcgcaccagccgcaaggattgcgcactgatggcatcgagatcgacttcgctttcatcgacttcaattgctccttccgggctactgtgatgatgcgcttcctcttcgccacgcgcacgttgcgctaacatctctgcccggcgatgcttcgcccgatcaaacgccagcctgcggcgctggatcagcatccagcggcggataacgtgataaaccaccagtagcaggaaccagatggcaaccgaggtttcaagcctcgctaacagcgcctgtgccgttgccagataacccaccgccgacgccagaatggcaaccaacggcgcgccaatcatcatgttccacagcatatggttggtaatgttgtcgccgctgccctctttgttgagatacagcggaatcccggcctttttcaggctgagggtgaccaccgccagcgcaccgcaaatgaggataaagcaaagccgtcccagcgaaccggagaattcacggtcgtcgaggttatcgaacatcatcagcgccataatcagcggcacaataagcccgatgctcatcaggtagtagcgcatcccacgggaaacacgttcgcgcggccagccaaaatgagcgataaacaagccgttcgggcgggcaaaggtggcgcaaatcatcactacccacagcagcggcacggtggccgttacaccatcgccaatcgcgaccgccagcggataaggccacgcctcgcgcaagccgtaacccagcgtcatccacagcaccggtaacggtgacgcgacgagaatcgaccagaaaagagtgcgcaacgtcagccagaagtgatcctgagtcactttgccaactttcgccgccgaacgttcaagaaaacgggtgaaatagcggcgcgagtaaatactgcaaccgaccagaatcaacgcgccaaacagcggcaaaattgtctctttgctggtcagcatcatcacactggctttgcccaactgactgaaggtgtccagcgaaatgagacgacgcagatcctgggcgatttccagcggccaggcgatggtcatcgggcgcacgtcagaggtccagaacagatagcggtgcgttgcttcgttcacctctttcagcgcatcctccagttgcccgttggagactttcagcttggtcagttccaatagtagcgtgtcgccaccctgcaacaatgagttcagcaactcacgctgagtgcgcagttgtgcttccagaatacggttttgctcggcagtcagcggctgaccgtcggcctgatgaatttgccgtagcagcggctgtttattaagcagatcctcataacgtaaccgttgcacacgcaactgcgccatttcggtatcaagctgttgtggtttcggcatttccggcagccgtgccacctgcgcccgcagcgcttcgccgagcagattggacgatcccagccattgcgactgttcacgcagcgtattcaacgcctgccggacctgtaacgtctggctggcagcctgacgctgttgcgaggcaacgagatccatccgctgcgcctgttgattcaaagccgccgatagttcgcggttaattttgaattgcgcgacgatatctttcggcaaatcggcgctgttttctgccagcaattcggtactttccagcgcccgctccgcctcaagctgacgttggctgtttaattgattacgcaaggcctgcaaatacgcatccagttgctggctctctttttccgccagctctgagcgtaagcgcgctaattcctggcggttattggcagacagctgcgccagctccagttcatcaacgagcgccttaagacgtgcagagtcagactgcaacgcgaaattttgtgcctgattgagcggagtattgccggtaagcgttcccaggcggcgctcgatctcatttaactgacggcgggcgtcggtttgctgttgcggcagttgattcagcgaatcggcaatctcgcgggcgcgctcctgctcttgctgggcctgacggcttttatccagcaactggctgctgacctggagaatttcctgattcagcgcgtcggtagacattcccggcgacacgctgcgcggctcgtcacgcatgttgtttaattgtgcgcgcagagtagcggagagtttcggataattatcgataacttgctgatattgtttgatgcgctcaagggaaccttttcgttcctcaagcgcatttaaggcagactggagcgcctctacgacttccggctgtgcgggtttcgccgcttttgcctgctccagttcctgagtgatttgtttgctatcgggggccgtcgcggcgtacgccccccaactgaggcaccaggccatcagaaaagtgataatcaggcgcacgtcagcgtttcctttgatggattagacctggtcttttttgtcgtcaaccaatgggctggcgtcgtgttctgcttcgatctcttcagcaggaagcggggcaggttcagcgtctggcgtaacaaaggtttcggtagatactgccagcggctggccaattttcgtgacagacaggctttccagttgctcaaccagattcactttacccggtgcaaacaggttgataacggtggaaccgagtttaaagcgacccatttcctggcctttcagcagtgccacagaaccgtcgttttccccggcaggccaggtccagcgcttgatgataccttcgcgcggcggcgtaatggtgcccgcccagaccgtctcaatgctgccaacaatcgtcgctccgaccagaatctgcgccattgggccaaattcggtatcgaaaaggcaaatcacgcgttcgttacgggcaaacagattcggcacgttctgagccgtgagatggttaacggagaagagatcgcccggcacgtagatcatctcacgcagaataccgttgcacggcatgtgtacgcggtggtagtcacgcggggagaggtaagtggtcacaaacgtaccgttgcggaacagatccgccatcagatagttgcctgccagcagggcttcgaggctgtagttgtggcctttggcttgcaggattttatcttcttcgattttacccaactggctgataacgccatcggcaggcatgaccagtacattcggatcggtatcgattgggcgtacttcgtcacgcagcggacggacaaagaattcgttaaaggtgcggtagctggcggtgtccggcttttgcgcctctttcatgtcgaccttgtagtatttaacgaacagatcgataaccagttttgtcagccatcctgcccgcttgcttgcgccccaacccgccaggcgagtaagccatagtttcggcagaatgtactgtagcgaaagtttaaatgaatttaacaaggtagcctccaggccattgttttgtcgttcctgatccggcctacatgccggatcctgaaaaaaaggggacgattctaacgacggttagcttaattgtcagtcatccgtatcagaaaagtttttacgcgtttttacctgcgccatgctttccagaatacggtgatagttttcgaaacgggtttccgcgattttcccttcctcaaccgcttcccggatagcgcagcccggatcggtatcgtgtttgcaatcgcgatatttacacagacctaaatagtcatggaattcgacaaagccctgagtgatttgttccggctccaggtgccagaggccgaactcacgcactcctggggagtcaatcacatcaccgccgtgcgggaagtgatacagccgagcggcggtcgtggtgtgctgaccgagccccgagttgtcagagatatcgttggtcaggatctctttttgcagccccagcaacgcattcagcaggctggatttgccgacgccagactgcccggcaaaaatgctgatgcgcccggtcaacgcctcttccagcggttttagcccatcctgagtatggctggaaaccatcaatacgcgataaccgatattgcggtagatatccatctgctcgttgacgaacgccatgccttcgtcgtccagcaggtctatcttgttgagcacaataatcggctcaatctgcaaggtttcgcaggccaccaggtaacggtcgataatattgagcgacagctccggcaaaatggcggagacaatgacaatctggtcgatgttggcggcaataggttttacgccgtcgtagaaatccggacgcgtcaacaccgaggtacgctcatgcaccgcttccacgatccctttgacatttacgccttccgccgccggtttacccggacgccagactacgcggtcgccggttaccagcgaacggatggtacggcgaatattgcagcggtgaacgtcgccatcggcggattccacatcagcgtgcataccaaagcggctgatgacgataccttcatcaggctcgccaaacagattgtcgtcgtagtcgggcttctccttagacgttttaagacgacgctggtgattggcgttcacgcggcgctgctggcctttggagagtttatttttactcaatcgtacagactcctggtcgcccctgatgggcaaaacatctatgatacacgcaattgtggatcaatatagtcactgtgaatgggtggaaaatagcatgagtgccaatgaaaacaacctgatttggatcgatcttgagatgaccggtctggatcccgagcgcgatcgcattattgagattgccacgctggtgaccgatgccaacctgaatattctggcagaagggccgaccattgcagtacaccagtctgatgaacagctggcgctgatggatgactggaacgtgcgcacccataccgccagcgggctggtagagcgcgtgaaagcgagcacgatgggcgatcgggaagctgaactggcaacgctcgaatttttaaaacagtgggtgcctgcgggaaaatcgccgatttgcggtaacagcatcggtcaggaccgtcgtttcctgtttaaatacatgccggagctggaagcctacttccactaccgttatctcgatgtcagcaccctgaaagagctggcgcgccgctggaagccggaaattctggatggttttaccaagcaggggacgcatcaggcgatggatgatatccgtgaatcggtggcggagctggcttactaccgcgagcattttatcaagctgtaaaatttttcctggtcacgtaagcgccggaatccacttgcggcggcgtgattttgacgctaaattgaacgtcttgctgataatttcagcacttgagataaaaacgcaaaaaaaacttttttggggggttgcagagggaaagatttctcgtataatgcgcctcccgtaacgacgcagaaatgcgaaaattacgaaagcaaaattaagtagtacgcgggaatagctcagttggtagagcacgaccttgccaaggtcggggtcgcgagttcgagtctcgtttcccgctccaaaatttgaaaagtgctgcaaagcacagaccacccaagcgggaatagctcagttggtagagcacgaccttgccaaggtcggggtcgcgagttcgagtctcgtttcccgctccaaaatttgaaagtgctgtaaggcacagaccacccaagcgggaatagctcagttggtagagcacgaccttgccaaggtcggggtcgcgagttcgagtctcgtttcccgctccaaattcttctctcaataaaatatccacagcgacgcgatgcgttattgctggtttttgttgtctctgacaaactcttgtaaacagagttatccacagcctcaggctgtaatcttaatttcaaagaaacttcgcacggtgaatagtatttttttaacctattgatagataagttaaaaattaagattccgttttgtcgagtcgatcacttgacgattttattcgtcttgaattgcaatgcgtttttatttttattcacaagctgtggatgaatcaggcgtcacgcggtaaccctttttcaatcacccgaaccagacgctgttttttcggcaattgcacttcgactatgcacgcatttcgtctctctatttgctgcgcaatcgcccacgctatgtgctcatcgagaagtgggtgctcacctttacgactttccagcgctgtcaaaatcgtttcatcccaaggggcattgcctaatgctacggcgatattacgcagccaacgcaggtgaccaatacgacgaatcgccgatccttccgtgacttttaaaaacttctcttcgctccaggcgaataactcaatgagttccggtgcgtgtagcggcttacgcgggctgaaatcctcttctgtggtgagttgtgaatagcgattccacgggcagataagctggcagtcatcgcaaccgtaaatacggtttcccattaacggtcgcaactcttccgggatcgccccttcaagttcgatggtgagataagagatacagcggcgagcatcgacggtatatggctcgacgatggcaccggtcgggcaaatcgtcatacaggccacgcatttgccgcatccttcctcgactggttgatccacgggcagcggaatatcgaccagcaattcgcctaaaaagaagaacgaaccggcctcgcgattgaggataagtgagtgcttacctgtccagccgagcccagctttttcagctaacgggcgctcgagaataggcgcagaatcgacaaacggtctaaaattcagcgaaacacaatgttgctgaatcatctcgcccagctttttgagtcggttgcgcagaagtttgtgatagtcacggcccagcgcataacggctaacatagccgagtttggggtttttcagcgtgctggcaaatgcggcgttagcaggaaggtaattcatccgcacgctgatcacgcgcagcgtaccgggcaataactcatgagggcgagcgcgcagcataccgtgacgtgccatccagtccatttcgccgtggtattgtttgtccagccatgcttgcagtttgggctcggactcgctgagatcggtatcggtaatacctacctgctgaaagcccagttccagcccccactgtttaattttttgcgctaactgattgagatcgaggggctctgacatgacggaccatacaatgaagaaaaaccccgtaagtataccacacaccgtctggtacgccgacgatatccgccgcggagaacgcgaggcggcagatgtgctggggctcacactctatgagctgatgcttcgcgctggcgaggccgcattccaggtgtgtcgttcggcgtatcctgacgcccgccactggctggtgctgtgcggtcatggtaataacggcggcgatggctacgtggtcgcgcgactggccaaagcggtcggcattgaggtcacgttgttggcccaggagagcgacaaaccgttgccggaagaggccgcgctggcacgcgaagcatggttaaacgcgggtggcgagatccatgcttcgaatattgtctggcccgaatcggtagatctgattgttgatgcgctgctcggtaccggtttgcggcaagcgccccgcgaatccattagccagttaatcgaccacgctaattcccatcctgcgccgattgtggcggttgatatcccttccggcctgctggctgaaactggcgctacgccaggcgcggtgatcaacgccgatcacaccatcacttttattgcgctgaaaccaggcttgctcactggaaaagcgcgggatgttaccggacaactgcattttgactcactggggctggatagttggctggcaggtcaggagacgaaaattcagcggttttcagcagaacaactttctcactggctaaaaccgcgtcgcccgacttcgcataaaggcgatcacgggcggctggtaattatcggtggcgatcacggcacggcgggggctattcgtatgacgggggaagcggcgctgcgtgctggtgctggtttagtccgagtactgacccgcagtgaaaacattgcgccgctgctgactgcacgaccggaattgatggtgcatgaactgacgatggactctcttaccgaaagcctggaatgggccgatgtggtggtgattggtcccggtctgggccagcaagagtgggggaaaaaagcactgcaaaaagttgagaattttcgcaaaccgatgttgtgggatgccgatgcattgaacctgctggcaatcaatcccgataagcgtcacaatcgcgtgatcacgccgcatcctggcgaggccgcacggttgttaggctgttccgtcgctgaaattgaaagtgaccgcttacattgcgccaaacgtctggtacaacgttatggcggcgtagcggtgctgaaaggtgccggaaccgtggtcgccgcccatcctgacgctttaggcattattgatgccggaaatgcaggcatggcgagcggcggcatgggcgatgtgctctctggtattattggcgcattgcttgggcaaaaactgtcgccgtatgatgcagcctgtgcaggctgtgtcgcgcacggtgcggcagctgacgtactggcggcgcgttttggaacgcgcgggatgctggcaaccgatctcttttccacgctacagcgtattgttaacccggaagtgactgataaaaaccatgatgaatcgagtaattccgctccctgatgagcaggcaacattagacctgggcgagcgggtagcgaaagcctgcgatggcgcaaccgtaatctatctgtatggcgatttaggcgcaggtaaaaccacctttagccggggctttttacaggctctgggtcatcagggtaatgtcaaaagccccacttatacgctggtcgaaccctatacgctcgacaacttaatggtctatcactttgatttgtaccgccttgccgatcccgaggagctggagtttatggggatccgcgattattttgccaacgatgccatctgcctggtggagtggccacaacaaggtacaggtgttcttcctgacccggatgtcgaaatacacattgattatcaggcacaaggccgtgaggcgcgcgtgagtgcggtttcctctgcgggtgaattgttgctggcgcgtttagccggttaacctttgaaaggtggcgggatgatgtatcgcatcagaaattggttggtagcgacgctgctgctgctgtgcacgccggtgggtgccgcgacgctctctgatattcaggtttctaacggtaatcaacaggcgcggataacgttgagttttattggcgatcctgattatgcgtttagccatcaaagcaaacgcaccgtggcgctcgatatcaaacaaacgggcgtgattcagggactgccgttgttgttcagcggcaataatctggtgaaggcgattcgctctggaacgcctaaagatgcacaaacgctacggctggtggtcgatcttaccgaaaacggtaaaaccgaagcggtgaagcggcagaatggcagcaattacactgtcgtctttacgattaacgccgatgtgccgccaccgcctcctccgccgcccgtggttgcgaaacgcgttgaaacgcctgcggttgtcgcaccgcgcgtcagcgaaccggcgcgcaatccgtttaaaacggaaagtaaccgcactacgggtgttatcagcagtaatacggtaacgcgtccggcagcgcgcgcgacggctaacactggcgataaaattatcatcgctattgatgccggacacggcggtcaggaccctggcgctatcggccccggtggtacgcgggagaaaaatgtcaccatcgccatcgcgcgtaaattgcgtactttgctcaatgacgatccgatgtttaaaggcgttttaacccgtgacggggattactttatctcggtgatggggcgcagtgatgtggcacgtaagcaaaacgccaatttcctcgtgtcgattcacgctgatgccgcaccgaaccgcagtgcgactggcgcttccgtatgggtgctctctaaccgtcgcgccaacagtgaaatggccagctggctggagcagcacgagaaacagtcggagctgctgggtggggcgggtgatgtgctggcgaacagtcagtctgacccctattaaagccaggcggtgctggatttacagttcggtcattcccagcgggtagggtatgatgtagcgaccagtatgatcagtcagttgcaacgcattggcgaaatacataaacgtcgaccagaacacgccagccttggcgttctgcgctcgccggatatcccatcagtactggtcgaaaccggttttatcagcaacaacagcgaagaacgtttgctggcgagcgacgattaccaacaacagctggcagaagccatttacaaaggcctgcgcaattacttccttgcgcatccgatgcaatctgcgccgcagggtgcaacggcacaaactgccagtacggtgacgacgccagatcgcacgctgccaaactaaggacgattgatgccaattcaggtcttaccgccacaactggcgaaccagattgccgcaggtgaggtggtcgagcgacctgcgtcggtagtcaaagaactggtggaaaacagcctcgatgcaggtgcgacgcgtatcgatattgatatcgaacgcggtggggcgaaacttatccgcattcgtgataacggctgcggtatcaaaaaagatgagctggcgctggcgctggctcgtcatgccaccagtaaaatcgcctctctggacgatctcgaagccattatcagcctgggctttcgcggtgaggcgctggcgagtatcagttcggtttcccgcctgacgctcacttcacgcaccgcagaacagcaggaagcctggcaggcctatgccgaagggcgcgatatgaacgtgacggtaaaaccggcggcgcatcctgtggggacgacgctggaggtgctggatctgttctacaacaccccggcgcggcgcaaattcctgcgcaccgagaaaaccgaatttaaccacattgatgagatcatccgccgcattgcgctggcgcgtttcgacgtcacgatcaacctgtcgcataacggtaaaattgtgcgtcagtaccgcgcagtgccggaaggcgggcaaaaagaacggcgcttaggcgcgatttgcggcaccgcttttcttgaacaagcgctggcgattgaatggcaacacggcgatctcacgctacgcggctgggtggccgatccaaatcacaccacgcccgcactggcagaaattcagtattgctacgtgaacggtcgcatgatgcgcgatcgcctgatcaatcacgcgatccgccaggcctgcgaagacaaactgggggccgatcagcaaccggcatttgtgttgtatctggagatcgacccacatcaggtggacgtcaacgtgcaccccgccaaacacgaagtgcgtttccatcagtcgcgtctggtgcatgattttatctatcagggcgtgctgagcgtgctacaacagcaactggaaacgccgctaccgctggacgatgaaccccaacctgcaccgcgttccattccggaaaaccgcgtggcggcggggcgcaatcactttgcagaaccggcagctcgtgagccggtagctccgcgctacactcctgcgccagcatcaggcagtcgtccggctgccccctggccgaatgcgcagccaggctaccagaaacagcaaggtgaagtgtatcgccagcttttgcaaacgcccgcgccgatgcaaaaattaaaagcgccggaaccgcaggaacctgcacttgcggcgaacagtcagagttttggtcgggtactgactatcgtccattccgactgtgcgttgctggagcgcgacggcaacatttcacttttatccttgccagtggcagaacgttggctgcgtcaggcacaattgacgccgggtgaagcgcccgtttgcgcccagccgctgctgattccgttgcggctaaaagtttctgccgaagaaaaatcggcattagaaaaagcgcagtctgccctggcggaattgggtattgatttccagtcagatgcacagcatgtgaccatcagggcagtgcctttacccttacgccaacaaaatttacaaatcttgattcctgaactgataggctacctggcgaagcagtccgtattcgaacctggcaatattgcgcagtggattgcacgaaatctgatgagcgaacatgcgcagtggtcaatggcacaggccataaccctgctggcggacgtggaacggttatgtccgcaacttgtgaaaacgccgccgggtggtctgttacaatctgttgatttacatccggcgataaaagccctgaaagatgagtgatatcagtaaggcgagcctgcctaaggcgatttttttgatggggccgacggcctccggtaaaacggcgttagccattgagctgcgtaaaattttaccagtagagttgataagcgttgattctgcccttatttacaaagggatggatatcgggacggcgaagccgaacgctgaagagttactcgccgcgccgcaccgattgctggatattcgcgatccgtcgcaggcttactcggctgctgattttcgccgcgatgcgctggcggaaatggccgatatcaccgcggcggggcggatcccactgttagtgggcggtacgatgttgtatttcaaggcattgctggaagggttgtcgccgctaccgtcggcagacccggaagtacgggccagaattgagcaacaggcggcagagcaaggttgggagtcattgcatcgtcaacttcaggaggtagatccggttgcggcagcaaggattcatccaaatgatccacaaaggctttcccgggcactggaagtttttttcatttcgggtaaaactttaacggaactgacgcaaacgtcaggagacgctctaccgtatcaggtgcatcagttcgccatcgccccggcgagccgtgaactgctccatcaacgcattgagcagcgttttcatcagatgttggcttcaggttttgaagcagaagtccgggcgctttttgcccgaggagatttgcatacggacttgccttccattcgttgcgtgggttatcgccagatgtggtcttaccttgaaggcgaaatctcatacgatgaaatggtttatcgaggtgtttgcgccacgagacagttggcgaagcggcagataacctggctgcgtggttgggaaggggttcactggcttgacagtgaaaaaccagaacaggcgcgtgacgaagtattacaggttgttggtgctatcgcaggctgaatgtgtacaattgagacgtatcgtgcgcaattttttcagaatcgaaaggttcaaagtacaaataagcatataaggaaaagagagaatggctaaggggcaatctttacaagatccgttcctgaacgcactgcgtcgggaacgtgttccagtttctatttatttggtgaatggtattaagctgcaagggcaaatcgagtcttttgatcagttcgtgatcctgttgaaaaacacggtcagccagatggtttacaagcacgcgatttctactgttgtcccgtctcgcccggtttctcatcacagtaacaacgccggtggcggtaccagcagtaactaccatcatggtagcagcgcgcagaatacttccgcgcaacaggacagcgaagaaaccgaataaggtttcgggctgtttttttacacggggagccagcgatcctgcgttccccgctgatctatttagagggttatacgcttgtttgaccgttatgatgctggtgagcaggcggtactggtacacatctattttacgcaagacaaagatatggaagacctccaggagtttgaatctctggtctcttccgccggtgtcgaagcattgcaggtgattaccggtagccgtaaagcgccgcacccaaagtattttgtaggtgaaggtaaagcagttgaaattgcggaagctgtcaaagcgacgggtgcttcggtcgttctttttgaccatgccctgagcccggcgcaagagcgtaacctggagcgtttgtgcgagtgtcgtgttatcgaccgcaccggccttattttagatattttcgcccaacgtgcgcgtacccatgagggtaagttgcaggttgagctggcgcagctgcgccatctggctacgcgcctggtgcgtggctggacccaccttgaaagacagaaaggcgggataggtttgcgtggtccgggtgaaacccagctcgaaaccgaccgtcgtttgttgcgtaatcgcatcgtgcagatacagtcgcgcctggaaagagttgaaaagcagcgtgagcaggggcggcaatcgcgtatcaaagccgacgttcctactgtttcgctggtgggatataccaacgccggtaaatctacccttttcaatcgcatcaccgaagcgcgggtctacgcggcagaccagttgtttgccaccctcgacccgacgttgcggcgtattgacgttgcagatgtcggtgaaaccgtacttgcagataccgtagggtttattcgccacctgccgcacgatctggtggcggcatttaaagccacgttacaagagacgcggcaagccacattactgctgcacgtcattgatgcggcggatgtgcgtgtacaagaaaacatcgaagcggtgaatacggttcttgaagagatcgacgctcacgagatcccaaccctgctggtgatgaacaagatcgatatgctggaagatttcgaaccgcgtattgatcgggacgaagagaacaaaccgatccgtgtctggctttccgcacagaccggagcggggataccacagctttttcaggctttgacggagcggctttccggcgaggtggcgcagcatacattgcgtctgccaccgcaggaagggcgtctgagaagtcgtttttatcagcttcaggcaatagaaaaagagtggatggaggaggacggcagcgtaagtctgcaagttcgtatgccgatcgttgactggcgtcgcctctgtaaacaagaaccggcgttgatcgattacctgatctaacggcgtagcgtctgaagcgtggagtcatatcctctggcgtcgaaagacaacagggatcaccgcataacaaatatggagcacaaacatggcgtggaatcagcccggtaataacggacaagaccgcgacccgtggggaagcagcaaacctggcggcaactctgagggaaatggaaacaaaggcggtcgcgatcaagggccacctgatttagatgatatcttccgcaaactgagcaaaaagctcggtggtctgggcggcggtaaaggcaccggatctggcggtggcagttcatcgcaaggcccgcgcccgcagcttggcggtcgtgtcgttaccatcgcagcggcagcgattgtcattatctgggcggccagtggtttctataccattaaagaagccgaacgcggcgtggtaacacgctttggtaaattcagccatctggttgagccgggtctgaactggaaaccgacgtttatcgacgaagtcaaaccggtgaacgtggaagccgtgcgtgaactggccgcttctggtgtgatgctgacgtcggacgagaacgtagtgcgcgttgagatgaacgtgcagtaccgcgtcaccaatccggaaaaatatctgtatagcgtgaccagcccggatgacagcctgcgtcaggctaccgacagcgccctgcgtggagttatcggtaaatacaccatggaccgcattctgacggaaggtcgtaccgtgattcgtagcgatactcagcgcgaactggaagagacgattcgtccgtatgacatgggtatcacgctgctggacgtcaacttccaggctgctcgtccgccggaagaagtaaaagcggcgtttgacgatgcgattgccgcgcgtgaaaacgaacagcaatacattcgtgaagcagaagcgtataccaacgaagttcagccgcgtgcgaacggtcaggcgcaacgtatcctcgaagaggcgcgtgcgtacaaggcccagaccatcctggaagctcagggtgaagtggcgcgctttgctaaacttctgccggaatataaagccgcgccggaaattactcgcgagcgtctgtatatcgagacgatggaaaaagtgttgggtaacacccgcaaagtgctggttaacgataaaggtggcaacctgatggttctgccgttagaccagatgctgaaaggtggtaacgcccctgcggcgaagagcgataacggtgccagcaatctgctgcgtctgccgccagcctcttcctccacaaccagtggagcaagcaacacgtcgtccaccagtcagggcgatattatggaccaacgccgcgccaacgcgcagcgtaacgactaccagcgtcagggggaataacgatgcgtaagtcagttatcgcgattatcatcatcgtgctggtagtgctttacatgtctgtctttgtcgtcaaagaaggtgagcgcggtattacgctgcgttttggtaaggtactgcgtgacgatgacaacaaacctctggtttatgagccgggtctgcatttcaagataccgttcattgaaacggtgaaaatgctcgacgcacgtattcagaccatggacaaccaggccgaccgctttgtgaccaaagagaagaaagacctgatcgtcgactcttacatcaaatggcgcatcagcgatttcagccgttactacctggcaacgggcggtggcgacatttcgcaagcggaagtgctgttgaaacgtaagttctctgaccgtctgcgttctgaaattggtcgcctggacgtgaaagacatcgtcaccgattcccgtggtcgtctgaccctcgaagtacgtgacgcgctgaactccggttctgcgggtacagaagatgaagttactaccccggcggcagataacgccattgccgaagcggcagagcgcgtaacggctgagacgaagggcaaagttccggtcatcaacccgaacagtatggcggcgctgggtattgaagttgtcgatgtgcgaattaagcagatcaacctgccgaccgaagtgtctgaagcgatctacaaccgtatgcgcgccgagcgtgaagcggtagcgcgtcgtcaccgttcacaaggtcaggaagaagcggaaaaactgcgcgcgactgccgactatgaagtgaccagaacgctggcagaagctgagcgtcagggccgcatcatgcgtggtgaaggcgatgccgaagcagccaaactgtttgctgatgcattcagtaaagatccggacttctatgcatttatccgtagcctgcgtgcttatgagaacagcttctctggcaatcaggacgtgatggtcatgagcccggatagcgatttcttccgctacatgaagacgccgacttccgcaacgcgttaatataacgactgcggtacaggtcaataaagccaccgcatcctcagggatgtcggtggttttctttttctataaggataatcaatgaattcgacaatctggctggcgcttgccctggttttggtgctggaaggtttagggccgatgctttacccgaaggcatggaagaagatgatctctgcgatgaccaatttgcccgataatattttacgtcgttttggcggtggacttgtggttgcgggcgttgtggtctactacatgttgaggaaaacgattggctgaacaaaaaacagactgatcgaggtcatttttgagtgcaaaaagtgctgtaactctgaaaaagcgatggtagaatccatttttaagcaaacggtgattttgaaaaatgggtaacaacgtcgtcgtactgggcacccaatggggtgacgaaggtaaaggtaagatcgtcgatcttctgactgaacgggctaaatatgttgtacgctaccagggcggtcacaacgcaggccatactctcgtaatcaacggtgaaaaaaccgttctccatcttattccatcaggtattctccgcgagaatgtaaccagcatcatcggtaacggtgttgtgctgtctccggctgcgctgatgaaagagatgaaagaactggaagaccgtggcatccccgttcgtgagcgtctgctgctgtctgaagcatgtccgctgatccttgattatcacgttgcgctggataacgcgcgtgagaaagcgcgtggcgcgaaagcgatcggcaccaccggtcgtggtatcgggcctgcttatgaagataaagtggcacgtcgcggtctgcgtgttggcgaccttttcgacaaagaaaccttcgctgaaaaactgaaagaagtgatggaatatcacaacttccagttggttaactactacaacgctgaagcggttgattaccagaaagttctggatgatacgatggctgttgccgacatcctgacttctatggtggttgacgtttctgacctgctcgaccaggcgcgtcagcgtggcgatttcgtcatgtttgaaggtgcgcagggtacgctgctggatatcgaccacggtacatatccgtacgtaacttcttccaacaccactgctggtggcgtggcgaccggttccggcctgggcccgcgttatgttgattacgttctgggtatcctcaaagcttactccactcgtgtgggtgcaggtccgttcccgactgaactgtttgatgaaactggcgagttcctctgcaagcagggtaacgaattcggcgcaactacgggtcgtcgtcgtcgtaccggctggctggacaccgttgccgttcgtcgtgcggtacagctgaactccctgtctggcttctgcctgaccaagctggacgttctggatggcctgaaagaggtgaaactctgcgtggcttaccgtatgccggatggtcgtgaagtgactaccactccgctggcagctgacgactggaaaggtgtagagccgatttacgaaaccatgccgggctggtctgaatccaccttcggcgtgaaagatcgtagcggcctgccgcaggcggcgctgaactacatcaagcgtattgaagagctgaccggtgtgccgatcgatatcatctctaccggtccggatcgtactgaaaccatgattctacgcgacccgttcgacgcgtaattctggtacgcctggcagatattttgcctgccgggctaacagtgtgatacattgctgtgtcgggtaagccattacgctatccgacacagtgttaaatcctcgcttttttccttccccgaactgaaataaattagcgacacagcttgtggctggtttatcatcaatataaatgtattttttcccgatttcccttttgaggttgatgtgcagttaacgagtttcactgattacggattacgtgcgctgatctacatggcgtcattgccagaagggcggatgaccagtatttctgaagtgactgacgtctacggcgtctcccgtaatcatatggtcaaaataatcaatcaacttagtcgtgccggctacgtgactgctgttcgtggaaaaaatggcggcattcgtctgggtaaaccggcgagtgcgatacgtattggtgatgtggtgcgcgagctggagcccttatcgctggtgaattgcagcagtgagttttgccacattacacctgcctgtcggttgaaacaggcactttctaaggccgtgcaaagttttcttacggaactggataactacacgcttgccgatttggttgaagagaatcaaccgctttataaattattgctggtggagtgacgaaaatcttcatcagagatgacaacggaggaaccgagatgtcacaagatcctttccaggaacgcgaagctgaaaaatacgcgaatcccatccctagtcgggaatttatcctcgaacatttaaccaaacgtgaaaaaccggccagccgtgatgagctggcggtagaactgcacattgaaggcgaagagcagcttgaaggcctgcgtcgccgcctgcgcgcgatggagcgcgatggtcaactggtcttcactcgtcgtcagtgctatgcgctgccggaacgcctcgacctggtgaaaggtaccgttattggccaccgtgatggctacggctttctgcgggttgaagggcgtaaagatgatttgtatctctccagcgagcagatgaaaacctgcattcatggcgatcaggtgctggcgcagccgctgggcgctgaccgtaaaggtcgtcgtgaagcgcgtattgtccgcgtactggtgccaaaaaccagccagattgttggccgctactttaccgaagcgggtgtcggctttgtggttcctgacgacagccgtctgagcttcgatattttaatcccgcccgatcagatcatgggcgcgcggatgggctttgtggtggtggttgaactgacccaacgcccgactcgccgtaccaaagcggtgggtaaaatcgtcgaagtacttggcgacaatatgggcaccggcatggcggttgatatcgctctgcgtacccatgaaattccgtatatctggccgcaggctgttgagcaacaggttgccgggctgaaagaagaagtgccggaagaagcaaaagcgggccgtgtcgatttgcgcgatttaccgctggtcaccattgatggcgaagacgcccgtgactttgacgatgcagtttactgtgagaaaaaacgcggcggcggctggcgtttatgggtcgcgattgccgacgtcagctactatgtgcgtccgccaacaccgctggacagagaagcgcgtaaccgtggtacgtcggtgtacttcccttcgcaggttatcccgatgctgccggaagtgctctctaacggcctgtgttcgctcaacccgcaggtagaccgcctgtgtatggtgtgcgagatgacggtttcgtcgaaaggccgcctgactggctacaaattctacgaagcggtgatgagctctcacgcgcgtctgacctacaccaaagtctggcatattctgcagggcgatcaggatctgcgcgagcagtacgccccgctggttaagcatctcgaagagttgcataacctctataaagtgctggataaagcccgtgaagaacgcggagggatctcatttgagagcgaagaagcgaagttcattttcaacgctgaacgccgtattgaacgtatcgaacagactcagcgtaacgacgcccacaagttaattgaagagtgcatgattctggcgaatatctcggcggcgcgtttcgttgagaaagcgaaagaaccggcactgttccgtattcacgacaagccgagcaccgaagcaattacctctttccgttcagtgctggcggagctggggctggaattgccgggcggtaacaagccggaaccgcgtgactacgcggaactgctggagtcggttgccgatcgtcctgacgcagaaatgctgcaaaccatgctgctgcgctcgatgaaacaggcgatttacgatccggaaaaccgtggtcacttcggtctggcattgcagtcctatgcgcactttacttcgccgattcgtcgttatcctgacctgacgctgcaccgcgccattaaatatctgctggcgaaagagcaggggcatcagggcaacaccactgaaaccggcggctaccattattcgatggaagagatgctgcaactgggtcagcactgttcgatggcggaacgtcgtgccgacgaagcaacacgcgatgtagctgactggctgaagtgtgacttcatgctcgaccaggtaggtaacgtctttaaaggcgtaatttccagcgtcactggctttggcttcttcgtccgtctggacgacttgttcattgatggtctggtccatgtctcttcgctggacaatgactactatcgctttgaccaggtagggcaacgcctgatgggtgaatccagcggccagacttatcgcctgggcgatcgcgtggaagttcgcgttgaagcggttaatatggacgagcgcaaaatcgactttagcctgatctccagcgaacgcgcaccgcgcaacgtcggtaaaacggcgcacgagaaagcgaaaaaaggcgatgcaggcaaaaaaggcggcaagcgtcgtcaggtcggtaaaaaggtaaactttgagccagacagcgccttccgcggcgagaaaaaaccgaagccgaaagcggcgaagaaagacgcgagaaaagcgaaaaagccatcggcgaaaacgcagaaaatagccgcagcgaccaaagcgaagcgtgcggcgaagaaaaaagtggcagagtgatcattaccctcttcaaacagaagagggtcagattgctgacaaaatgcgctttgttcatgccggatgcggcgtgaacgccttatccggcctacataatcacgcaaattcaatacattgcagggatcatgtaggcctgataagcgtagcgcatcaggcaaaacgtaaacaacgagtatattaatgagcgaaatgatttacggcatccacgcagtgcaggccctgctggagcgcgcccctgaacgttttcaggaagtctttattttaaaaggccgtgaagataaacgtctgttaccgctgattcacgcccttgagtctcagggcgtggttatccagttggcaaaccgccaatatctcgacgagaaaagcgacggtgccgtgcatcagggcattatcgcccgcgtgaagccaggacgtcagtatcaggaaaacgatctgccggatctgatcgcttcgctcgatcaaccgttcctgctgatcctcgacggtgtaaccgatccgcacaacctcggcgcgtgcctgcgtagcgcggacgctgctggcgttcacgcggtgattgtgccgaaagatcgctccgcacagctcaacgctacggcgaaaaaggtagcctgcggcgcggcagaaagcgttccactgattcgggtgactaaccttgcgcgcaccatgcgtatgttgcaggaagagaatatctggatcgtcggtacggcaggcgaggcagatcatacactctatcagagcaaaatgaccggacgcctggcgctggtgatgggcgcggaaggtgaaggtatgcgtcgcctgacccgtgaacattgcgatgagttgatcagcatcccaatggcaggaagtgtttcttccctgaacgtttcggttgcgaccggaatttgcttatttgaagcggtgcgccagcgcagctagttcatcgctatccattcaatggatattttgttagcccgataatttttacgtatcgggcttcgaatggaaaatacccttaatggtgggaatcaataccgatattgatatcctgtaaggtgttgagttcctgttcaatacgcgaacgtgcattcagcaggatacgcgtgacatcggcaattttttcttttgtcgcacgaaatacgggtattgaaatgctgatggcggcaagcgttttatttcgctgttttaaggcaacagcataacataccgtctcctcattgatttccctgttatcaaatgcatacccatttactctggcatcctcaagttgttggcgcaattgttccagggtcgtaacgctatacgatgtcatgggaacaaaaccgtcagggtagagttgctgaatttgttgatcactgtattcacagataatggcttttcccagcgcagaatagatagcaggcagacgagtcccaatatgtgaaaccagttgtacggtttgtgccgcctgcaccttattgatatataaaacatctgcaccgtccaggatccccatctgacaaacctcattgcactctttgacaatgttgttcatctctttgtaaaccatttttaaccagtacgatctgtcgaggaaagcacgggacagaatcgagcaggagatccccagattataaagctgggtattagcgtcataactgatgtaccgctgttcaaccagcgttttgaggatgggaaaaatcgttcctttcaggatgcctgttttttccgaaaggtgagttaatgaaacaccctgattctccgctgccagtgcttccagtatctctaacacccggatggtaggcttatgttccataatgactatttcccttaccatgagtaatgcaccattctagggagaattataattcaagtaaataaaccccctcgcgttccttgactgctgttgaccccatcagtccttttttagcgtgatactggtcataaaacggataaaaaaagaactgtgattgttttttatgcaggcctctggcgtaattactccaaatctatcaataacttatgtgtatcacttctgtgattggctaaatttgacttatttctgaggttgggtatactcattttagtttgtatttaaaaacgttgtttgtatatatgaacaataaaactatgatgaggtaggcatgaaaagtcgttacataacccccgttgtcaccatatttgatgaacaagggcgaatcgatcctgagcaaaacactcaggtttatgattttattaaaaatcacgtgtccgggtttgttgtgatgggcagtactggtgagtttttttcgcttaatatggaaaacgcccgccaaatgattaaaacctgtagtgagttttcccgaggcgatatgaaggtttatgccggagccagtcgcatggacgtcaatgaatcaatatcactggccaattacgcctgggagcaaggattggatggtgtgatgatcatcagtccttattatttccctctggatgatgaagctatttttgatttctacagtacgattgcaagccaaaccccggctcatatttttatttataacttcccggagagaaccgggtacagcgtatcaccagagatttgtttacgactggcagataaatatcccaatattattggtatgaaagataccgtccctgatgctttccatactgcgcaggttatcaataccgtaaagaaaaatatccctcattttgaagtgtatgcaggatatgacaataattttgcccacaacatactatctggtggagatggctgtattggtggtttatccaatattgtccctgaattttttgcctcctggatgcaagcattcacgaatgacgatttacttgcagtcgcgcagcatcagcagatagtcgatcaactaatggccgtttacagcgtgaattctccttttattcccactttcaaaaaagcccttcagttaaagggggttattcaatcagaacggtgttcttcaccatttaatatacttgatgatattcaatcccggagattgcaggaaattttatctgtcaccgattattataaataatataaaacctataaatagaatatcttaccaacagaactaaggatttatttatggctaatataacccaatacgataatccgctgttgaattccgcaattcaaaaatcgtggaaacgtttagtacccttaatgttcataatgtattttgttgcctttattgatcgggtaaatgttggctttgccaaagatgcaatgaaactggatattggattatcagagtcggcattcgctctcggtgcaggaatatttttcgctgcctatgcacttttcggcattccagctaacctgatcctcaataaaatcggcgcacaaaagtggttaagtattacaactgcaatttggggccttctctcggcaatgatgggatttgtcaccggtgaaacgcaatttattattttgcgctttctgttagggctgggcgaggcggggttctatcccggaattttactgctcgcatccatttattttcctaacaaggttcgcggatcggtcgtgggaatatttgtgttgggggtgccgctggcgttaacgctcggttcgccaatatcgggagctttacttgaactacatggctggatgggacgtccaggatggttctggatgtttgtcattgagggattgccggcattagtgcttggtatctttacctggttctaccttgatgataatccgacgaaagcgcgatttcttacccaggaagaaaaagacgctttgaataagcaactggaatctgaacgacagaaaacagaaaccagttcagtgatttcagcattgaaaaatgccaaagtttggcatctggcattaatctacggcaccatccagatatcagtatatggtttaatgtttttccttccgtcacaggttgcatcgctgatgggagaaagccttggctttaagcagtcattagtcgcggcaataccatgggcgtgctctgcttgtggcgtctattacattccgcgaattgctgaccgcaatccttcccggcgtgtggccatttcggttatgtgtatgttggctgctgctgtcggccttgccctttccgcatttgcggggcctgttgtggcgattggtgcactttgtttaagtgcggttggtttcctctcagtacagccaatattctggactttccctccacaacttcttactggtccggcactggctgcggggatcggtttttgcaccacgatgggcgctttctgctcgttccttgctcctcttatccgtgttgaggttgatcgggcaatggatagcagcatcgccggattgatggcgttgtctgtaattactatcggctgcgcattattgattggattgctgcaaaagagccaacaggcagcaaaagcatacagttaataagattgaacatctgactggaagaatatgattatgcaaaaaatattacgtatcgacagtaacgataatctcattgtcgcgttgaaagacctgcacgctggagaatcgtactcgtgggatgacgacaacataacgttagtaactgatgttaaggctaaacataagtttgcgacgcaagatattcctctggatggcattgtttcgatgtacggtacgccagttggcaaggccacgcgtcccatcgttaagggagaagcgattaccgttgataatattcgccactatgcagctcctgtcacactggaggatgttgaaccctaccactggcaggcaccggatgtctctgaatggagcacccgcacttttaaaggttatgtccgtgacgatggcagagtgggtactgccagttactggttagtctttccattggtattttgcgagaaccgtaatgtcagtaagttaaccaatgctttgaatgatgctttgggttataccaataactcactgaaaaagtttgctcttaatctgacgtccggtagcgatgaactgatcgaaaccgcgagaatgttcccgcatattgaaggtgttcgctgtattacggtcaccagtggttgtggtggtgcaacttcagactgtgaaactatgtgcgatgtattagctgcttatgctgaccatccgaatgtaatcggtatgacggtattcagtttaggatgtgaaaaagcgcagcagaaaatgtttaaggatgcgctggcgagacgtaatcctgaatttgataaacctgcgctctactttctccaacaggagtgggacagcgaagagcggatgatgcagaccgctttacagcagactttcgaggcaatgaaagcggtgaagccgacagaaagagtagaggtccctctttcctgtctcaaagtggggatgaagtgtggtggttccgatggtttttctggtatctccggcaaccctgcaatggggctggtttctgactggttgacaacgcttggtggcgcttccgggttagcagaatttccagaattatgtggggcagaaggtgatatggttaagcgttgtattaatcttgaggataaaaaaaagttcctcaatctaatgcaaggctacgaaaagacagcgaactttttcgataccaccattgcggataacccaagttttggcaacatcgcggatgggttgattactgacgcaataaaatctaccggagcagcgaaaaaaggcgggcgagcgccaattgtgagtgtatgcgattacgctgaaccgatgcccgatagtggattatcgttggtgtgtactccgggcaatgacgtggacgcggtaaccggattggtagcagcaggatgtaatgtggttatcttctcgacgggtcttggtacgcccaccggtaacccgattgttccggtgttaaaaatatccaccaacagcacgattgccagacgattgtctgacatgattgatttcgactgtggcccagtgattgacggcactccgctggaagatgtgagtagagaattatttgaaaaagttattgaaactgccagtaaggactacgtcgtgaaggcagacaaacttgaacagtttgactttatgttgtggaagcggtcgttagacttgtagtgactaatcattagcgtcagcgtatgtagactggcgcattttttatcgtatgcatagcgttaaatttttggttcttctaaatagccatccagatttggatggtttttttttgtctatagctggtaagataattacgtactgcaaatattcattttattaatatttaaacttaatttatatggaataatatatgacatggaatccgttggcgctggcgacggcgctgcaaactgtacctgaacaaaatattgatgtaacaaatagctataacgcattaattattaaaatgaatgattatggcgatttgtaaatcaatattctttttacttcccgccaaatgattatcgaaacctttatttgtccggtgagtagtatcagcaatccagatgaatttaataccttcttattaagaaatcagaagatgatgccgttgtcatcggtagggatctccagcgtgcaacatgaagagtattacattgttttcggtgcgttatcgcttaaatcttctcttgaagatatcctgcttgagataacctcgctggtagataacgcattggatctggctgaaattacagaagaatattcacactaattacaaggacgggtatttatgggaattttaaaaagtttatttacgctggggaaatcgtttatctcccaagcggaagaatccattgaagaaacccagggcgtgcgcatgctggaacagcatattcgtgacgctaaagctgaactcgataaagccggaaaatctcgcgttgatctgctggcgcgggtgaaattaagtcacgataagctgaaagatttacgtgagcgcaaagccagtctggaagctcgtgcgctgtaagcgttaagcaagaacgttaatccgtcgttgattaacgaagttgctgaagaaatcgcgcgccttgagaatctcattaccgctgaagagcaagtgttgtcgaatctggaagtctctcgtgatggcgtggaaaaagcagttacagcgacagcgcagcgtatcgctcagtttgagcagcaaatggaagtcgttaaagctactgaagccatgcagcgtgcacaacaggctgtaacgacctctaccgttggcgcatcttccagcgtttcgacagcggcagaatccttaaaacgcctgcaaacgcgtcaggccgaacgtcaggctcgcctggatgctgccgcacagttggaaaaagtcgcagacggtcgcgatcttgatgaaaagctggcggaagccggaattggcggtagcaataaaagtagcgcccaggatgtattagcaagactgcaacgccaacagggcgagtaattttttgccagcctcgctaaaaggctggcaactattttaaggataaaatatgtctggttttttccagcgtctgtttggcaaggataataagcctgctatcgctcgcggtcctctgggacttcatctcaatagtggctttacgctcgacacgttagcatttcgtttgctggaagatgaattgctgattgcgctgccgggtgaggaatttacggtagccgccgtcagccgcatcgatctgggcggcggtagccagattttccgctactacacttcgggcgatgaatttctgcaaatcaataccaccggcggcgaagatattgatgacattgatgatatcaagctctttgtctatgaagagagctacggtatcagtaaagagagtcactggcgcgaggcgatcaacgccaaagcgatgggggctataaccttaaactggcaggaaaaacgctggcagcgattttttaacagtgaagaaccgggaaatatcgaactcgtctacatgctggaaaaagtagaaaatcaaaaccatgccaaatgggaggtccataattttagcatgggctaccaacggcaagtgaccgaagatacttacgaatatttgctgttaaatggtgaggaatcatttaacgatctcggcgagccggagtggatattttcgcgcgcgctgggtgtcgatatcccgctgacatcacttcatattattggttaattacaaggacgtttacaatgcatatactggattcacttcttgcctttagcgcctatttctttattggcgtggctatggtgattatttttctttttatctattctaaaattacaccgcacaacgaatggcagttaatcaaaaacaataataccgcggcgtcactggcgttcagtggtacattgttaggttacgttatcccattatccagtgcggcaatcaatgcggtgagtattccagactatttcgcctggggcgggatcgcactggtgattcagttactcgtttttgctggcgtcagactttatatgcccgcattaagcgaaaaaattattaatcacaataccgcagcaggaatgtttatgggaaccgccgcactggctggcggtatttttaacgcagcttgtatgacatggtaatggacgatcatggccagaaaacgcaaatcaagaaataacagtaaaattggtcacggagcgatcagtcgcattggtagaccgaataatccttttgaaccgcgtcgcaatcgttacgcacaaaaatacttaacgttggcgctaatgggcggtgccgcttttttcgtattgaaaggttgtggcgatagtggcgatgtcgataacgacggcgacggaacgttttactcgactgtgcaggattgtattgatgacggtaataattcagatatctgtgctcatggctggaacaacgccaaagcggcgttttatgccgatgttccgaagaatatgactcagcagaattgtcagtctaagtatgaaaattgttactacgacaacgttgaacagagttagatcccggttgtttctggatttttgttaagccgggttattcgtaaagatcgcgacgagcagtttgtgtataacagcggcggttcctcttttgcttcgcgccccgtctggcgcaacacttccggtgattactcctggcgctccggttctggcaaaaaagagtcctattcttcgggcggctttaccaccaaaaaagcgtcaaccgtttctcgcggcggctatggtcgttcttccagcgcccgtgggcattggggaggctaatcatgctgagacacaacgttcctgtacggtgggatctggaccagatcgccgctgacaacggtttcgactttcatatcatcgacaatgaaatctattgggatgagagccgggcttaccgctttaccctgcgtcagattgaagagcagatcgaaaaaccaactgcggaactgcatcagatgtgccttgaggtggtggatcgcgcggttaaagacgaagagatcctgacgcaactggcgatcccgccgttgtactgggatgtgatcgccgaaagctggcgcgcacgcgatccttcgctctatggccggatggattttgcctggtgtggcaatgcgccggtgaagctgctggagtacaacgccgatacgccaaccttgttgtatgaatcggcttatttccagtggctgtggctggaagatgcccggcgcagcggcattattccgcgtgatgccgatcagtacaatgccattcaggaacgcctgatttcgcgctttagtgagctttacagtcgggaaccgttttatttttgctgctgtcaggacacggatgaagacaggagtaccgtgctgtacttgcaggactgcgcccagcaggcagggcaggagtcgcggtttatctacattgaagatctcggtttgggcgtcggcggtgtactgaccgatcttgatgataatgtcatccagcgtgcatttaagctgtatccgctggagtggatgatgcgtgacgataacggtccgctgctgcgcaagcgccgcgagcaatgggtggaaccgttatggaaaagtatcttgagcaacaaagggttaatgccgctgctttggcgcttctttcctggtcatcctaaccttcttgcatcctggtttgagggcgaaaaaccgcagattgccgctggcgaaagctatgtgcgtaaaccgatctactcacgcgaaggcggaaacgtcaccattttcgacggtcagaataacgtcgttgaccacgctgatggtgattacgccgatgaaccgatgatctaccaggcgtttcaacctctgccgcgatttggcgatagctacacactcatcggtagctggattgtcgatgatgaagcgtgcggaatggggatccgtgaagataacacgctgatcaccaaagacacctcacgtttcgttccgcattacattgctggataagaatgttttagcaatctctttctgtcatgaatccatggcagtgaccatactaatggtgactgccattgatggagggagacacagtgcactggcaaactcacaccgtttttaatcaacctataccattaaataacagcaacttatacctgtctgatggcgcgctctgcgaagcggtaacgcgtgaaggtgctggctgggatagcgattttctagccagtattggtcagcagttaggaacggctgaatcccttgaactggggcggctggcgaatgtgaatccgcctgaattattgcgctacgatgcccaggggtggcgtctggacgatgtgcgttttcaccctgcctggcacctgctgatgcaggcgctatgtaccaatcgggtacataatctggcctgggaagaagacgctcgctccggcgcatttgtggcgcgcgcggcgcgttttatgttgcacgcacaggttgaggcagggtcgttatgtccgataacgatgacctttgccgccacgccattgttgttacagatgttacccacgccgtttcaggactggaccacgccgctgttgagcgatcgctacgattctcacttattgccaggtgggcaaaaacgcggtttgttgattggcatgggaatgacggaaaagcagggcggttccgatgtcatgagcaacaccacccgcgcagagcgtctggaagatggctcttatcggctggtggggcataaatggtttttctcggtgccgcaaagcgatgcgcatctggtgctggcgcagactacgggcggtttgtcctgcttttttgtgccacgctttttgcctgacgggcaacgcaacgcgattcgcctcgagcggctgaaagataagctgggtaatcgctctaacgccagctgcgaagtggagtttcaggatgccattggctggttgttggggcaggaaggggaaggaattcgtctgatcctgaaaatgggtgggatgacgcgttttgattgcgccctgggtagccatgccatgatgcgccgtgcattttcgctagcgatttatcatgcacatcaacgccatgtttttggtaatccattgatccaacagccccttatgcgtcatgtcttaagtcgcatggcacttcagcttgaagggcaaacggcgttgctgtttcgtcttgcgcgagcgtgggaccggcgtgccgatgccaaagaagccctgtgggcgcgtttatttacgcctgcggcgaaatttgtgatctgcaaacgaggtatgccgtttgtggccgaagcgatggaggtgctgggcggcattggttattgcgaggagagcgagttgccgcggctttaccgggagatgccggtaaacagtatttgggaaggttccggcaatattatgtgcctggatgtgctgcgcgttctcaataagcaagcgggcgtatacgacttattgtcggaagcatttgtggaagtgaaagggcaggatcgctattttgatcgcgcggttcgtcgtttacagcagcagctgcgtaagcctgctgaagaactggggcgagagattactcatcagctattcctgctgggctgcggtgcgcaaatgttgaaatatgcctctccgccaatggcgcaggcgtggtgtcaggtgatgttagatacgcgcggcggcgtacggttgtcagagcagatccagaatgatttattgctgcgggcgacggggggagtgtgtgtgtaagcgtatacgactgatgcaacgctggtttcaattaactcaatgaaatatgtgaaaattgtaggccggacaaggcgctcgcgccgcatccggcattgttcatttgctgtagatgacactcatgcatacagtatcgcctgtacgcgccagttatcaggctgctggtcttcgtacatggtaataatgcggtaccatgacgcaccttgttcatcggcctttaacgccacgatacgttccacgtcctgcggatcccctgaaatattgctaactgagatctgacctatttcattcaggcccgtcacgcagtcagcactggcgaattctgcagactgtgccgtggcgctcgcaggataagtcactaattgcagcgagggtgaggcaagtaattgtttcatcgtcagctccatttttcgtttccccacatgttgcagggcattccatcgcggtaataaacgcccaggcttccagccggtaatttattgtgcacaggtaaacgcatagggacgcaaagcaatgtaaagctgactatgtaagttgtctgatttatttacggtacaaaatggcttgtgaataccactgtcctgtcacgatggtttcgtccaccatgacgacaacgtaataatcagcttttgcagcgacagctttcgctctgatttctgctaatgcgtcatccggagaaccccgaaccatcgtgcttacgctacctattcgctgtaacccttgcgtctggtcgcggcgaatctcttgcggatggtcggttactggcggtgctggctgtggcgtaccttgcagtgcgctacaggcacttaacatcaacaccaataataaactggcaaaccggtaaataacgctattacgtttcctgctaaccatagtgtagtgccttattaatttaactttgggggaatgttcccgaattgttacctggtacgcgattttcgaatgaatacgtgacgaaagcgtaacccacatctcaacattatgaactaataccgccagcagaaacttgtgctaaggatttcttcatgtcataccagacaaaaaggagagacagatgattgaaatagaatcacgcgagctggcagatattcccgttcttcatgcttatcctgtcgggcaaaaagataccccattaccgtgcgtgattttttatcacggctttacttcgtccagtctggtgtatagctattttgccgttgcgctggcgcaggctggtttgcgagtgatcatgccggatgcgctcgatcacggtagccgttttaggggcgacgcagcgcggcggttaaatcaattttggcaaattttgctacaaagtatgcaggaattcactacgttacgtgcggcaatagccgaagaaaactggctgcttgctgaccgtctggcagtcggtggcgcgtcgatgggcgcgatgacggcactgggaattaccgctcgccaccccacggtgaaatgtaccgccagcatgatgggatcgggctattttacattgctcgcccgttcactgtttccaccgctgatacctgaaacggcagcacagcagaatgaattcaataacattgtcgcgccgctggcagagtgggaagcgacaaaccacctggaacaacttgctgacagacctctactgctgtggcatggccttgacgatgacgtcgtgcctgccgacgaatcactacgtttgcagcaggccttaagcgagacgggacgggataaactgctaacctgttcatggcagccaggcgtgcgtcaccgcattacgcctgaggcgttagatgctgccgtgacatttttccgccagcatctttaaacacgcagaatgctgaccccttgcgcttccagttgttgcaggatttccgggttagcatttttgccggtgatcagcatatcgatttgatcggcacggctaaaaagcattcccgcgcgttcgccgatcttactgctatcaaccagtaccaccagtttccctaccacgcttagcatcttctgctctgccattgccgtcagcatatcggttttatacaacccttctgctgtcagccctttgccgctggtaaacatccagtgcccggcatagagactgttttcgctgccttgcgggcttaaagtgatggactgacttttgttgtactgtccgcccataatgatcacgctgtcatgctcctgatcgatcaggtaatttgccagcggtagataattagtgatgatttgcactggcttgccacacatttcccgcccaagcagaaacgcggtggagccgcagttgatgactacgctttcgcccggattaaccagctgcgaggccgctttagcaatacgtactttttcatcgtgattctgcgcctgatgcagattcatcggcgtccagcgtgggcgctgctgggtaatagcttctgcgccattgcgcacttttttcagtttgccgctttcgtcaagtttattgatatcgcgtcgcgcagtggcaggcgaaattcccagacgctcaacgactttctcaacggtcacaaagcccaattgtgcgagcatttccaggaggatttgatgtctttgtgcttcagtcatgagctattccgataaaatttgatttttttagatgatatttgaaatagccaggaaatactacgccggatagcgcgaactactccacgctatccggtataaacgacagattacaggaatgacttgaacggcagatccggttcaatagtgaagcaatcatcgaaaccacgcggatagtggtactcgaagttgtctttatccaacggccaggtaaatttgccgcctacctgccagataaacggcttgaagccatacttcagacgatcttttttcatctcccacagcacgcggatctcttgcggatcggcctagaagtttgaccagatgtcgtggtggaacgggataaccactttcgcattcagggcttcacccatacgcagcatatcggcgctggtcattttgtcggtaataccgcgcgggttctcaccgtacgatcctaacgccacatcgatctgatgttcgttaccgtgcttcgcataatagttagagtagtgggaatcgccactgtgatacagggaaccgccaggggttttgaacaggtagtttactgcgcgatcgtccatgccatctggcagtacgccagccgctttttgatcggcaggtagggtgatcagtgcagtacggtcgaaagcgtcaagcgcatgaatttcaatgtctttcacttttacaacatcgcccggtttgaccacgatgcaacgctctttcggtacgccccagccaatccacaaatcaacgcaggttttcggtccaatgaacggtacgtcatcagcacagttctgcatcacggcagcagcgacgttaacgtcgatatgatcgttgtgttcgtgagtcgccagtaccgcgtcgatctggcgaatcgcaaacggatcaagaacaaacggggtggtgcgcaggtttggctgcagttttttcacgccagccatgcgctgcatctggtgaccctgtttcattaacgggttaccgtgactttgtttgccagtgccgcaccagaaatcaacgcaaacgttggtgccaccttctgatttcagccagatcccggtgcagcctagccaccacatcgcaaatgtgccaggggcgacctgctcttgttcaatttcttcattcagccagctaccccactccgggaaagtgctcaggatccaggattctcgggtgatacttttcactttactcatcgccatttaccttcatgatagttcaattcgaatcaacatgtgatttgttttgattaatctgacactattttttcaggaaggcaatgaccatttttgactttttgccaggcaagttgttgttgattttgagtgtggaaagatttaatggaatgtgtaattcaattaactaaatgaatttaaatgaataattatttcgttgtgtgaatcccactctatccatgtggaattatttgcgggtcgcgtcacatttaatcataaataatcttgttgtgattacttttgaaaattagagtgagtgcacaacattccgggtgtgtggaatacccggttacctcttcttcaggagagcgttatggagatcctctacaacatctttaccgtgttttttaaccaggtcatgaccaatgccccgttgttgctgggtattgtgacctgtctgggctacatcctactgcgcaaaagtgtcagcgttattattaaaggcacgattaaaaccataattggtttcatgttgttgcaggcagggtccggcatcctcaccagcaccttcaaaccggtggtggcgaaaatgtccgaagtctacggcattaacggcgcaatttccgatacctacgcttcaatgatggcgaccatcgaccgcatgggcgatgcctatagctgggtgggttatgccgtattgttagcgctggcgctgaacatctgttacgtgctgttgcgtcgcattaccggcattcgcacaatcatgttgaccggccacatcatgttccagcaggccgggttgattgccgttacgctgtttatcttcggctactccatgtggaccaccattatctgtaccgtgattctggtttcgctctactggggcatcacttccaacatgatgtacaagccgactcaggaagtgacggatggctgtggtttctccatcggtcaccagcagcagtttgcatcatggattgcctataaagtcgcgccgttcctcggcaaaaaagaggagagcgttgaagacctcaaattgccgggctggctgaacattttccacgacaacatcgtctccacggcgattgtgatgaccatcttctttggcgccattctgctctccttcggtatcgacaccgtgcaggcgatggcgggcaaagtgcactggacggtctacatcctgcaaaccggtttctccttcgcggtggcgatcttcatcatcactcagggcgtgcgcatgtttgtggcggaactctctgaagcatttaacggtatctcccagcgcctgatcccaggtgcggttctggcgattgactgtgcggctatctatagcttcgcgccgaacgccgtggtctggggctttatgtggggcaccatcggtcagctgattgcagttggcatcctggttgcctgcggctcttccattctgattattccaggctttatcccgatgttcttctccaacgccaccatcggcgtgttcgctaaccacttcggcggctggcgtgcagcgctgaagatttgtctggtgatgggaatgatcgaaatctttggttgcgtctgggcggtgaaactcaccggtatgagtgcctggatgggcatggcggactggtcgattctggcaccgccgatgatgcaaggcttcttctccatcggtatcgcctttatggccgtcatcattgtaattgcactggcttatatgttcttcgctggccgcgcgctgcgcgcagaagaagatgcagaaaaacaactggcagaacagtttgcttaataaggagttttgattatgaccgtacgtattctggctgtgtgtggcaacggacaaggcagttccatgatcatgaagatgaaagtggaccagtttttaacccaatcaaacattgaccacacggtaaacagctgtgcggttggcgaatacaaaagcgagttgagcggcgcggatatcatcatcgcttctacgcacattgcgggcgaaatcaccgtgaccggcaacaaatacgtggttggcgtgcgcaacatgctctctcctgctgactttggcccgaaactgctggaagtgatcaaagagcatttcccgcaggacgtgaagtaaggacgcgccatgaaattacgtgattcgctggctgtaaataaatccatccgcctgcaggctgaagctgaaacctggcaggacgcggtgaaaatcggcgtcgatctgctggtggcggcggacgttgtcgagccgcgctattaccaggcgattctggatggcgtggaacagtttggcccttatttcgttatcgctccggggctggcgatgccgcacgggcggccggaagagggtgttaagaaaaccggtttctctctggtaacgctgaaaaagccgctggaatttaaccacgacgacaacgatccggtggatatcctcatcaccatggcggcggtcgatgccaatactcaccaggaagtgggcatcatgcagatcgtcaacctgtttgaagatgaagagaattttgaccgtttacgcgcctgccgtaccgagcaggaagtactggatctcattgaccgcaccaacgcggcagcttaagaaggaattgaacatgtcattaccgatgttgcaagtcgcgctggacaaccagactatggatagcgcctacgaaaccactcgcctgattgccgaagaagtcgacattatcgaagtgggcaccattctgtgcgtgggcgaaggcgtgcgtgcggttcgtgacctgaaagcgctctacccgcacaaaatcgtactggcagacgccaaaattgccgatgcaggcaaaatcctttcgcgtatgtgcttcgaagccaacgctgactgggtgacggtaatttgctgtgcggatatcaacaccgccaaaggcgcgctggacgtggcaaaagagtttaacggcgacgtgcagatcgaactgaccggttactggacctgggaacaggcgcaacagtggcgcgatgcaggcattcagcaggtggtttatcaccgcagccgtgacgcgtaggccgcaggcgtggcgtggggcgaagcggacatcaccgcgatcaaacgtctttccgatatgggcttcaaagtcaccgtcaccggaggcctggcgctggaagatctgccgctgttcaagggtattccgattcacgtctttatcgcgggccgtagtatccgtgatgccgcttctccggtggaagccgcacgtcagttcaaacgttccatcgctgaactgtggggctaaggagcggatatgttgtccaaacaaatcccgcttggcatctatgaaaaagcgctccccgccggggagtgctggctggaacgcctgcaactggcaaaaacgttgggcttcgattttgtcgagatgtcggtagatgaaacggacgagcgcctgtcgcgcctcgactggagccgcgagcagcgtctggcgctggtcaatgcgattgttgaaaccggcgtgcgcgtgccgtccatgtgcctttctgctcatcgtcgtttcccgctgggcagtgaagatgacgcggtgcgggcgcaggggctggagattatgcgtaaagctatccagttcgcccaggatgtcggtattcgcgtgatccagctggcgggctatgacgtttactatcaggaagccaataacgaaacgcgtcgtcgtttccgtgacggcctgaaagagagcgttgagatggcaagccgcgcgcaggtgacgctggcgatggagatcatggattatccgttgatgaactccatcagcaaggcgctgggctacgcgcactatctcaacaatccgtggttccagctctacccggatatcggcaacctgtcggcgtgggataacgacgtgcagatggagttgcaggccggaatcgggcatatcgtcgcggtgcatgtgaaagacaccaaaccgggcgtcttcaaaaacgtgccgtttggcgaaggtgtagtggatttcgaacgttgtttcgaaacgctcaaatagagtggctattgcgggccgtacctgattgagatgtggagcgaaacggcggaagacccggcggcagaagtggcgaaagcgcgtgattgggtgaaagcgcgcatggcgaaagcgggcatggtggaggcggcataatgcaaaagctaaaacagcaggtgtttgaagccaacatggatctgccgcgctatgggctggtgacctttacctggggcaacgtcagcgctatcgaccgcgaacgcgggctggtggtgatcaagcccagcggcgttgcctacgaaaccatgaaagcggccgatatggtggtggttgatatgagcggcaaggtggtggaaggggagtatcgcccatcttccgacactgcgacgcatctcgaactctaccgtcgttacccgtcgcttggcggcattgtccatacccactccactcatgccaccgcatgggcgcaggcggggctggcgatcccggcgttaggcaccacgcacgctgactacttctttggcgacattccgtgtacgcgcgggttaagcgaagaagaggtgcagggcgagtatgaactgaacaccggcaaagtgattatcgaaacgctgggcaacgccgagccgctgcatacgccgggaattgtggtgtatcagcacggaccgttcgcctgggggaaagatgcccacgatgcggtgcataacgcggtggtgatggaagaagtggcgaaaatggcgtggattgcgcgcagtattaacccacaactcaatcacatcgacagcttcctgatgaataaacacttcatgcgtaagcacggtcccaacgcctattacgggcagaagtaaaacacgcgctgcggaaatttccttattcgggagataactggtctgattccgcagccgtttttcaaaaaaatgcccccggagaagggggcaaagcaaactatggcaatgtttcgttggttatacctggtgctagcgataaatatccgcgctggcgtgcatattgccgttactccccggttctcgcatcagaattacgtggtagtacgttgcgccttgcgcatctgtttcttcatttaatgcctgacgtgcttcactttcagtggcgaagttatgattgatataaatcacgcctaagctttgcacatcgtccatatttctggcctggtggttattaatttcaatggctgcccatgtatttgcacttagcaaaagcacagccagaagggctaaaacacgactgaacatagatacctcctcgacggctgactttgtgtgctctcctctgtgatgatcttctgatttaattttaatcaatgataaagaagttgatggtgaccatttctgatgcagttgttcaaaaaaacaccatgatgaagtgtgatgaacttcaaatcagcgtgttagtccactttggtgaaagatgagatttatttgtcggctggccttgagtttagcggggtatgtcagtactataacgcgtcatttttcagccgacctttaacacgttccttgcctccccgggattcggctgacccagacaggaggctgaataatccgtaaggagcaattcgatgcgtcattacgaaatcgtttttatggtccatcctgaccagagcgaacaggttccgggcatgatcgagcgctacactgctgccatcactggtgcagaaggcaagatccaccgtctggaagactggggccgccgtcagctggcttacccgatcaacaaactgcacaaagcacactacgttctgatgaacgttgaagctccgcaggaagtgatcgatgagctggaaactaccttccgcttcaacgatgccgttatccgcagcatggttatgcgtaccaagcacgctgttaccgaagcatctccgatggttaaagcgaaagacgagcgccgtgagcgtcgcgatgatttcgcaaacgaaaccgctgatgatgctgaagctggggattctgaagagtaatttctgatgaccaaccgtctggtgttgtccggcaccgtgtgcagggctccccttcgaaaggtcagtccatcaggaattcctcactgccagttcgtgcttgagcatcgttctgtgcaggaggaagccggctttcaccggcaggcgtggtgtcaaatgcccgttattgttagcggacacgaaaaccaggccattactcacagtataacggtcggcagtcgcataaccgttcaggggttcatttcatgccacaaggcaaagaacggactgagcaaaatggttttgcatgccgagcagattgaattgatagattctggagactagccatatggcacgttatttccgtcgtcgcaagttctgccgtttcaccgcggaaggcgttcaagagatcgactataaagatatcgctacgctgaaaaactacatcaccgaaagcggtaagattgtcccaagccgtatcaccggtacccgtgcaaaataccagcgtcagctggctcgcgctatcaaacgcgctcgctacctgtccctgctgccgtacactgatcgccatcagtaatcggtcacggtccattaatacgactttgagaggataaggtaatgcaagttattctgcttgataaagtagcaaacctgggtagcctgggtgatcaggtaaacgttaaagcgggctatgctcgtaacttcctggtaccgcagggtaaagctgttccagctaccaagaaaaacattgaattcttcgaagcacgtcgcgctgaactggaagctaaactggctgaagttctggcagctgctaatgctcgcgctgagaaaatcaatgcactggaaactgttaccatcgcgtctaaagctggcgacgaaggtaaactgttcggttccatcggtactcgcgacatcgctgacgctgtaactgcagctggcgttgaagtggctaagagcgaagttcgtctgccgaacggcgttctgcgtaccactggcgaacacgaagtgagcttccaggttcacagcgaagtattcgcgaaagtgatcgtaaacgtagtagctgaataattcgttattcaacgagacgtaaaaacgccgaccattggtcggcgttttgctttctatttttcgtcaggtattagtttcgcaagtagatccattcaccattctcttgtgtccataagtcaggatggtttgctggcgttagatacatacgagcgcaactgatgtctcgctcctgcggcactcgctcgaaacccaaacccgagtagattgcggctgaacttgataaggaacgcagaccaattttcaaatcatggggtaaatcagaatacgcgtttagcaatgcagcaatgatgaatccgagggcattagaaacgcctgtaacagtgcgaagttggtcgatataaagatcgattgttggtagttcagatgaccagcaattaggcatttgggcaggaagggttacaacgtatcctatcgtttggccggtatagtctggagtaccataaccaggtcccaaaacaacctcgtgtattgtgtatttactgttgggttcgaaggattcgacatcttgcaataaatatttcagttctgcggttaaccgcgcacccgcgtaagctttattgtatttctgggcgtgaatattatctaatgtagcttcatggttccatccaaaagaattatcacccttcattgttattccatcgtaagcattatacgccatcgctagtttattgaatgcttgccagtctgagagatctagtttgtggatctcaacagtacgtctgccatcgcaattatgatctcttccacgatttgacagtaatgtagcgcgtgcgtattgatgaaattttagttttgctggtttgtcggtggacgaaaaacgaggtaaatatgcggggaatgaataaatagttgttggtaatgtcattttattgttgcctgtttaatatttttacaaatatcgcagttgaatgttcaaagaaaaagaattgatattaataaaaataagtttgttttctgaagtggtgaaaatagcggatggtgaaagatattaatatcaaaaatcgctcattatggatataacgatgcacccggggagaaaatgacttccacgccttacaccgtacattcttgttgtgcggtatgtaattattctatgctgtcggtatcggtgtattcgttaatcagcaggttaaccagccacaaaaagccattgagaaaattatttattttacatgggattattatattgctaatccctggtttttaaaaattgtgcatagtgaaaatcaaagtaaaggtgtgcattatgcaaaatcacagcgtctcttagaaattaaccatgcgcacttgcagttaatggaatccttattggatgaagggaagaaacacaatatttttaagccagatatcgacccattgcaggtgaatattaatattgctgcgcttggcggatattatttgatcaaccagcatacgcttggcctggtttatcacatcagtatgatttcaccccaggcactggaaaccagacgtaaggtcatcaaagagacaatccttagctggcttttggttgacccttcatctaccgcgcacgaataaaactgccatccggctggcgggtgaacaggacctgttgattattccccgtatcaatggttaagcccgtcaccacgccgctggcgttctggcggattttcaccatctgcccgttttgcaaattactcagcggcttacccgcgccttctacctgcgccattgcatagacatcggtagcgggcagtccgtggtcgcggaacagctgcgccatcgttttaccgggttcgacacggtaagagcgccattgattatcaattccgctatctggctggaatggttgtgtttgggtagtttgcggctgctcttctggctggccttcctgtataggttctggagcgaccggagccacctgatcaggatcattttgtggtgtgactaattgcgcccgcagctgttcttctgtcggcggctgtgattgcgactgaatatctaactgcgcttcacgcgtcaccaccggcgcgttgggcgtatcatcagatggaagcagaaatccgaccaccaatacaatggcggcaataatgatcccccgacgatgcatcggcggcagcgggtccatgaagcgaaaattgtccggcgcgtgccagactttctccagggttggttttagttcaaagcgcccgggcatggtttcctcctgctccgcgtcttgttcctcaatcatagcctatgaataagctaacgctatgatgtccgtggtaaacccgcctttattatattcatacgggatattgctattgtttctttttccccgggatttgtcatcattcctgcgacaaagttttacccaaagaagtgtggctgatatgctgcccgctacttttataccctaagaaaggaaatacgatgaccaccccaacttttgacaccatcgaagcgcaagcaagctacggcattggtttgcaggtagggcaacaactgagtgaatctggcctggaagggctgctgccagaagcactggttgcaggtattgccgatgcgctggaaggcaaacatccggctgttccggttgatgtggtgcatcgcgcgctgcgtgaaatccacgaacgcgccgatgccgttcgtcgtcagcgtttccaggcgatggctgcagaaggtgtgaaatacctggaagaaaacgccaaaaaagaaggtgtgaatagcaccgaatctggcctgcaattccgcgtgatcaaccagggtgaaggcgcaattccggcacgtaccgaccgcgttcgtgttcattacaccggtaaactgatcgacggcaccgtgtttgacagctctgttgctcgtggtgaacccgctgaattcccggttaatggcgtgatccctggctggattgaagcactgactctgatgccggtaggttctaaatgggaactgactatcccgcaggaactggcatatggcgagcgcggcgcaggcgcatccatccctccgttcagcaccctggtgtttgaagtcgaactgctggaaatcctctaagcagcgcattctgttcccctcgaaccagaggggagcaggcattcagcaataaacccttcagtttgccaaacggcgctattttgtgttgcaaagaccgcgtaagcgtgtatttttgtgagctgtttcgcgttatcaccgtgatatgacactcactttaaacataaaattaacattagatctaaatcttagtattcatcccgcgtattgttacctaatatcgatgagtcccgatacagattcgtcgtatcatagactgactaaaggccgtagagcctgaacaacacagacaggtacaggaagaaaaaaacatggtagatcaggtaaaagtcgttgccgatgatcaggctccggctgaacagtcgctacggcgcaatctcacaaaccgacatattcagcttattgccattggcggtgccattggtacggggttgtttatggggtctggcaaaacgattagccttgccgggccgtcgatcattttcgtttatatgatcatcggttttatgctctttttcgtgatgcgggcaatgggggaattgctgctttcgaatctggaatacaaatcttttagtgacttcgcttccgatttactcgggccgtgggcaggatatttcaccggctggacttactggttctgctgggttgtaaccggtatggcagacgtggtggcgatcacggcttatgctcagttctggttccccgatctctccgactgggtcgcctcgctggcggtgatagtgctgctgctgacgctcaatctcgccaccgtgaaaatgttcggtgagatggagttctggtttgcgatgatcaaaatcgtcgccattgtgtcgctgattgtcgtcggcctggtcatggtggcgatgcactttcagtcaccgactggtgtggaagcgtcattcgcgcatttgtggaatgacggcggctggttcccgaaaggtttaagtggcttctttgccggattccagatagcggttttcgctttcgtggggattgagctggtaggtacaacagctgcggaaaccaaagatccagagaaatcactgccacgcgcgattaactccattccgatccgtatcattatgttctacgtcttcgcgctgattgtgattatgtccgtgacgccgtggagttcggtagtcccggagaaaagcccgtttgttgaactgtttgtgttggtaggtttgcctgcggctgccagcgtgatcaactttgtggtgctgacctctgcggcgtcttccgctaacagcggcgtcttctctaccagccgtatgctgtttggtctggcgcaggaaggtgttgcgccgaaagcgttcgctaaactttctaagcgcgcagtacccgcgaaagggctgacgttctcgtgtatctgtctgctcggcggcgtggtgatgttgtatgtgaatcctagtgtgattggcgcgttcacgatgattacaaccgtttccgcgattctgtttatgttcgtctggacaattatcctttgctcgtacctggtgtaccgcaaacagcgtcctcatctgcatgagaagtcgatctacaagatgccgctcggcaagctgatgtgctgggtatgtatggcgttctttgtgttcgtggtcgtgttgctgacactggaagatgacactcgccaggcgctgctggttaccccgctgtggtttatcgcgctggggttgggctggctgtttattggtaagaagcgggctgctgaactgcggaaataaccgcattatcatgctggatggcgcaatgccatccagcttttagatcactcacccgccagcgcgcgtgggaacagtacattgttttccaggctgatgtgatccatcaggtcatcaatcagttcattaatgccgttatacatcgctttccaggtggtgcaggcttccggcggcggtgtgacgttattggtagtgtgtttgatcacttccagcagttcacccgcttcatcgtgctcgctttccattacgctgattggccccattgcctggctgcccatgccttgtttgatcatcgggaagaggatctgctcttctttcatcatgtggctggaaagctcttcatgcagcatagtcaggtattttgtcagcccttttggcacgctcggtttgtcggcgtgaacgcgctcgactttagtcgcttgcaggatcagctccggcagttgctcgcggtgacgatcgtggtagcgcacgatgatatggtcaatgatttctgccagcggggcgctacgccagtctttctcaatcggttgttcagcgagctttgccagttcagcttcaatgacctcaacatccagttctttacgtgccgccgcgcgcgccagcgtttgcttaccgccgcagcagtaatccatatcatatttacgaaacagagctgaagcgcgaggaatagagagcgccagttcacctaaaggttggtcgcgataagccatagctgatacctcattcttaataagataagatgtattttaaatgcatctttaaggcaaaagctataactcttacgtagcagaggcttatttaactcacagccagtatgtcaactttctgagacagattcagttaaaggcttttccggttttgctctgactgcaatgaccacgccaaccactaacagcgcgataccgctcagcgtcatcagcggcggcatttgctggcgtatcaaaaaggtgtacagcaaacctgccagtgtttcgaaaacgatcagcggcccgagaatcactgtcggtaatcgctggctggcgacgttccagcagagtgcgccaacccatgagcaaagcacggctatcgcaaccatcagactaataaacaccagcggacgggggccaaaaggtagggagaagtccggcgtttgcgtattcagccagtaacaggcgacgagatagccgatgagagaaaccggcagtgtgaccagcgcctgcgccgtcgcccacatcatcggatgtttgtcgggattctcccgcagccagcgggcgttgcgcagggcataccatgcccagcagaccacggaaactaacgctagcacgatgcctgaggtataacgtgcccagtcaaaatcggggagtccgtggtttaactcagcaatattcacacacgccaggccgatgccaatacaaaccagtgccggggcgagttttccccacgcgagtttgccgtcgcgctggctataaagcagattggcaaaaacgggaatcaccaccggcagggtgccgataatcatcgtggaaacaggcgcaccagtacgttgaatggcactggcaaggcagaagtaatagatgaggttgcccatcatagtgagcatcaaggcggtaagccagtcgcgacgcgccaactgacgcagacgcacgcgtcccagccaggcaatgggcagcgcaattaaccctaacgccagataacgccccatcgactgcaacatcgccgggtattccggtacgatcaacggcccgacaaaaataagcccccacatcaaccctgctaacagggcgtacagcacgccgctaatcattactggcatccattggtctgtcagaagaaagttcaggaagcagacatgattgctcccggcatcccgtcattattagagaggatgcgggaggatgccactttaattaactagttattaacattaaaaagatggcttacgctttcggctaacgttgtcgttgggcggccaatcaatttgctaagcgttttgctgttatcaaacagaccacctttcgatgcgccaacgtcagaatccgccagcatatccgccagtccgtcgggcagtccgacgcttttcagtgccgcggcgaaatcggcttcgctcagattttgataggtaacctgtttgccgctctgtttggtcagctctgccgctaactgtgtcaacgtccaggcactatcgcccgccagttcgtaaaccttgccttcgtgaccggcttcgctaatcacgcgtgccgcagctgccgcataatctgcccgcgttgctgaggcgattttgccatcgcccgccgcaccgataaatacgccgtgttccagtgctgccggggcgctggcgaggtagttttcgctgtaccagccgttgcgcagcagggtgtaaacgatgccagaatcagccaacattttctccgtctcaatgtgctcatcggcgaggccgagcggggaggtatctgcatgtagcaggctggtataagcgataaatttcacgccagccgcctttgcggcattaataacattacgatgctgcggggcacgttgacccacttcgctggaagagatcagcagtagtttttccactccctgaagtgcagatgtcagtgcggcttcatcgccgtagtcagcctgacgcacggtaatgccttgtgctgccagagcctgggcttttgccggattacgaacgatagccactatttggctggcaggaaccgttttcatcaaggattcaataatatagtgaccaagttggccagtggcaccagtaatagcgatcatgggaagtctccatcgttttgtcttgtgtttaaatacgctaacacctaaacttacttttagtaagtacgtacaaaaaggtaagtatgaaatgagtcaggttagcctgtcgcaacaactgaaagagggtaatctctttgcggaacagtgcccgtcgcgcgaggtgttgaaacacgtcaccagccgttggggggtgttgattctggtggcgctacgcgaaggtactcatcgctttagcgacctgcggcgcaaaatcggcggggtgagcgaaaagatgcttgcgcagtcgttacaggcgttagaacaggatggttttcttaaccgtatcgcgtatccggtggtgccaccgcatgttgaatacagcctcacgccgctgggcgagcaggtgagcgaaaaggttgctgcactggcggactggattgagttgaatttgcccgaggtgttggcggtgcgggatgaacgtgcggcataactgccggatgcgcggcctacggtgtatgacttgtagggcggataagatgcgccagcatcgcatccgccaataaatgccggatgcgattgatgatttataggccgaaaaagaagtgttttacttactcaaatccacctgataaatcgcaaacccgatatcatcggtcgcgactttattcatcggatactgccctttctctttaataaacgctgcggctttatctgacggggaagtttcgaaacggatatccagtttcttatcggcagctatcggtgctaaacgccagttgttatctgccgccgggtgaatttcccccgcacgtttcgactcatcagcaatccacgctgccagcaccgagcggttctcatccggtgaagcaaaagcgatatggctgtcgcccgtaccggcaaatttgccgccgtaagcgcgatagttattggtggcaacgaggaacatggcgttcggatcaatcggcttgccattaaaggtcaggttcttaatcctttccgcattggtattaatcatctggcactcgccgtcataacgggcaggctgggtaacatcaatctgataattcacaccatcaatcacatcaaagttataggtgcggaaaccatcccagttgatgagtgattgcggtttcgtgctgttaggatcaatctggttaaactgtccggcggagcactccagccactctttcacctctttaccgctggctttcaccacaatcagcgtattggggtagagataaagatcggcggcattacggaaggtcaactggcctttttccacctccacatagcttgccgggtcatttttgcgaccaccaactttaaacggtgcggcagctgaaagcaccggcagttttgccagatccggatcgccctgaatgtaatgttcgacatacgctttttgcgcgttgttcactacttgcacggtcggatcgtcctgcaccagcgccagatagctatacatattgtcggcagatttaccgattggcttgctgacgaactggcgtgtggcatcgtgatcggctttgagtgtttctaccagcttgctgtcttccgccgcgagggattttttattggcgatgtcgtaaatcggccgagcttccgctttcgcctgcgtcacctgccatttaccgctgtcattactgagttgtaagtcgaccaccccaagatgatcgccccacatgcccggcattaccgccggaacaccattcagcgtgcctttggtgatatcagccccttcgatatcaccaaaatctttacccgggaaaacggcgtgagcatgaccaaacataatggcgttaacgcccggaatttcactgaggtaataaactgagttttccgccatcactttatacggatcggcagacagcccggaatgtgccagaacgacaacgacatcggcacctttctcgcgcatttcaggcacgtatttgcgcacggtttcggtaatatcattcaccgtcactttcccggataaattagctttatcccagcccatgatttgcggcggcacgacgccaatatagccaatcttcagcgtctgtttttttccgtctttatcgaccacttcggtatctttaattaaatacggtgtaaacattggctgtttggttctggcgtcaatgacgttggcatttacataagggaatttcgctcccgccagcgcatttttcaggtaatccagaccgtagttaaattcatgattgccgagtgtaccgaccgtataatccagcgtattcagcgccttataaaccggatgaacatcacctgtttttaatcctttcgccgacatgtaatctgccagcggactcccctgaatcaaatcgccgttatcgaccagtacgctgtttttcacttcattgcgggcatcgttaatcaggcttgccgtacgtaccagtccgaatttttccgtggcggtgtctttgtaataatcgaaatccatcatgttgctatgcagatcagtggtttccatgatacgcagatcgaccgtcgctgcattcacactggcggcaatcagcgtggccaggagcgttgcgctaaacttaatcatcagggacatccttttatcatcgggaatacgaaagaaaagggagaataaacgtcttacttatagaacagtgaagaatgccacaattttacgctttgaaaatgatgacactatcacagttggcgcattcattaacgatagggtataagtaaaacaataagttaacaccgctcacagagacgaggtggagaaatgttagatcaagtatgccagcttgcacggaatgcaggcgatgccattatgcaggtctacgacgggacgaaaccgatggacgtcgtcagcaaagcggacaattctccggtaacggcagcggatattgccgcacacaccgttatcatggacggtttacgtacgctgacaccggatattccggtcctttctgaagaagatcctcccggttgggaagtccgtcagcactggcagcgttactggctggtagacccgctggatggtactaaagagtttattaaacgtaatggcgaattcaccgttaacattgcgctcattgaccatggcaaaccgattttaggtgtggtgtatgcgccggtaatgaacgtaatgtacagcgcggcagaaggcaaggcctggaaagaagagtgcggtgtgcgcaagcagattcaggtccgcgatgcgcgcccgccgctggtggttatcagccgttcccatgcagatgcggagctgaaagagtatctgcaacagcttggcgaacatcagaccacgtccatcggctcttcgctgaaattctgcctggtggcggaaggacaggcgcagctgtacccgcgcttcggaccaacgaatatttgggacaccgccgctggacatgctgtggctgcagctgccggagcgcacgttcacgactggcagggtaaaccgctggattacactccgcgcgagtcgttcctgaatccggggttcagagtgtctatttactaaattcagatggcagaaacagtgtatttcctgattctgccatcctgatttctcccaacctaaaaagttataaataaaaagagattgtatttaaagtgcaaaaattcaattgctaataagttacattttaataatgagcgttttttgatagtttacttctataatgagatatttaatggcgacataaaataaccaaataaaataaggtagccatatgttacccaggatcagacacaataattttattggtgcggtggagttattcgtaaaatcatcgcatacaaaaacacattcaaacaattttttttaataatattcagcatgcatttaagaaaaaagattgggtttcgaattatgatagcctgttaactttgtgggagttttttcgttgcgcaactcagattgataaagatagttatcaagtgctttcatcaaaaaatgaaactgttaaagccatggataagtttcttatcagtttcagccttaaagataacggtgccgaatatacaatgacattgcgaggcagtggatttgaatacgaagaaattcccataacaataaatgagtataactcattcatggatttcaaaaaccgcgagtttccgttagaacaaaacagaagattgtatgcctgtgatattttgcagaaaaaacagtctgacataccaaaaaggattaaaggttatattcgccaggcgtttggtgacgtatctttcggttatgccttattggaggatatagtaagcaaattaaaacggggtaaatttgaactccaaataccaggctgtggaattaaagaatgcgatggatggtatatttacgaaaaaataattgatgataattttgccatagtcatagaatctttgggctttgcgcttaaaatctatggagggggtgaacgttttcgtaatggttcctctgttgttttggaggatgaagattactctcttatttataattttctggttaatgcaggttgccaacaagtcgaattagccgaacaagtggatgcgatagtaagtgcgaatctggccgcagatagtaatattaccaaagaaaagatttgcgagaaatataaatcgaccattgaggcatttaaaaaagagcaactagcgttaccagtatgagttcggcgtaagaactaagagacttaattcccctatcccatagataacgataggggaaaattatttttgcagaatttatgttattgccattatttgagcaacttttgcagcaggtccatcacttgctgcacctcttcctgtgtgagcgccccgtctttggcccattgcacgcgaccatccttatccagcaccactacagcggaactttcttcatccagctgccaggcaccgcgcgcgacgccattgctatcgacaataaactgcgaccagggataaagctttttattactctccagactgctgcgcacaaacatgccggaacccggaatcgcgtcgtcggtgttaacaatggtggtggtctggtaacgatcgtgcggtaacttcgctgatttaatcgcttcaatcagcgtcgcgtttttctcttttgcagaggtgcgaccagcaatatgttgcagtactcgcacttttcccactaactgcgcgctgttccaggttttgtagctaaactgatctttatcaagcaccaactcgccccgatcggtaatgccaatcggcggcactcgctgaccggtttcgaactgatgtgcggaagccatcatcggcaacagcaggcaggtgagtgccagaatcttgcgtagggtcatggtgtttccttcttatgatatgcaggtgatccgaccacttggtgtctgagttttaatcatatgtgctatttatcgaatttcccgcaagtgtgatgccagtttgcggtcaagcgcacaaatcatatgaaaaatgaatgcttatactgaagaccgcgcttcggtaaaaagataattctgaataattgtaacctttaggtaaaaaaagttatacgcggtggaaacattgcccggatagtctatagtcactaagcattaaaatttgcgcctcataatagttgggccgattgtggcaccgcacaggcgtaatactcagcaggagataacaatgaaaattttccaacggtacaacccacttcaggtggcgaagtacgtaaagatcctgttccgtggacggttatacatcaaggacgttggcgcttttgaatttgataagggtaagattcttatcccaaaagtgaaggataagctgcatttgtcagtgatgtccgaagttaaccgtcaggttatgcgtctgcaaacagagatggcttaaccaaagtgctatgcagtaataagacggctcctgattcaggagccgttgatgtttctgggggttacgcgacgctttcttctttatctttagcgtcaggcagttttggcgaaagggcggtggccttgctgtcgatccgggtcaccagcagctggtcgatgcggtagttatcgatatccaccacttcaaatttgtagccggcgaatttcaccgaatcggtgcgtttcgggatcttacgcagcataaacatcataaagccgccgatggtttcgtagttgcccgactgcgggaactcgtcaatatccagcacgcgcatgacgtcgtcaattggggtgccgccgtcaatcagccatgagttctcatcacgggcgacaatctgctcttccagcccctgaccgaccagatcgcccatcagcgtggtcatcacgtcgttgagggtgatgatccccaccaccagcgcgtactcgttcatgatcaccgcgaagtcttcacctgcggttttaaaactttccaacgcctctgaaagggttaacgtatccggcacaatcagcgtgttgcgaatttgtacgccgctgttcagtgccaggctttggttagccagcacgcggttcagcaggtctttagaatcgacataaccgatgatgtggtcaatatcttcattacagacgaggaacttagagtgcggatgttccgccaccttattcttcaggctttgctcatcttcgtggagatcaaaccaaatcacgttttcacgcggtgtcattgaagacggaacggtacgggattccagctcaaagacgttttcaatcagctcgtgttcctgtttacgtaacacgcccgccagcgcaccggcttccactaccgcgtagatgtcatcagaagtgatgtcatctttacgtaccattggcagtttgaaaatacggaagatcatgttcgccaggccgttgaagaaccacaccagcggggtgcatacgtacaggcagaagcgcatcgggttgatgatacgcaaagctaccgcttctggcgcaatcataccgatgcgtttcggggttaaatccgcaaacaggataaacatgccagtcactaacgagaaagagagaataaagctcagttgctcagagagctctgccgacatatagcgggagaacaggctgtgaaaagctggagaaaatgccgcatcaccgacgataccgccgagaatcgccactgcgttcagaccgatttggaccacggtaaagaacatgccgggattttcctgcatattcagaacgcgttgggcatttatattgccttcatcagccagcagtttaagtttgattttgcgtgaggcggcaagcgagatctcggacatcgagaagaacgcacttacagcgatcaagcagagtatgactaaaatactgtttaacatatcttatccgacctttcaggccagatcctcggaaggggaagttgattaatttgtgtgaaatacacattgaaagccgattcgaagaaagtgaaccggcattttcagtggctagtatagcgtaaggtactgtaaagtcgccagagggttaaaattcagactgctgataaatgcaatactgcctgatgcgctatgccgatcaggcctacgcagtccttgcaatatattgaatttggacgattttgtaggcctggtaaggcgtttacgccgcatccggcataaacaaagcgcactttatcaacaatctacatttgtacccgtaacgctatgcttccggtggcagacagacgccaattccgccaattccacagtaaccatacgggtttttatgcagatattgctggtggtcatcttcggcataataaaacggtgtggcgttagcgatttccgtggtgatgtgacgatcgtcatcggcggcaagcatcgccgcctgaaaacgttccagactggcgcgagctgcggcatcctgttctggggtcagcggataaatcgctgaacgatactgcgtgccgtggtcattgccctgacgcattccctgggcgggatcgtgattctcccaaaatacctgtagcaactgctcatagctgatgacggaaggatcgtaaacaatgcgtaccgcttcggcatgacccgtatcaccggagcacacttcccgataagtcggatttggcgtatagcctccggtatagcctgcggcggtgctgtaaacgccgggtaactgccagaacagacgctccacaccccagaaacaacccatcgcaaaaatggcaatctccattccgtcaggtacattggtcattgagtgaccgttgaccgcatgcagcgtggctacgggcatcggggtgttacgtccaggcagggcatcggcgggggaaaccagatgctttttatcaaataaactcatggtgtcgctctcccgaaaatcggtcattggggttaaggttgtaacaagaggcgtatttgcacacaataaccaccgtgaataggtctaaagtaaaacataagaaatatttggggtttagtctgctttttaatccatattactggatttttgttaagccgtttaacggcgttccaggggcaggaaaaaaggatattcaggagaaaatgtgcgctatatccgacagttatgctgtgtaagcttactctgcttaagcggatctgccgtcgccgcgaacgtccgtctacaggtcgaggggttatcgggacagctggaaaagaacgttcgtgcgcagctttctacgattgaaagtgatgaagtgacgccagaccgtcgctttcgcgcacgcgtcgatgatgccatccgcgaaggtctgaaagcgctgggttattaccagccgaccattgaatttgatctccgtccaccgccaaagaaagggcggcaggtattgatcgccaaagtcacgccaggcgtgccggtgttaattggcggcaccgatgtggtattgcgcggcggcgcgcggaccgataaagactatttgaaattgctcgatactcgcccggctattggcacggtgctgaaccagggcgattatgaaaatttcaaaaagtccttaaccagcattgcgttgcgtaaaggttatttcgatagcgaatttaccaaagcgcagctgggcattgcgctcggcctgcataaagccttctgggatattgattataacagtggcgaacgttaccgctttgggcatgtgacctttgaaggatcacaaatccgcgatgaatacctgcaaaatctggtgccgtttaaagagggcgatgagtacgaatcgaaagatctggcggaactgaaccgccgactttctgctaccggctggtttaactcggtggtggtggctccacaatttgataaagcgcgcgaaacgaaagtattaccattgacgggcgtggtttcgccgcgaacagaaaacaccatcgaaaccggggtcggttactctacggacgtgggaccgcgcgtgaaagcgacgtggaaaaagccgtggatgaactcttatggtcacagtctgaccaccagtaccagtatttccgcgccggaacagaccctcgacttcagctataaaatgccgctgctgaagaatccactggaacaatattatttggtgcagggcggttttaagcgcactgacctgaacgataccgaatctgactccactacgctggtggcttctcgctactgggatctctccagcggctggcagcgtgccattaacctgcgctggagcctcgaccactttacccagggtgaaattaccaacaccacgatgctgttttatcctggtgtgatgattagccgcacgcgttctcgtggtggcctgatgccaacctggggcgactcgcaacgctactctatcgactactccaacacggcctggggttcagatgtcgatttctccgttttccaggcgcagaacgtctggatccgcacactgtacgatcgccatcgtttcgttacacgcggcacgctgggctggattgaaaccggtgatttcgacaaagtaccgccggatctgcgtttcttcgccgggggcgatcgcagtattcgcggctacaaatacaaatctatcgccccgaaatacgccaacggtgacctgaaaggggcctcgaagttgataaccggatcgctggaataccagtacaacgtgaccggaaaatggtggggcgcggtgtttgtcgatagtggcgaagcggtaagcgatattcgccgcagcgactttaaaaccggtaccggggtcggcgtgcgctgggaatcgccggtcgggccaatcaaactcgattttgccgtaccggtcgcggataaagacgaacacgggttacagttttacatcggtctggggccagaattatgagtttatggaaaaaaatcagcctcggcgtggttatcgttatcttactgttgctgggatcggtggcgtttctggtgggcaccaccagcggcctgcatcttgtatttaaagcggcggatcgctgggtgccaggactggatattggcaaggtcaccggcggctggcgcgatctcaccttgtctgacgttcgttatgagcagccaggcgtggcggtaaaagcgggtaatctgcatctggcggtcggtcttgagtgcctgtggaacagtagcgtttgtattaatgacctggcgctgaaagacattcaggtcaacatcgacagtaaaaaaatgcctccttctgaacaggttgaagaagaggaagatagcggtccgctggatctctccacgccgtatcccatcaccctgacacgggtggcgctggacaacgtcaacatcaagattgatgacaccacggtgtcggtgatggacttcacctccggcctgaactggcaggagaaaaccctgaccctgaaaccgacgtcgctgaaaggcctgctgattgctctgccgaaagtggcggaagtggcgcaggaagaagtggtcgaaccgaaaattgaaaatccgcagccggaggaaaagccgctcggcgaaacgctgaaagatctcttttctcgcccggtattgccggaaatgaccgacgtgcatttgccgcttaacctgaacattgaagagtttaagggcgagcagctgcgcgtgacgggcgacacggacatcaccgtgcgcaccatgctgctgaaagtgagcagcattgacggcaatactaaactggacgccctggatatcgataccaaccaggggatcgtcaacgccagcggcacggcgcagctgtcagacaactggccggtggatatcaccctcaacagcacactgaacgtggagccgttgaaaggtgaaaaggtgaagctgaaagtgggcggcgcgctgcgcgaacagctggagataggcgttaacctttccggtccggtggatatggatttacgcgcccagacgcgactggcggaagccggattgccactcaacgtggaagtgaacagcaaacagctttactggccgttcactggtgagaagcagtatcaggcggatgatctgaaactgaaacttaccggcaaaatgaccgattacacgctctcaatgcgtacggcagtgaagggacaggagatcccgccagccaccattacccttgatgccaaaggtaatgaacagcaggtcaatctcgacaaactcaccgtcgcggcgctggaagggaaaactgaactcaaggcgttgctcgactggcagcaggccattagttggcgcggtgagctaacgcttaatggcattaacaccgccaaagagttcccggagtggccgtcgaaactcaatggcttgattaaaacccgcggtagcctgtacggcggcacctggcagatggaggtgccagaactgaagctgaccggtaacgtcaaacagaacaaagtgaacgttgacggcacgctgaaaggcaacagttatatgcagtggatgatcccagggctgcatctggaactggggccaaacagtgccgaagtgaaaggcgagctgggggtaaaagatctcaatcttgatgccaccatcaacgcgccgggtctggataacgcgctgccggggcttggcggtacagcgaaagggctggtgaaagtacgcggcacggtggaagcgccacaactactggcagatatcaccgcgcgcggcctgcgctggcaggaactttccgtggcgcaggttcgcgtggaaggcgatatcaaatccaccgatcagattgcgggtaaactcgacgtacgcgttgagcaaatttcgcagccggatgtcaatatcaacctcgtcaccctgaatgccaaaggcagcgaaaagcagcacgagctacagttgcggattcagggcgagcctgtctccgggcagcttaatctggcaggaagttttgatcgcaaagaagaacgctggaagggaactcttagcaatacccgcttccagacgccggtcggcccgtggtcgctgacccgcgatattgcgctggattaccgcaataaggagcaaaaaatcagcatcgggccacactgctggcttaacccgaatgcggaactgtgcgtgccgcaaactatcgatgcgggggccgaagggcgtgcggtggtgaatctcaaccgcttcgacctcgccatgctgaaaccgtttatgccagaaaccactcaggccagcggtatcttcacgggtaaagcggatgttgcctgggacaccacgaaagaggggctgccgcagggcagtatcaccctttcggggcgtaacgtgcaggtaacgcaaaccgtcaacgatgcggcgctgcccgtggcgtttcagacactgaatctgacggcggaattgcgtaacaaccgtgccgaattgggctggaccatccgcctgaccaataacggccagtttgatggacaggtgcaggtgaccgatccgcaaggccgccgtaatcttggtggcaacgtcaatatccgtaacttcaaccttgcgatgataaaccccatctttacccgtggggaaaaagcagcggggatggtgagtgccaacttgcgtctgggtggtgatgtgcaaagcccgcagttgtttggtcagcttcaggttacgggtgtggatatcgatggcaactttatgccgtttgatatgcaaccgagccagcttgcggtcaactttaacggtatgcgctcgacgcttgccggtacagtacggacccagcagggtgaaatctacctgaacggtgatgccgactggagccaaattgaaaactggcgggcgcgggtaacggcgaaaggcagtaaagtgcggatcaccgtgccgccgatggtacgaatggatgtatcgccagatgttgtattcgaggctacaccaaacctgtttaccctcgatggtcgcgtggatgtcccttgggcgcgcatcgtggtgcacgatctgccggaaagcgcagtaggcgtctccagcgatgtggtgatgcttaacgataacctgcaaccggaagagccgaaaacggcgtcgattccgattaacagtaacctgattgtccacgttggcaacaatgtgcgcattgacgcctttggcctgaaagcgcggctgacgggcgatcttaacgtcgtacaggacaaacaagggctgggcctgaacgggcagatcaacatccctgaagggcgcttccatgcctatggtcaggatctgattgtgcgtaagggtgagttactgttctctggtccgccggatcaaccgtatcttaatattgaagctattcgtaacccggatgctacagaagacgacgtaatcgccggagttcgcgtcactggtctggcggacgaaccgaaagcggagatcttctctgacccggcgatgtcgcaacaagctgcattgtcttatttgctacgtggacaagggctggagagcgatcagagcgacagtgcggcaatgacctcgatgctgattggtctgggggttgcgcaaagtggccagattgtgggtaaaatcggcgagacgtttggcgtaagcaatttagcgctcgacacccagggagtaggcgactcctcccaggtagtggtcagcggctatgtattgccaggtctgcaagtgaaatacggcgtgggtatatttgactctatagcaacactcacgttacgttatcgcctgatgcctaagctatatctggaagccgtgtctggtgtagaccaggcactggatttgctctatcagttcgagttttagcaatgcgaatatttgtctacggcagtttacgccacaaacaaggcaacagtcactggatgaccaatgcccagttactgggcgatttcagtatcgataactaccagttgtatagcctgggccactatccaggcgcagttccggggaacggaacggtacacggtgaagtttatcgtattgacaacgccacgctggccgaacttgatgccttgcgcaccaggggcggtgaatacgcgcgccagttgattcagacgccgtacgggagtgcatggatgtacgtttatcaacgacccgtcgatggattaaagctaattgaaagcggcgactggttagacagggataagtaataataaaagcacgccaccttcgggtggcgttgttttatgcgatgtatctcgcgatttttttttgtaacttttccatcttttgcttttctctccgagccgctttccatatctgcaatcgcatacaaaactctgctggcgttcacaaatgtgcaggggtaaaacgggggcacgctttgaacggtgagtatgagtgaggtcggctaacttccagcaagtggctatgaacagcaaaatggtggtcgggtttgcttgttcttaccgttcaagccttgcaaccgctgagaataatgatggtggaatagagagtttatttatcgcgggcataaaaaaacccttactaaccgaagcccggcgttcagggttattgcgctagaagaacttatttattctttgcgcgctcgaaggaagcaacgatttcagctttagcggcttctgcgttttcccaaccttcaactttcacccacttgcctttttcgaggtctttgtagtgctcgaagaagtgagcgatttgcgctttcagcagttcaggcagatcgtttacgtctttaatgtgatcgtattctttgctcagcttgctgtgcggaaccgcaaccagtttcgcatcttcaccggcttcgtcggtcattttcagaacgccaaccggacggcaacggatcacagaaccaggctgcagcgggtacggagtcgggaccagtacgtcaaccgggtcaccgtccagagacagggtgtggttgatgtaaccgtagttgcacggatagaacatcgcggtggacatgaagcggtcaacgaacagtgcgccgctctctttgtcgatttcgtatttgatcggatctgcgttagccgggatctcaataacaacgtagatgtcttccggcagatctttacccgcagggacgttgagtaagctcatgtctgtttcctttaaaaatatgtggcaaacaagtgccgagtattatagccaactcgcgccgaatgtctttgcttgttttcgtcttcattttcctttttcgccagttttaagacggtatacagagcaggaaaatccataaccgtagccgcatttttcatagtgagatgaaagcgattacaaacttgtgattaacgttttatttacttttttgaagtgtgatgtaacgcaatccgttacataacgaattgtctatagttttttcgcgaacatcttttcaccaataataattaccccgacgaggacaaccctatgtggaaacgcttacttgtagtctctgcagtctcggcagccatgtcgtctatggcgttggccgctccattaaccgtaggattttcgcaggtcggatcggaatccggctggcgcgccgcagaaaccaatgtggcgaaaagtgaggccgaaaaacgcggaattacgttgaaaattgccgatggtcagcaaaagcaggaaaaccagattaaagcggtacgttccttcgttgcacaaggggtggatgcgatctttatcgctccagtggttgcgacgggttgggaaccggtattaaaagaggcgaaagatgccgaaatcccggtcttcttgctcgaccgttccatcgatgtgaaagacaaatctctctatatgaccaccgttactgccgacaacatcctcgaaggtaagttgatcggtgactggctggtaaaagaagtgaatggcaaaccatgcaacgtggtggagctgcagggcaccgttggggccagcgtcgccattgaccgtaagaaaggctttgccgaagccattaagaatgcgccaaatatcaaaattatccgctcgcagtcaggtgacttcacccgcagtaaaggcaaagaagtcatggagagctttatcaaagcggaaaacaacggcaaaaacatctgcatggtttacgcccataacgacgacatggtgattggtgcaattcaggcaattaaagaagcgggtctgaaaccgggcaaagatatcctcacgggttccattgacggtgtaccggacatctacaaagcgatgatggatggcgaagcgaacaccagtgttgaactgacgccgaacatggcgggacccgctttcgatgcgctggagaaatacaaaaaagacggcaccatgcctgaaaagctgacgttaaccaaatccaccctttacctgcctgataccgcaaaagaagagttagagaagaagaaaaatatggggtattgagggttgctatgcctgatgccgattcgtaggccggataaggcgctcgcgccgcatccggcgatggtgcactgaagcctgattcgacgcttaccgcgtcttatcatgcctactgggagcacgctttacaccgggggaaaccatgacgaccgaccaacaccaggagatcctccgcaccgaaggattaagtaaatttttccccggcgtcaaagcgttagacaacgttgatttcagcctgcgccgtggcgaaatcatggcgctgcttggtgaaaacggggcgggaaaatcaacgctaatcaaagcattaactggtgtataccacgccgatcgcggcaccatctggctggaaggccaggctatctcaccgaaaaataccgcccatgcacaacaactcggtatcggcaccgtctatcaggaagtcaacctgctacccaatatgtcggttgctgataatctattcataggtcgcgaacccaaacgtttcggccttctacgccgtaaagagatggaaaagcgcgccaccgaactgatggcatcttacggtttctccctcgacgtgcgcgaaccgcttaaccgtttttcggtggcgatgcagcaaatcgtcgccatttgccgggctatcgatctctccgccaaagtgctgatcctcgatgaacccaccgccagcctcgacacccaggaagtggagctattatttggcctgatgcgtcagttgcgcgatcgcggcgtcagcctgatctttgtcactcactttctcgatcaggtctatcaggtcagcgatcggatcaccgtcttacgcaacggcagtttcgtaggctgtcgggaaacgcgcgagctaccgcagatcgaactggtaaaaatgatgctggggcgcgagctggatacccacgcgctacagcgtgccgggcgaacattgttgagcgacaaacccgttgccgcgttcaaaaattacggcaaaaaaggaacgatagcaccgtttgatctcgaagtgcgccccggcgagatcgtcggtctggctggcttgctgggatccggacgtaccgaaaccgccgaagtgatcttcggtatcaaacctgctgacagcggcacggcgttgatcaaaggcaaaccgcaaaccctgcgatcgccacatcaggcttcagtactgggcatcggattctgcccggaagacaggaaaacagatggcatcatcgccgctgcctcggtgcgggaaaatatcatcctcgctctccaggcccagcgcggctggctacgacccatttcccgcaaagagcagcaagagattgccgaacgctttatccgccagcttggcattcgcacaccttcaactgaacaaccgattgaatttctctccggtggcaatcagcaaaaagtgctgctttcacgttggctactgacccgaccgcaatttctgatccttgatgagccaacccgtggcattgatgttggtgcccacgccgagatcatccgcctgattgaaacgctgtgtgctgacggtctggcgctgctggtgatctcctccgaactggaagagctggtgggctatgccgaccgggtgatcatcatgcgcgatcgcaaacaggtggcggagatcccgctggcacagctttccgttccggcgatcatgaacgccattgcggcgtaaggagaacagtgtgatgcctcaatctctccctgacactacgccgccaaaaaggcgttttcactggccgacggggatgccgcagctggcggcactgttgctggtgctgctggtcgatagcctggtagccccgcatttctggcaggtggtgcttcaggatgggcgtttgttcggtagccctatcgacattcttaaccgtgcagctcccgttgcgttactggcgattggtatgacgctggtgatcgccaccggtggtatcgatctctctgtgggggcggtgatggctatcgccggagccacaacggctgcgatgacggtcgcgggattcagcctgccgattgttttgttaagcgccctaggcaccggcatcctggcgggattgtggaacggcatactggtagcgatcctcaaaattcagccgtttgtcgccaccctgatcctgatggtcgccgggcgcggcgtggcgcaactgatcaccgccgggcagatcgtcacgtttaactcgccggatctctcatggtttggcagcggatcgctgttgttcctgccaacgccggtcattatcgcggtgctgacgcttctcctgttctggctgttgacccgcaaaacggcgctggggatgtttatcgaagccgttggtatcaacattcgggcggcaaaaaatgccggggtaaacacgcgaatcatcgtcatgctcacctacgtgttgagcgggctatgtgcggcgattgcgggcattatcgtggcggcggatattcgcggtgccgatgccaacaacgccggattatggctggagctggacgccattctcgcggtggtgattggcggcggatcgctgatgggcgggcgctttaacctgctgctctcggtagtgggggcgctgattattcaggggatgaacaccggaattttgctttcgggctttccgccggagatgaaccaggtggtgaaagcggtggtggtgctttgtgtgctgattgttcagtcgcaacgctttatcagtctgattaaaggagtacgtagccatgataaaacgtaacttgccgctgatgatcaccatcggcgtctttgtgctgggctatctctactgcctgacccagtttcccggttttgcttccacaagggtgatctgcaatatcctgaccgataacgcctttcttgggataatcgccgttggcatgacctttgtgatcctctctggcggtatcgatctctccgtcggttcggtgatcgcctttactggcgtgtttctggcaaaagtggttggcgatttcggcctctcgccgctgctggcgtttccgctagtgctggtgatgggctgtgccttcggcgcatttatggggcttctgatcgacgccctgaagatcccggcatttatcattacgcttgcggggatgttctttttgcgcggcgtcagctatctcgtttcggaagagtcgattccgataaaccatcccatttatgacacgctctcaagccttgcgtggaaaatccctggcggcggtcgcttaagtgcgatgggactgctgatgttggcggtggtggttatcggcatattcctcgcgcatcgtacccgttttggtaatcaggtatacgccattggcggcaacgcaacgtcggcgaatctgatggggatttccactcgcagcaccactattcgcatttatatgctctccaccggactggcaacgctggcggggattgtcttctcgatttatacccaggccggatatgcgctggcgggcgtaggtgtggaactggatgctatcgcctcagtggtaattggcggtacgcttttgagcggtggcgttggaacggtattagggacgctttttggcgtggcgattcagggactgattcagacttacataaactttgatggcacgctgagttcctggtggacgaaaatcgccatcggtattttgttgtttatttttatagcattacagcgtggattaacggtgctgtgggagaatcgtcagagttcgccagtgacaagagtcaacattgcgcagcaataaaaacgcctctccgtgtggagaggcgcaggagattacgcgtccgggaactcacggataaagcgttcgacatcttcaaccatatggtcgttgccgacaaagaacgaacggcgctggtgcagggtttccgggataatatccagaatacgctctttgccatcgctcgctttaccgcccgcttgttccgccaggaatgccatcgggttgcactcatacagtaaacgcagtttaccgtccgggtggctggcggtgcttgggtagagataaataccgcctttcagcaggttacggtggaaatccgcaaccagtgaaccgatataacgtgaggtatacgggcggttggtggatttatcttcttcctggcagaatttaatgtacctcttcaccccgttcggaaacttaatgtagtttccttcgttgatggagtaggttttgcctttctccgggaagcgcatccgttcctggcacaggcagaaaacgcccagcgaaggatcgtaagtaaaggcgtgaacaccgcatccggtggtgtaaaccagcatggtagaggagccgtataccacgtaacctgccgcaacctgtttgttaccaggctggaggaaatcttcttccgttaccggcgtgccaacaggcgtaacgcggcggtagatggagaaaatggtaccgacagagacgttaacatcgatgttggacgagccatccagggggtccatcagcaccacgtattttgcgtgttcacagccttcaaagacgacaatctcatcttcttcttcagaggcaatccccgcaacgatatcgcgtgctttcagtgcggctttcagtttttcattagcgaacaagtcgagtttctgctgaacctcgccctgcacgttctcagcaccgctggcacccaggatatcaaccagtcctgctttgttgatatcgcgatggataatcttggcgcccagttttattgccgacagcaaagcagtgagctcaccggtagcatgagaaaactcgtgctgcttttcgacaataaattcacctaacgttttcataaaactttccctgcaatgtttatggagtaaagcgaccgcaacaatcttaacaaataatctcaatgttgcgctcaggtgaatcgcgccagcaaattgcggattatcctgaaatgcatttctcacttgcccgacatatgcgtaaaatgagcggcagattaaaaaaggatagtgacgtatgcgcattcatattttaggaatttgtggcacatttatgggcggtctggcgatgctggcgcgccagttaggccatgaagtaacgggttcggacgccaatgtgtatccgccgatgagcaccttacttgagaagcaaggcattgagctgattcagggttacgatgccagccagctcgagccgcagccggatctggtgattattggcaacgccatgacccgtggaaatccgtgtgtggaagcggtactggaaaaaaacatcccttatatgtcaggtccacagtggctgcacgattttgtgctgcgcgaccgctgggtgctggccgttgccggtacacacggcaaaaccaccaccgcgggaatggcgacctggattctggaacagtgtggttacaaaccgggatttgtgatcggcggtgtgccggggaactttgaggtttcggcgcgtctgggcgaaagcgacttctttgttatcgaagcggatgagtacgactgcgccttcttcgacaaacgctctaaatttgtccattactgcccgcgtacgctgatcctcaacaaccttgagttcgatcacgccgatatctttgacgacctgaaagcgatccagaaacagttccaccatctggtgcgtatcgttccggggcagggccgtattatctggccggaaaatgacatcaacctgaaacagaccatggcgatgggctgctggagcgagcaggagctggtgggtgagcagggtcactggcaggcgaaaaagctgaccaccgatgcttccgaatgggaagttttgctggatggcgaaaaagtgggcgaagtgaaatggtcgctggtaggcgaacataatatgcacaatggcctgatggcgattgcagcggctcgccatgttggtgtagcgccggtagatgccgctaacgcgctgggttcgtttattaatgctcgtcgccgtctggagttgcgtggtgaagcgaatggcgtcacggtatatgacgattttgcccatcacccgacggcgattctggcaacgctggcggcgctgcgtggcaaagttggtggtacggcgcgcattattgctgtgctggaaccgcgctcgaataccatgaaaatggggatctgcaaagacgatctggcaccttcattaggtcgtgccgatgaagtcttcctgctgcaaccggcgcatattccgtggcaggtggcagaagtggcagaagcctgcgttcagcctgcacactggagtggcgatgtggatacgctggcagatatggtggtgaaaaccgctcagcctggcgaccatattctggtgatgagcaacggcggttttggtgggatccatcagaaactgctggatggtctggcgaagaaggcggaagctgcgcagtaattcggcctcagcctgatatagtgtgcgtaggccggataaggcgttcacgccgcatccggcatttgagcatagtgcctgatgcgacgcttgatgcgtcttatcaggcctacaggtgcaccgcatccggcaaaccatactcacatcaacaacgaaaattacccttcattctccgccagtttgcgcagatactggaaaatctggcgtgcggatttcggcggcttattcccttctttctctttcttcgcgttgcggatcagagtacgcagttgctgacgatcggcatcgggccacagattcaatacttcagcgatggcgtcatcaccctggtcgatcagacgatcgcgcagattttccagtttatggaacagcaccacctgctggttgtgacggttttttagcttatccagcgcctgacgaataggctctacgtcgcgctggcgcagcatcttaccgataagctgcaactggcggcggcgaccttccatcttaatacgctgggcgagctcaatagccgcgcgcagatccgcatctaacgggatcttatccagcgcgtttttccccagatcaacaatttccgcgccaaggcgttttagctcctcggcatcacgtttaatttcacttttactgacccagataatttcatcgtcttcgtcttcgatgtcatcaccgggaacgtcgtcgagccagtcttcgggctgcttagtcatctcaggctccttaaaaaaagaggctaatgttaccagttaagatgcgcactgaaaaacggttctctgttagacttcagagaaactctctacattatggcacttgcaatgaaagtaatctctcaagttgaagcgcagcgcaagattctggaagaagcagtttccactgcgctggagttggcctcaggcaaatcggacggtgcggaagttgccgtcagcaagaccaccggcattagcgtaagcacgcgttatggtgaagtggagaatgttgaattcaatagcgatggcgcgctggggatcactgtttatcaccagaaccgcaaaggtagcgcatcatccaccgatttaagcccgcaggccattgcccgtactgtacaggcggcgctggatattgcccgttatacctcgccagatccctgtgccggcctggcagacaaagagctgctggcctttgacgcaccagatctcgacttgttccaccctgcggaagtttccccggatgaagccattgaactggcggcccgcgcagaacaggcagcattacaggcggataaacgtatcaccaataccgaaggtggcagctttaacagccactacggtgtcaaagtttttggcaacagccacggcatgttgcagggttactgctcaacgcgtcattcgctctccagctgtgtaattgccgaagaaaatggcgatatggagcgtgattacgcctacaccattgggcgcgcgatgagcgatctgcaaacgccagagtgggttggggccgactgtgctcgccgtactttatcgcgcctgtcaccgcgtaaactctccaccatgaaagcgccagtcatttttgccaatgaagtggcaactgggctttttgggcatctggtgggggcgatagcgggtggatcggtttatcgtaaatctaccttcctgctggattcgctgggtaaacaaattctgccggactggctgaccattgaagagcatccgcatctgctgaaagggctggcgtcgacgccattcgacagcgaaggtgtgcgcaccgagcgtcgcgatattattaaagatggcatcctgactcagtggctgctgaccagctattcggcgcgaaaactggggctgaaaagcaccggacatgcgggcggtattcacaactggcggattgccggacaagggctaagcttcgaacaaatgctcaaagagatgggcaccgggctggtggtgacggagctgatgggccagggcgtgagtgccattaccggtgattattcccgtggtgctgcgggcttctgggtagagaatggcgaaattcagtatcccgttagtgaaatcaccatcgcaggtaatttaaaagatatgtggcgcaatattgtcaccgtcggtaacgatattgaaacacgcagtaatatacagtgtggttcagtgctgttgccggagatgaaaatcgccgggcagtaaaaaaactggcgcgacctgccgcgccaaatcttcataataaaaaaggaagtgagcaatgcgtaaaagcctgttagctattcttgcagtctcctcgttggtattcagttctgcgtcgtttgccgctgatcttgaagacaatatggaaaccctcaacgacaatttaaaagtgatcgaaaaagcggataacgcggcgcaagtcaaagacgcgttaacgaagatgcgcgccgcagcgctggatgcgcaaaaagcaacgccgccgaagctcgaagataaatcaccggacagcccggaaatgaaagatttccgccacggtttcgacattctggtcggtcagattgacgacgcgctgaagctggcaaatgaaggtaaagtaaaagaagcgcaggctgctgcagagcaactgaaaacgacccgcaacgcctatcaccagaagtatcgttaattcctcatttccctgttgcctgcactcaggtaacagggaacttatcatcgcaaatgatgcaccacctgattgctgctgccgcgccagatcagggaagggtcttttaaatcctgcacaaatttgccgtcgaccagcacgttaatcaaatcaacaacctgcatttgcgcagcgttgagttcgtcgagtttatagcctgtccacacccagatgtctttacccggacactcggcgcggatgcgttttaccagtttcagaatatccggcacgttttgcggatgcagcggatcgccgccggagagggaaatcccctggcgtttgatacgagtgtcattcagatctttaatgatcttgtcttccattgctttggtaaatggctgaccagaatttacccgccatgtgcttttgttatagcaaccggggcattcatgaacacacccggagacaaacagggtgcagcgagtgccggggccgttgacgatgtcgacaggatagtactgatgataattcattatttcgcttggcttatcagtccgcgtgtaggctgcatccggtaatcaatgcctgatgcgacgctgtcgcgtcttatcaggcctacagccgttgccaaatgtaggccggataaggcgtttacgccgcatccggcatttgcttagcgcagagtgaagattaacctatctgcccattccccaaatgtttaacgcggcgcttaacttcttcctgcttaccagcgttaaacggacgtgcatccgggctacctaaatatccgcacacgcggcgagttaccgacacacgggaggcgtcatggttaccacatttcgggcaagtgaagcctttgctggtgcactcgaactcaccggtaaagccacactcgtagcactcatcaatcggtgtattggtgccgtaatacggtacatgctgatagctgtaatcccagacatcttccagcgctttcaggttgtgctgaatgtttggatactcgccgtagcaaatgaaaccaccgttcgccagcggcgggtaaggcgcttcaaagtcgatcttgtcgtacgggttcaccttcttctccacatcaaggtggaaactgttggtgtagtaacctttatcggtcacgcccggcaccacgccaaactcagcagtatcgagacggcagaagcggtcgcacaggttttcactcggcgtgctgtagagactgaaaccataacccgtttcttctttccactgatccactgcctgacgcagacgttcaacaatggcgatacctttcgcgcgaagctgctcgttgtcgtaaacatgctcgccgccgaacagcgcgttaatggtttcgtggatgccgatgtaacccagcgaaatagacgcacgaccgtttttgaagatttcagaaacatcatcgtcagcattcagacgtacgccacaagcaccttccatatagaggatcggggcgacgcgcgctttcacgccttcgagacgagcgatacgggtcatcagtgccttacgtgccagcaccagacgttcatccagcagcttccagaaggtggcttcatcgccttttgcttccagagcaatacgcggcaggttcaggctgatcacgccgaggttgttacgaccatcgtggatctgctcgccgttttcattttcccacacgccgaggaagctgcggcagcccatcggggttttaaacgaaccggtgactttcactacctgatcgtagttcaggatatccggatacatgcgcttgcttgcgcactccagcgccagctgtttgatgtcgtagttcggatcgccttttttatggttcaggccatcgcgaatcgcaaacaccagtttcgggaacaccgcagttttacggtttttaccgaggcctgcgatacggttacgcaggatcgattcctgaatcaggcgcgattcccagctggtgcccagaccaaaaccaaaggttacaaacggcgtctgaccgttggcggtgtgcagggtgtttacttcgtactccagcgactggaaggcatcgtagcactctttgatggtacgagagttagcgtagccttcggcgtccgggatgttccactcttctgcggtcttgcgatgtttgttgtagctggcggtaacaaacggcgccagcacttcatcgatacggttaatggtggtgccgccataaatatggctggcgacctgagcaataatctgcgcagttaccgcggttgccgtagagatcgacttcggcggttcaatctcggcgttccccattttaaagccctgggtcagcatgcctttcaggtcgatcaacatgcagttgaacatcgggaagaacggcgagtaatcgagatcgtgatagtgaatatcgccacgctcatgtgcctgcaccacgtcacgcggcagcaggtgctggcgtgcatagtgtttagccacgatcccggccagcaggtcgcgctgggttggaatcaccttgctgtctttgttggcgttttcgttgagtaacgaggcgttggtctgctcgaccagaccacggatctcctggttcaggcgaccgcgtttttcacgttcaatgtcgcgatcgtgacggtactcgatgtaagcacgagccagttgtttgtatggacccgacatcagctggttttcaactgcggtctggatctcgttgatatccacctggttgcggccctgcatctgctcgctgacaaccgcggcaacagtggcgcaataatcggcatcatcgacttccgctgctttagctgcacgcagaatcgcttctttgatgcgctctgatttaaacggcactttgcagccgtctcgtttcatcacatgcggtgtcatgatcgctccatatttttaagaacaggttatccacagaaattgggaaaggcgttttccggttttttcgtttcgttttccggtgctttccgcaatcgccatccgcttatccacaacgccgcacctttttcgtggggagctgtagtagcaattatagtcgattaatacaacatattgggttgggacgcattttaaagtctatatatagtgctttgcatcaaggatgttttaactttttttgatgtagctcaaagtaaaaagcagagcgtacggatgacgggcgctacagcgatatgtaaattttttaatgaattttctggttgaaaaatcaacaaaaacaacatactgacagacaaaaccccggaatgaccggcattaccggggcttagggaagatttacttctgtaaccaccagacagcctcaaaaggccgtaaagtcatggcacagggttgtggtgaggcttcttcgtagttatgcatcacaagttgccagttgccgcgcattttccctggctgccagggttggatctcacggctaaggttggcaatgaccagcaaggtttgccccttccattcacggcgatagcaccacaatacagggctgtttggcagcagatcctggtaattgccccatgtcaggatggcttcttgcttacgcagtgcgattaacttttggtaggtgtaaaacaccgaggaatcatcggccagcgcggcttctacgttgatttgttgatagttatcgcccaggccaatccacggttcgccagccgtaaacccggcattatcgccgttgctccattgcatgggcgtgcgactgttgtcacgggatttactggcgaggattgccaataactcgtcggcatcacgcccatcgttgcgcagctcggcaaacatattgaggctctccacgtcgcgatagtcagtaatgcgcgtgaaatgcgggttggtcatgccaatctcttcgccctggtagatatacggcgttccctgcatgccatgcagcaccatcgccagcatttttgccgcaggcacgcggtattcaccttcatcaccaaagcgagaaacaatgcgcggctgatcgtggttacaccagaacaaggcattccatgctacgttgtgcattccttgttgccagtggcggaacaatgttttcaacgccacaaagtcaggtttagccagcgtccatttttcaccaccgggataatcgaccttcaggtgatgaaaattaaaggtcatcgataattcactgcctgtcagtgccgcgtatcgctggcaatgctcaaggctggtggaggacatttcacctacggtcattaacccgcgtggcgtaaacacatcgcggttcatctcgtgcaaaaactcgtgtgctcgtggcccgtcggtgtagaagcgacgcccgtcgccgtccaggtcttcagggaaacgcgggtctttggagatcagattcaccacatccaggcgcaacccgtcgaccccacgatcggcccagaactcacagacttttttcagctctgcgcgtaccgctggattctcccagttgagatccgcctgttctggtgcaaagagatgcaaatagtactgttcgctttccgcatgccagcgccacgcactaccgccaaattttgaacgccagttgttcggtggcgtttctggttcgccatcgcgccagatataaaactggcggtaagggctttctttgttcagcgcctcgcgaaaccaggcatgttgggtagaggtatggttaaacaccatatcgagaatgatacgaatcccgcgcgattttgcctgcgtcaccagttcgtcaaaatcgtccagcgtgccgtaggtgggatcaatcgccgtatagttcgctacatcgtaaccgttatcgacctgcggagagacataaaagggggttagccagatggcatcaacgcccagtttatgcagatagtccaggcgttggataacgccacgtaaatcgccggtgccgctacccgtggtgtcctgaaaactctttggataaatctggtagataacgccgttttgccaccagtggggaagattagtcattacgttattcctgcaaatgcgagggggcgcaattgcgccccgaagaaaattaaacaatgtccagcgtgcccaggcggtatttccgctgatagataaacgaggtgagtacaatcgggatgatgatggcgatagccattgccagcgcaaacacctgccagtagctcggttgaatcgagagaattcccggcaggccgcctacgccgatgccattcgccataacgccgttcaggccacatagcaatcctgccagaccagaaccaatcatcgcgcacagcatcgggaagcgatatttcaggttgatgccgtacattgcaggctcagtgaccccaagccaggcggagatagcggcaggaacggagatctcgcgttcattgtgcttgcggctggaaatgataatgcctatcacggcggagccctgagcgatattcgacagcgcaatcagcggccacactggcgtaccacccatgctttgaatcatctgcaaatcaatagcaagcgtggtctggtgtaccccggtgatcaccagcggggcgtacaggaagccaaacaatgccgcgccaatcggagcaaagctgccggtcatcaggtgacgtaccgcaaaggcaacgccatcgccaatcatgcgaccaaacggaccaatcagcgcatgggcgaggaacaccgcgaggatcagcgaacagacgggcaccaccaccagatagaggtaatctggcacgatgcgtttaaggcgagtttcaataacgcccagcgccagcccggctaacagtgccgggatcacctgcgcctgatagcccactttggcgatgctgaacatgccaaagtcccacacttccggcagctgctgcccgagcagataagcgttcatcagctggggggaaaccagtgtcacgccaagtacgataccaaggatcggcgtgccgcccatttttttcaccgccgaccagcaaatcccgaccggcaggtagaagaagatcgcttcaccgatcaaccacagaaaatcgtagatcgtttgcagggaagggtacatttgcgccagcgtttgaccgttgctcatgggcaaatcgccgatcacattgcgaaaaccgaggatcaaaccgccgctaatcaacgcgggcagcaacgggaagaagatctccgcgaaatgagagatcaactgctcatgccatttcatattctgccgggcggctttttttacctgctctttatcaacctgcgcctgtccggttgacgctatcagtgcttgatagtaatcacccacgttggtgccaatcaccacctgaaattgcccggcattggtgaaacagcctttcaccatggggagttgctcaatttctttcggtctggcattggccggttggttgaggacaaagcgcaggcgagtaatacagtggctcaccgtcgcaatattgccgcgcccgccgaccagttcaatcaaccgatcgatatccgtttggtttattttgctcatcataaagccccatggcagatgacatttttggttggctgcagaatatattgcgcggaaaaatttaaaaacgggaacgttcccgaaacgcagcgaagatcacaatttatcgttcaggaaacgatcaggacagggtggcggggatgatgatttgttgcggttcgctgcgtccggttacctgcgcgatcaactggcaggccgcctggcgtccagcttcggcgtaaccaggatctacggtgacgatctccggatgaaggaatttcattaatggcgtattaccgacgctcgccagttgcaaggtgtcgatgcgttgctcttgcaggtatttacttgcgccaagtgccagcgtgtcggttgcgcacagtaaggcggtagtttcaggcgtaatcacttttgctacgttctcatagccttgcttcatagcaaggcctggcagggcggcaacgggatgcagtttatgcgctttgcagaacgccaggtaggcttcgtgacgtcgcttcccggtcgtcacgtcactatgcggcacgccgagataactgatattgcgatgcccctggtcatacagccgttgcatcaggatcttgattgccccttcgtcgtcataacagaccgaagcaaagccttttgcgtcacgcgccagcagaaccagcgatgactgccagtgggctaacatttcttctgttatgccggtaaaaccgaacagcactacgccgtcgatattacgccgtttcagcacccccaaatgttcggcaactaattgcggggaaaactgactttccatcatgattggatcgtaaccttgttcatagaacgctggcagcatggtttgaacggcgagattttctgacaacgaatccagacgggtgacaatgatggcgaccactttatcgctttgcccacgcatagcgcgtgcagaacgggaaggggaaaatccatgctgattcatcactgcttcaacacgctcgcgcgtgcgctggctcacgccgctttcgttattcagcacccgggaaaccgtagatttccccacgccgcttaagcgcgcgatatctttgatggtcagccgattttgcatcctgttgtcccgtaacgtgttgtttaattatttgaggctaactttacccgtgcattcagcaatgggtaaagtctggtttatcgttggtttagttgccagcaggtattatatcgccataaatgctacgaatattattggattctccttattatttgcggcgcttttttcacttaccggaggttatatggaacctgatcccacgcctctccctcgacggagattaaaacttttccggtaagcccgtcttttcacggcgttaccggatgcgtaaggccgtgacgttttaacgtccctgctcagctttattaccttcaggtaaggcttcgccacgcctgaagacatttctgtactgtttcagacagtgcggagggactccttatgtttaaagaaatttttacccggctcactcgccatttaccttcccgtctggttcatcgtgatccattgcctggcgtgcagcagacagtgaatacggtggtcccgccgtccttaagtgcgcattgcctgaaaatggcggtgatgcccgaagaagaattgtggaaaacgttcgacacccatccggaagggttacatcaggcggaagtggaatctgcccgcgaacaacatggtgaaaataaattacccgcacaacaaccgtcgccgtggtgggtacatttatgggtctgctatcgcaacccctttaatattttactcaccattctcggcgctatttcttacgccacggaagatttatttgccgcgggcgttatcgcgctaatggtcgctatttcaacgttgctgaactttattcaggaagcacgttccactaaagcggcagatgccctgaaagcgatggtcagcaataccgcgacggtgctgcgcgtaattaacgacaaaggcgaaaatggctggctggagatcccgatcgaccagctggtgcccggcgatattataaaactggcggcgggagatatgatcccggcagatttacgtatcttgcaggcgcgggatctgttcgtcgctcaggcgtcgttaaccggtgagtctctgcccgtggaaaaagccgctaccactcgccagccggagcacagcaatccgctggagtgcgacacgctgtgttttatgggcaccaccgtggtgagcggcacggcacaagcaatggtgattgctacaggtgccaatacctggtttggtcaactggcggggcgtgttagtgagcaggaaagcgagccgaatgcctttcagcaagggatcagccgcgtcagtatgctgctgattcgctttatgctggtgatggcaccggtggtgctgttaatcaatggctacaccaaaggcgactggtgggaagcggcgctgtttgcgctttcggtcgcggtaggcctaacgccggaaatgttgccgatgattgttacctcgacgctggcgcgcggcgcagtaaagctgtcgaaacagaaagtgatcgtcaaacatctggatgctattcagaactttggcgcaatggatattctgtgcactgataaaaccggcaccctgacacaggataaaattgtgctggagaatcataccgatatctccggtaaaaccagcgaacgcgtgctgcatagcgcgtggttgaacagtcattatcagaccggacttaaaaacctgctcgatacagcggtgctcgaaggtacggatgaagagtcagcgcgctcgctggccagtcgttggcaaaaaatcgatgagattccgtttgatttcgagcgtcgccggatgtcggtggtagtggcagaaaataccgagcaccatcagctggtttgcaaaggtgcattgcaggaaatcctcaatgtgtgttcgcaggtgcgtcacaatggcgagattgtgccgctcgatgacatcatgctgcgtaagattaagcgggttactgatacgctgaatcgtcaggggctgcgcgtggttgcggtggcgacgaaatacctgccagcgcgtgaaggagattaccagcgggcggatgaatccgacctgatcctcgaaggatatattgcttttcttgatccgccaaaagagacaaccgctccggcactgaaggcattaaaagcgagtggaattaccgtaaaaatccttactggcgacagtgagttagttgcaacgaaagtgtgccatgaagtggggctggacgcgggagaggtggtcattggtagtgatattgaaacgctatctgacgacgaactggcaaatcttgcacagcgcaccacgctgtttgcccgcctgacgccgatgcataaagaacgcattgtgaccttactgaagcgcgaagggcatgtggttggctttatgggcgatggtattaatgatgcgcccgccttacgcgctgcggatatcggcatttctgtggacggcgcggtagatattgcccgtgaagcggctgatatcatcctgctggaaaaaagcctgatggtgctggaagagggggttattgagggacgacgcactttcgccaacatgctgaaatacatcaaaatgacggcgagctctaacttcggtaatgtgttcagcgtgctggtagcgagtgctttcttgcccttcctgccgatgttgccgttacacttgcttattcagaacctgctgtacgatgtgtcacaggtggcgatcccgtttgataacgtcgacgacgagcaaattcaaaagccgcagcgttggaatccggcggatctggggcgctttatgatcttcttcggaccgatcagctcgatcttcgatattctgacgttttgcctgatgtggtgggtattccatgccaacacgccggaaacgcaaacgctcttccagtcgggatggtttgtggtgggcttactgtcgcaaacgctgattgtgcatatgatccgcacccgccgtgtgccgtttattcagagctgtgcatcgtggccgttaatgatcatgaccgtgatcgtgatgattgtcggtatcgcattgccgttttcaccgctggccagctatctgcagctgcaggcgctgccgttaagctatttcccgtggctggttgcgattctggcagggtatatgacattaacccagttggtgaaagggttctatagccgtcgttacggctggcaataaagaatcaactgggcatggtgacccggattcagattgcagacaaagtgagttttgttcatgccggatgcggcgtaaatgccttatccggccaacaaattcaataaattgcaggaatcacgtaggcctgataagcgtagcgcatcaggcgattttgcgtttgtcatcagacttaatccgggcatgatagcccggatttccatcaagattagcgacgaacagcgatcgcttcgatctcaatcttcacgtctttcggcagacgggcaacttcaacgcaagaacgtgccgggaaggtggcgttgtgttcggtgaagaaggcttcgtaagtggcgtttacggttgcgaagtcgttcagatcttttacaaacacggtagttttaacgatgtcgcccactttcagaccagcggcttcgacgatcgcttttacgttatccagcgactgacgtgcctgtgcagcgacgtctgccggtacttcgcccgttttcggatttaccgggatctgaccggaggtgatgatcatattgcccagatcaacgccctgtacgtaagggccgatagctgccggtgcattttccgtcgcgatagttttgctcatgatttctcctttattacagcggtaaaaagtctggctcattatagggagccagacttttattaccaaccgcaattaattggccagcaccacattatgggaaaactctttttcacagtatttgcatttgagcgcgatgtcattggcgcgttttcgcacggcaaagctggaagaaaccggttcggcatggctgatacagttgctgttcgggcagaccagcacattgtcgatgcgctccggcagacttgggcgcgatttacccaccacttcatagttgtcgatacggttaaccgtggcttgcggcgcatacaatgccagttgatctacctggtcttcactcaaaaaggtattttcgattttgatcagatctttgcggcccatctcgccagaaggcaagttcagaccgatggtgatgcgctgatccgtttcggtcagcttgaacagactcaacagcttaaaaccgatctgggcggggatatggtcaattaccgtgccgcgtttaatagcttcaacctgcaatttattatcgtgtgtcatctctatttccccttacagtaccagatcgcgattcagaaccagtgccagtaacgcctggcgagcgaaaatcccgttgcctgcctgctggaagtaccaggcgtgtggcgttttatcaacatccgtcgcaatctcatcaacacgcggcagcggatgcagtactttcatattggctttggcgttgtggagatcgctggcgcgaagaacaaactgcgctttcacgttggcgtactcggacgggtccagacgctctttttgcacgcgggtcatgtacaggatgtcaacttccgccatcacttcttcaatagagctgtgcagactccatgcgatccctttttcatcgagcatatccagaatgtattgcggcattgccagcgcgtccggcgcgatgaagtaaaaacggttgccgtcgaacttcgctaacgcctgagtcagggagtgaacggtgcggccatatttcaggtcaccaaccattgcgacgtggagattgtccagacgcccctgggtttcctgaatagtgaataagtccagcaaggtttgcgtcggatgttggttggagccatcaccggcattcagtaccggtacattgccggaaaactcggtggccaggcgcgccgcaccttcctgcggatgacgcatcactatcgcatcgacgtaagtgctgataaccgaaatggtatcggccagcgtttcgccctttttacccagtgatgtattggcgctgtcggagaagcccaccacgctggcacccaggcggtgcatggaagtttcgaaagagaggcgggtacgggtagaggcttcgaagaaacagctggcaatgactttgtgcttcaacagctctggttgcgggtttgctttcagtttcgccgctgttgccagcaccagattaaggtcatcgcgactaaggtcgtttatggaaatgatatgtttctgatatagcggattagccatcttttatctcctgacgcctgggcaaaaaaaagcccctcgattgaggggctgggaatgggtgatcaacgggaagaaaaacggcaggccagcgtcttttttcagacgcggtaagacaaaatgtcgaacacactgaaccatacatcctcccggcaaattgtccggcattatactcatcgtcagaagcggtgcaagcatttgatgcaatattttgtcagcgcaaacggtttatttgaatttaaagtcaaaatatatgcatttttatttactgtgattctggagggggaactgtcgttcggtatcaataattgcagacatttcctgcttttttctttttcactttcacgcaatcagatatgcattttattccattcatccgacttatagggcggagtgtgaaaacgaacggctaacactattgcttacagctcagggatgcgcgctatcactttaatttcaaaatcaaagcctgccagccatgtaacgcccaccgccgtccaggttggataaggtggcgcgctaaatatttcatttttcaccgtcatgatgtcttcaaattgtttttctggatcggtatgaaagctcgtaacatcaatgatatcgtcaaaagtgcatcccgcagctgccagggtcgcatgcaaattatcaaatgccagtctgacttgttgctgaaaatcgggttctggtgttccgtcctctcgacttcctacttgcccggaaacaaacagcaaatcgccggaacgaatagccgcagaataacgatgttcagcatacagtgaatgtcggccagcaaggaaaacagcggttctttctaccatttggttatcctcaagatttacgacatgaacagaagatttatatttaccaggagccgcttttagcggacgacgtgagtaaacaaaacccagacatcatgggaaatggctgggcttaattgagcgtagtcggttatgcgccaaacgcgccatcaatggtatgcatcgcgccggtaacaaaactggcttctggccctgctaaccatgcgaccataccagcgacctcttccggttgcccatgtcttttgatagccataaaactatgcaacatatcgcgcattggcccgttggcgggattagcgtcggtatcaattggccctggctggacgacgttgatggtgatcccacgcggtccgaaatcacgggccagcccgcgcgccatgccttgcagggcagatttactggcggcataagcagccatgcctgcaacaggcatacgatcgccattcacggagccgatgattaagatgcgcccgccttcgggcatctgccgggcggcttcaacagaggcatgataaggagcatgaatattgattttgaaaaggcgatcaatatcgtcggcattcaattccagggcatcgccaaagacgccaatacctgcatttaccaccaggatatccaatgcgccgctcttacgaacgacatcaatgacagcgtctctgtcagcactatctgtgaatactgctgtcgctccagtctcttgtgccaggcgttcagcggcatctttcgaccccgcataggtgaatcgtacattggccccatcggtgacgaaacgacgtacgatagcggcaccgattccacggctaccaccgaggatgagaactgtcttacctgtaaaagcgcccataaggactccttgatttattatgtaacatgcattacaaaactgttttaactttctgtcaataagttttgtaatggtcactaaaaaacaatctcgcgttccaggtcgtcccagacgtttcgctcctgagcaggcagtctctgcggcaaaagtgctttttcaccaaaaaggtttcgatgctgtcagtgttgctgaagttactgattatcttggtattaaccccccgagcctctacgcggcttttggcaataaggctgggttatttagccgtgtactcaatgaatatgtcggtacggaagctattccgcttgccgatattcttcgtgatgatcgtccggtaggggagtgcctggctgaggtattaaaagaagcggcgcgcagatatagccaaaacggcggctgcgctggctgtatggttcttgaaggcattcatagtcatgatccacaagcgcgtgatattgccgttcaatattatcacgccgcagaaacggccatttatgactatatcgccaggcggcatccacaaagcgcacaatgtgtgactgattttatgagtaccgtgatgtcagggctttctgcgaaggcacgggaggggcactccatcgaacaactctgtgcaacagctgcactggcgggggaagcgataaaaactattctcaaggagtgatgcgggccttgacccgaaaggcgggaacgcgcctgccgataagttgtgataagacaataattcacgcgttaaggctagcggaattgatcatcttttcgtataacgatagaaatgaaacgttgttttaattaaggagtggaaaagatgatcatcggaaatattcataatcttcagccgtggctaccccaggagttacgccaggcgattaagcatatcaaagcacacgttacggcagaaacgccaaagggcaagcacgatatcgaaggcaatcgtctgttttatcttatctcggaagatatgaccgagccgcacgaagctcgccgtgcggagtaccatgcccgctatctcgacattcagattgtgttaaaaggtcaggaaggcatgaccttcagcacgcaacctgcaggcaccccggataccgactggttagctgataaagacatcgcatttttgccggaaggcgttgatgagaaaacagttatccttaatgaaggtgattttgttgtgttttatccgggggaagtgcataaaccgctgtgcgcagtgggcgcgccagcccgggttcgcaaagcagtagtgaagatgctgatggcgtgatgacttttcgccgtaaataactccaggtttacggcgagtttgtgaaaagagcgttttttgatatttttttgtgagtaaaatttgtaatgcttagacgttcttattaactcaaggagttcgtcatgagcaaaatatcagatttgaattattctcaacacattacattagccgacaattttaaacaaaaaaatgaagtcttagatacctggtatgtgggaatgaatgattttgcccgaattgccggggggcagaatagcagaagcaatattctttctcctagagcatttttggagtttttggcaaagatatttaccttgggttatgtggattttagcaaacgctccaacgaagcgggtagaaatatgatggctcatattgagtcctcatcttattctaaagatactgatggcaatgaaaaaatgaagttttacatgaataatcctgaaggggagcgagcggatttatctaaggtgaagatagaaattacacttgcctcagtttctactaaagggattcgtgaaggacatacagtcattatatttaaacaatctgatggttcgactaatcgttatgaagggaagtcttttgaaagaaaagatgatagttcattacacctgattactaacaagattctggcgtgttaccaacgcgaagctaacaaggaaatagcgcgtctattaaataatcatcagaagttaaataatctacagaagttaaataatctacagaagttaaataatctacagaagttaaataatctacagaagttaaataatctacagaagttaaataatctacagaagttaaataatatacaggagttaaataattcgcaggagttaaataattcgcaggagttaaatgattcgcaggatttaaatgattctcaggatttaaatgattctcaggatttaaatgattctcaggatttaaatgattctcaggagttaaataactcgcaggacttaaataattcgcaggtgagttgtaaaggttcagttgattctacgattgcggatttattagaaaaaccattgaataatgccttattagcaataaggaacgaacatctgctattaatgcctcatgtatgtagtgaatcgatttcatacttactgggcgaaaatggtatacttgaagaaatagataagctctacgaatcaaatgatcacggaattgataatcacaaaaaaggtaacaatgaaattaatgacatcatgattaacctgtctcatattcttattgattccttagatgatgcaaaggttaaccttacaccggtcatcgattcgatgctggagacttttttaaaattcccatatatttatgatgtaagaatactggagtggtgctttaataaaagcatgcaatattctgatgatacaaaaaagataaagcatgcatgctccgtaataaatcatattaatcttcgcagcgatcagtctaaaatagctgaggcattatttttcaatctcgataaagaaccctataaaaatagccctgaattacaggggttgatttggaataagttggttgtatatgtcaatgattttaacttaagcaatcgagaaaaaacatatttaatacaaaggatatttaataatgttgagtctgtatttaataaagtgcctgtcagcattttagtaaatgatatttttctgaaggatttttttatgaaaaatcctgagatgattaattggtatttccctcagttacttaatacctatgagggtgaaaagatttattttgataagttggggtatgattttaataataaagagtctaatgatgagattatgaaaaatcaaccaaatgatgttattaatgaaaaaattaataatgaattaaaacttaggtttagaatgatgcaaactatcttgaaatcgagagttaatgtattaccatatattaatgaacagcgtttaaataaactaaatccaccggaaaatttacgtatagcaatagaaaaatttgggtggaataataaacctatcactgcataaaataatgtaatgccgggatggtttgtatttcccggcatctttataacaatatcaattatttactgagcgtcgcgaccatcaccgctttgatggtatgcatgcggttttccgcctgatcaaatacaatgctggcggcagattcgaagacctcatcagtcacttccattccgccatgtaggccaaactcttccgccattttcttgccaagcgtcgtttggtcgtcatgaaacgcgggcaggcagtggaggaatttgacctccgggttaccggtcaactgcatcatcttgctgttcacttgataatcacgcagcaatgcaatgcgttcagcccatttctcttttgcttcacccatcgacacccatacatcggtatagataaagtcagcaccttcaactcctttagctacatcttccgtcagcgtaatattcccgccattttgctgtgccagagcgcggcattccgtaaccagcgcagcttccggccagcatgcctgtggcgcgaccagacgcaaatccagaccggtaagcgccgcagcttcgagcatcgaattgcccatgttgttacgtgcgtcacctgcatagaccagcgtcatttcgttgaatgctttaccgggtaaatgctcctgcatggtgaggagatccgccagcaactgcgtggggtgaaactcattggtcaggccgttccataccggcacgccagcgtattccgccagtgtttcgacaatctcctgaccatagccgcgatactgaataccgtcatacatgcgacccagcacgcgggcagtgtctttaatcgactctttatgaccaatctgactgccgcttgggccgagataagtaacgcgagcaccctggtcatatgcggcaacttcgaaagagcatcgggtacgggtcgagtctttttcgaagatgagcgcgatgtttttaccagtgagtttggcttcttctttgccgcttttcttatcggctttcagcttcgcggctaactgcagcaggctgttgagttcagctggcgtgaaatcgagtaatttcaggaaatgcttatgataaaacccggacatagatccctcctgtggctaacgcctcaatgaattaaaattcaatttatatggatgattattcatttgcaagtctaaagcataaatctttgtcacaaaggtggaggcaatgccagtggtgtgtgacaatatgagtatcggcaggacattaagaggaatgagccatggcaaacccggaacaactggaagaacagcgtgaagaaacacgtttgattattgaagaattactggaagatggcagcgatccggacgcactgtacaccatcgaacaccatctttccgcagacgatctggaaaccctggaaaaagcagcagttgaagcgtttaaactcggttacgaagtgaccgatccagaagagctggaagttgaagatggtgatatcgtgatttgctgcgacatcctcagcgagtgcgcgttgaatgccgatctgatcgatgcccaggttgaacaactgatgacgctggcggagaaatttgacgttgagtacgacggttggggcacttactttgaagatcccaacggcgaagacggcgacgatgaagattttgtcgatgaagacgatgacggggttcgccactaattaattgattaaaatgcccgatagcacacactagcgggcatttttttagagttcgcgtagcatccgcacttcacaatcgacatggcccgtgcagccaagcgcatagtcgatatgctcaaagcccaaatgctcataaagcgcaatggcttcctttaaaaaagcggtcgtttccagatagcagcgtttgaagcccatttctcgtgcctgctccatcgccattaaggccagttttttcgccagccctttaccgcgaatagccggaagaaaatacatcttttgcagttcgcaaatgtccgattcactacctgctaatggcgcaatcccaccgccgccgaccacttcaccctcgtactcaaccacccaatatgcatgacccggctgactatacacttgatacagctcgtcaagattcggatcggcgacggtgtagcctttatcagcggtaagaccgtattcggcggatacctgacgaatgacgcgggcgatagcaggattatcctgcaacgtcaggcgacgcattacaggtgattgcggcgcaatgttattcatagtttaacccaataaaaataaagtaattatacatttgtttaataccactctcttcttacgtgcgcaagcgtcttataaagcaataaagtttttgccagcctattactgataagagtattgtaacgtggcagaacattttactgtctgtatctataaattatatcaatggattttttaattcagggaatttttatggctcaagttattaatgaaatggatgttccgtcccattcgtttgtttttcatggtacaggtgagagatattttcttatttgtgtggtgaatgtgttgttaacgattataacgctaggtatctatttaccatgggcattaatgaaatgtaggcgttatctctatgctaatatggaagttaacggacaacgattttcttatggaattactggtgggaatgtttttttagttgtcttgtttttgtttttttctatttcgcaatcttaatgacagtgtcagcagatatgccgcttgttggctgtgttttgactttgtcactgttggttttgcttatatttatggcagcaaaaggactgcgttatcaggccttgatgaccagtctcaacggcgtaagatttagttttaattgctctatgaaagggttctggtgggtaacctttttcttgccgattttaatggccattgggatggggactgttttctttatctcgacaaagatgctacatgccaatagttcaagtagtgttattatatctgtggttctgatggcaatagttggtattgtttccattggtatttttaatggtactttatatagcctggtaatgagttttctctggagcaataccagtttcggtatacatcgtttcaaggtgaaattagatactgcgtattgtataaaatatgccatcctcgcatttttagctttattaccttttctcgctgttgctggttatattatcttcgatcaaatattaaatgcgtatgatagttctgtgtatgcaaatgatgatattgagaatttacagcaatttatggaaatgcaacgtaaaatgataatcgcgcagttaatctattattttgggattgctgttagcaccagttatttaacggtgtcgttgcgaaatcattttatgagcaacctgtcactgaatgatgggcgtattcgttttcgctcaactttaacataccacggtatgctttatcgcatgtgtgcgttggtggtgatatccgggattacgggcggtctggcttatccactgctgaaaatatggatgattgactggcaggcaaaaaatacgtatttgctgggcgatttggatgaccttcctttaatcaataaagaagaacaaccagataaaggcttcttagccagtatttcacggggaattatgccttctttaccatttctgtaagagataaaaaaggccggagcatgctccggccttcgttttcatcactgtgttttgattacagcgcggcgataacagcctgctgttcaatcagcttagctttcgcttctgcatagccttccagcttctcacgctctttcgcgatgaccgcttccggtgcgcgggcgacaaagccttcattcgccagcttgttctcgatacggctgatttcgccttcgatcttcgccacttctttcgccagacgcgccagctcatcttctttgttgatgaggccagccatcgggatcagcagctctgcgccgtcgatgatcttcgtaacggaaaccggacctttgtcatcggcaggcagcacggtgatgctttccagacgcgccagggtttgcaggaagccacggttttcatttacgcgacgttctgcatccgcgctgcaaccacgcagcagcagctccagcggtttgcccggcgcgatattcatttctgcacggatgttacgtacggcaacgatcgcctgtttcagccactcggtgtcggccagcgccgcttcatcaacctgagacgcatcatactgcgggaacggctgcagcatgatggtgtcggcagtgataccgcaaagtactttcacacgctgccagatggtttcggtgatgaacggaatgatcggatgcgcgaggcgcagcagaccttccagtacagtcaccagcgtatggcgagtaccgcgcagttcggcgtctgttccaccgttcattaccggcttggtcagctccagataccagtcgcagaactggttccaggtgaactcatacagaatgcctgcggcgatatcgaagcggaagctgtccagcgcttcgcggtacgctttgatggtctggttgaactccgccagaatccagcgatccgccagcgacagcgtcatttcaccgccgttaaagccgcaatcctgaccttctgtgttcatcagcacaaagcggctggcgttccacagcttgttacagaagttacggtaaccttccaggcgcttcatatcccagttgatgtcacgaccggtagaagccagtgccgccagggtgaaacgcagcgcgtcagtaccgtgcggctcaataccgttcgggaactgcttctcggtgcgcttacggattttgtccgccagctgcggctgcatcatattgccggtacgtttctccagcagttccggcagcgaaataccgtcaaccatatccagcgggtcaataacgttacccttggatttggacatcttctgaccttcgtcatcacgaatcagaccagtcatgtaaacggtgtggaacggcacctgcggtttgccattttcatctttgatgaagtgcatggtcatcatgatcatgcgggcaatccagaagaagatgatgtcgaagccggataccatcacgctggttgggtggaactgacgcagggcgtcggtgttttccggccagccaagggtagagaaggtccacagcgcagaagagaaccaggtgtcgagaacgtcttcgtcctgacgtagagcaacgtcggcaccgaggttattttctttacgcacttcatcttcgttgcggccaacataaacgttacccgcttcgtcgtaccatgccgggatacggtgaccccaccacagctgacgagagatacaccagtcctgaatatcgcgcatccaggagaagtacatgttttcgtactgcttcggtacgaactgaatgtcgccgttctcaaccgcttcaaccgccggtttcgccagtacatcggcacgcacgtaccactggtcggtcagcattggttcgataactacgccgccacggtcgccgtaaggaacggtcaggtcgtgcggtttaatttcttccagcaggccgagtgcgtcaaccgcagcaacgaccgctttacgtgcagcaaaacgctcgagtttctggaactctgccgggatttcgctggaataaacgtcagattcgttacctttggtatcgaacacctgggcgctttcacggatatcgccgtcaaaggtcaggatgttgatcatcggcagcgcgtgacgtttacccacttcatagtcgttaaagtcgtgcgccggagtgattttcacgcagccggtgcctttttccatgtcggcgtgttcgtcgccaacgatcggaatacgacggttaaccagcggcagaatgacatatttgccaatcagatctttgtaacgcggatcttccgggttaacggctacgccagtatcgcccagcagggtttccggacgggtagtcgcgaccaccagataatctttaccgtctgcggttttcgcaccgtcagccagcggatagcggatgtgccacatcgaacctttcgattcgcggttttccacttccaggtcagagatagcggtgcgcagtttcgggtcccagtttaccaggcgtttgccacggtaaatcaggtcttctttatatagacgaacgaaaacttctttcaccgcattggacaggccttcgtccatcgtgaagcgttcacgctcccagtcgacggagttgccgagacggcgcatctgacgggtaatggtgccgccggactccgctttccattcccagattttgtcgatgaaagcttcgcggccgtagtcgtgacgggttttaccttcttctgcggcaatcttgcgctcaacgaccatctgggtagcgatcccggcgtggtcagtaccgacctgccacagggtgtttttgccctgcatgcgctgatagcggatcatggtatccatgatggtttgctggaaggcgtgacccatatgcaaactgccggtgacgttcggcggcgggatcatgatgcagaaactctcctggctttcatcgccattaggcttaaagtagccctgcttttcccagtgctcgtaaagcggctgttcgatatcttgtgggttatatgtcttttccattatttccaggttgccgtattcaggttgaaaccagccacgcggtaggctttatagcgttcgcgcgccagttgtttcagagaatcttcataaggaacgaagtctaccacttctgtgaaagcggtggcaaaatctgcaaagcttgttcgcagactaatcaatatatcgcgcgggctgctgctgcgtttttgcggccaggcgatctccaccggcgcaccgccgcgcggtccttctcccgctaaattatgcggaacaaagctttctgccggacgcgcccatagggcttcatccagccggtaagcctgcttttcatcttcacaggcgatgagcacgcgcttaccgctgcgccaacgttctgcggcaatttcacacaccagttgctcaacggcgcttaagccatcgacggtggtgtcattgtccagaaggtagaacgtcgcgtttttcataaatggggcttcttgtggtggatttaaatacgcatcaggtatacaccgcagcgcctgatgcgacgctgttgtgtcttatcaggcctacgagttcagtgctgtgtgtaggtcggataaggcgctcacgccgcatccgacaataacagcattgcctgatgcgacgctgccgcgtcttatcaggcctacgagttcggtgctgtgtaggtcggataaggcgttcatgccgcatccgacaataacagcattgcctgatgcgacgcttgcgcgtcttatcaggcctacgagttcagtgctgtgtaggtcggataaggcgttcacgccgcatccggcaataacagccttgcctgacgcaattactcttcgccgttaaacccagcgcggtttaacaggaactgtgccagcaacgctaccggacgaccggttgcgcctttcgctttaccagagcgccaggcggttcccgcgatatccaggtgcgcccagttgtacttacgggtaaagcgtgacaggaagcaacctgcggtaatcgccccaccaggacgaccgccaatgttcgccatatcggcaaaattggactccagctgttcctggtactcgtcacccagcggtaagcgccatgcgcggtcaccggattgttcagacgcggcaatcagttcatgggccagtgggttatggttcgccatcagaccagtaatgtggtgacccagcgcgatcacgcaggcaccggtcagcgtcgccacgtcaatcaccgcttccggctcaaaacgctcaacgtaagttaacacgtcgcacagtaccaggcggccttcagcgtcggtattcagcacttcaacggtttgaccggacatggtggttaacacatcgcccggacgataggcacgcccgccaggcatgttttcgcagcctgccaacacgccaataacgttaatcggcagttgtagctccgcgaccatacgcatcacgccgtaaaccgctgccgcaccgcacatatcgtacttcatctcatccatgccttctgaaggcttgatcgagataccgccggagtcgaaggttaaacctttacccaccagcacgattgggcgtgcatcttccgacgcgttgcctttgtactcaatcaccgacatcagcgattcgttttgcgaaccctgaccgaccgccagataggaatgcatccccagctctttcatctgctgttcgccgataacgcgggtgataacattcttgctgtagctgtcagccagctggcgcgcttgtgaagcgaggtaagcggcgttacagatattcggcggcatattgccgagatctttcgctgctttaatcccggcggcaatcgccagaccgtgctggatcgcgcgctcaccgctggtcagttcacggcgggtcggcacgttgaacaccattttacgcagcggacgacgcggttcgctcttgttcgttttcagctgatcgaaactgtagagcgtctcttttgccgtctcgacagcctgacgcactttccagtagttgttacggcctttaacgtgcagttcagtcagaaagcagaccgcttccattgagccagtatcattcagcgtattaatggttttctgaataacctgcttgtactgacgctcatccagctcacgttctttgccgcaaccaataaggagaattcgctcggaaagtacattcggaacatggtgcagcaacaatgtctgccccggttttccttccagttcgccccgacgtagcagggcgctgatgtacccatcgctgattttatcgagctgttctgcaatcggagaaaggcgacgtggttcgaagacgcccacgacgatgcaggcactccgctgtttctccgggctaccgctttttacactaaactccatgcactacgctcctgaatcttaaagacaacggcggtggctacagatagaattgcaagctttcgtaactcatgtccgctgttgcgatgacttcgtgttaatcttaacgttattacggcattggcacgtcagaacaaaatctgagaggtgaatccgttgagtataattatcttagcgacgatttcgacgactcaagagaataaatgacgtttaagccatgaaacaagctaaaatcctgcaaaagacgagtttttacgggcgtatttaaagtgataatcataagatatctggtgcgggagacgctcaaaagccagctggcgatactcttcatcttgcttttgatcttcttctgtcaaaagttagtgaggatcctcggcgcagcggttgacggcgatattccggcgaatctggtgctctcccttctcgggttgggcgtgccggaaatggcgcagcttatcctgccattaagcctgttcctcgggctgctgatgacgctgggcaaactgtataccgaaagtgaaattacggtaatgcatgcctgcggcctgagcaaagcggttctggtgaaagcggcaatgatccttgcggtattcacggcaatcgtcgcggcgattaacgtgatgtgggcgggaccgtggtcatcgcgtcatcaggatgaagtgttagcagaagcgaaagcgaaccctggcatggcggcgctggcgcaagggcaattccagcaagcgactaatggcagttcggtgctgttcatcgaaagcgttgacggcagcgatttcaaagatgtgttcctcgcgcaaattcgaccaaaaggtaatgcacgtccttctgtggtggtggccgattccggacatttaacccagctgcgcgacggctcccaggtcgtcactctcaaccagggaacgcgcttcgaaggcactgcactgttacgtgatttccgcattacggatttccaggattatcaggcgatcattggtcaccaggcggtggcgctcgacccgaacgataccgaccagatggacatgcgcacattgtggaacactgacaccgatcgtgctcgcgcagaactgaactggcgtatcacgttggtattcaccgtgtttatgatggcacttatggtcgtaccgctgagcgtggttaacccacgtcagggacgcgtactgtcgatgctgccagccatgctgctgtatctacttttcttcctgatccagacctccctgaaatcgaacggcggtaaaggtaagctggacccgacgctgtggatgtggaccgttaacctgatttatctggctttggcgattgttctcaacctttgggacaccgtgccggtccgccgcctgcgcgccagtttttcgcgtaaaggagcggtgtgatgcaaccttttggcgtacttgaccgctatatcggtaaaactattttcaccaccatcatgatgacgctgttcatgctggtgtcgctgtcgggcattatcaagtttgtcgatcagctgaaaaaagccgggcaggggagttacgacgcgttaggcgcaggaatgtataccttgctgagcgtgccgaaagatgtgcagatcttcttcccgatggcggctctgcttggggcgttgcttggtcttgggatgctggcgcagcgcagcgaactggtggtgatgcaggcttctggttttacccgtatgcaggtggcgctgtcggtgatgaaaaccgccattccgctggtcttactgacgatggcgattggcgaatgggtcgcgccgcagggcgagcagatggcgcgtaactaccgtgcgcaggcgatgtacggcggctcgttgctctctacccagcaaggcttatgggcgaaagatggcaacaacttcgtctacattgagcgggttaaaggtgacgaagagttaggtggcatcagcatttatgcctttaacgagaatcgtcgtctgcaatccgtacgctatgccgctactgcgaagtttgacccggaacataaagtctggcgtctgtcgcaggttgatgaatctgatctgaccaatccgaaacagattaccggttcgcagacggtgagcggcacctggaaaaccaacctcacgcctgacaaactgggcgtggtggcgctggacccggatgcactctctatcagcggtttgcacaactatgtgaagtatctgaagtcgagcggtcaggatgccggacgttatcagctcaacatgtggagcaaaatcttccagccgctatctgtggcggtgatgatgctgatggcgctgtcgttcatctttggcccactgcgtagcgtaccgatgggcgtgcgtgtggtcaccggtatcagtttcggttttgtcttctacgtactggaccagatcttcggcccgctgacgttggtttatggcatcccgccgatcatcggcgcactgttgccaagcgccagcttcttcttaatcagcctgtggctgttaatgagaaaatcgtaaccgaatgaacgaataaagggagcgaaagctccctttattattgttagcaaagtgtgcttcgttcattcctgaaaaataattaaaattcaatatattgcagtggggtgggcatgataagacgcgccagcgtcgcatcaggcaaagacaaatctcgcctgacttaccttcttctccccccccagcaaactccccaacatcccgcgtacaatctgattcgtcacctggcgagcggcgcttttggccattgtttgcaccacaccatctttcttcccgccgcgtggtccggtagtgccgaacaaaatatccttcaatccaccaagaatgccgtcatccaccgctacctctttccctttcgcggggggattattttgctgctcggtactggcctgaaagcctttttgcaacatctcataggcggattcccggtccacctcatcctcatatttgccatacaccggagagtgattaatcaagccattacgctcatcttccgtcaccggtcccatccgcgaacaaggcgcaatcaccatcgcccgttccaccacagaagggcttcctttcgcatccagaaaagagatcaacgcctcgccggtgcccagtttctgaatcgccttttcggtatcaaatgccggattgacccgcatggtttgcgccgcagcttttaccgctttctgatctttgggcgtaaaagtccgcaaagcgtgttgaacgcgattaccgagctggccgagcacgttatccggaatatcggacggattttgcgaaacgaaccagacgcccacgccttttgagcgaataagccttatcacctgctcaatcttatccagcagtacctgcggtgcatcgttaaacagcagatgtgcctcgtcgaagaaaaacaccagttttggtttctccagatcgcccgcttccggcaattgttcatacaactccgagagcatccacaacaggctggcggcatacagtttcggcatctgataaagcttctcggcgctgaggatattgataacgcctttaccgttggcatcggtgcgcatccagtctttgatatccagcatcggctcaccaaagaagtgtgctgcgccttgctgttccagcgacaacagcccgcgctggatggcaccaaccgatgcgctactgatatttccgtactgattctggaaagatttggcgttatcgccgatgtattgggtaatcgcccgcaaatctttaaagtcgagcagtaacagcccctgatcgtcagcaatgcggaagatgatattcagcacgccagattgcacatcgttgagattcaacagccgcgccagcaacagcggccccagatccgaaaccgtcgcccgcaccggatggcctttctcgccaaagatatcccacaccaccaccggattggcatgcggttgccagtcattgacgccgatatttttaagccttgtgagcagtttttccgacgccgttcctgcctgcgcgataccggtcagatcgcctttcacatcagccataaacaccggcacgccgatttccgacaatgactctgccagtttttgcagcgtaacggttttacccgtccccgttgcgccagtaatcagcccgtgacggttagccattcccggcagtaaaaacagttctgtgtccggcgtgcgggcaattaacaggggttcgctcatgagatttcctccagttcctgcctggagtataggcaacggctgtgcactcttcaccgctaaattcagcagattgcgagacgccttccaaagagatttaagtgccgggcgacagcacccggcaaagggatcagaagtcagctttcaggactactcggtagcgagctttaccatcgcgtacatgctgaatggcgtcgttaattttcgacatcgggaacagttcggttgtcggcgcaaccttgctgcgggcggcaaagcgcatcagctttcgcagctcataaggcgtgccggtagcagaaccagagatgctgcggtcgcccgcaattaacgtaaaggccggaacagacagcggcgtgagaaccgcaccgaccgtatggaaattaccgccataggtcagcgcctcaaaataaggctgccagtcgaggctgacgttcacagtattgataatgagatcaaactgccccgacagggctttcagtgcctgcggatcgcggctattcaccactttatcggtacccatcgccagtacttcctgctctttcgccggattagaactaaaggccgtcacctcgcatcccattgcgtgcagaagttttatagcgatatgccccagcccgccaataccaattaccccaacgcggctggtagcagtgatatggtgcatcaacagtggtttaaagaccgtgataccgccgcacaacagcggcccggcggactcgatatcaatattttctggcagtggaatcacccattgccagtccgcacgcaacttctcggcaaagccaccgcgattcataatcgtcggcaccgcaccttgctcgcagttgatctgattaccgctaatacaggcgtcgcagtgaccacagctacgcgccgtccagccaatcccgacacgctgaccgacctgcaaacctttatcctgcgcggcgctcccgagtgccaccacgcgcccaatcacctcatgcccggcaaccagcggatattgtgaaaatccccattcgttatcgatcatcgacagatcggaatgacaaatcccgcagtaatccacctgcacttcaacatcttgtggcttcagctcaccgggatcgtactcataaacttccagttcgccgcccgcttcttttgcggcatagctttttatcatcgacatttttgggtccttctctggtgttgtttgggaagtgtagagcatggcagggcggggtgcctggagtgtgacaaaggttacatatcgctgagtgtaatgctgaaaatttcagcacttagcgaggtgggtgcaagctggcgcttgcatggtggcgtgcgacaggtataatccacaacgttttccgcatacctcttcagtgccgaagtggcgaaatcggtagacgcagttgattcaaaatcaaccgtagaaatacgtgccggttcgagtccggccttcggcaccatcggaacatcaatagacgtcaacggacgtctttttttgtgcctaaaatccagtatccgcaaggctttcctcgctttttcactcaacctaagtcaacctgattcaatctacatcaacttactgatgcgggtacaactgcgggtatttcccggttcgataatgtttgtacccacacagaacccttgaaaggatactcatcatggctctgagtgatgtgaaggttcgttcggctaagcctgaagcaaaagcctataagctgaccgacggtgaaggcatggttttgctggttcaccctaacggctccaaatactggcggctacgttatcgctttggcggtaaagagaagatgctggcattggggaaataccccgaagtgtcgttggcggatgccagggcacgccgggatgaggctcgtaagcttttagctaatggtgtcgatcccagtgaaaacaagaaagctgttaaggtagaacaggaacaagaggcgataacgtttgaagtagtcgccagagactggcacgccagcaatcagaagtggtcggcatcgcatagcgctcgtgttttgaaaagtctggaggataatctctttactgctatcggtaagcggaacattgcggaactgaagacgcgggatcttcttgtacccattaaagcagtcgagtcatccgggcggctcgaagttgccgcccgtttacagcagcgtactaccgcgattatgcgctttgccgttcagagcggcttaatcgactacaaccccgcgcaagagattgcaggtgcggttgctacggcgaaaagacagcaccgtgcagctcttgaactgaaccgtatacctgaattacttcatcgcatagatcactattctggcagaccgttaactcgactggcggttgaactcactttattggttttcatccgttcgagcgagctgcattttgcccgctggtcagaagtagattttgaaacggctatgtggacaatcccaggtgagcgtgagcaactggaaggagtcaagcattctcagcgtggctcgaagatgcggacaccacaccttgtacctttgtcgcggcaggccctaagtattttggaaaagatcaaaagcatgagcggaaattgagagctgatttttgtgggcgatcacgatccacgtaagccgatgaatgagaatacggtgaacaaggctttgcgcgtaatggggtatgacacgaaggtcgaggtttgtgggcatggcttcaggacgatggcttgtagttcgttgattgagtcgggattatggtcgagggatgcggtagagcggcagatgagtcaccaggagcgtagctctgtgcgagccgcttacatccataaggcggaacatcttggggagcgtaggttgatgtttgaagtggcacactgaatttggccacctgaacagaggtgatatgctcacctcagaacaacacaggtgctccaatgaaaaaaagaaatttcagcgcagagtttaaacgcgaatccgctcaactggttgttgaccagaactacacggtggcagatgccgccaaagctatggatgttggcctttccacaatgacaagatgggtcaaacaactgcgtgatgagcgtcagggcaaaacaccaaaagcctctccgataacaccagaacaaatcgaaatacgtgagctgaggaaaaagctacaacgcattgaaatggagaatgaaatattaaaaaaggctgttgtagattcaatctgtcaatgcaacacccctttcaattatctctttcggtgttttgaacttcagtgtctttctcggtctgttgtttagctgagcagcaaccagatctagttcatgttgagtatattgggcaagacatgtctttttaggaaagtactgccgaattagcccatttgtgttctcatttgttccccgctgccaaggactctgaggatcgcagaagtaaactttaacgccggtgctgacagtaaattctagatgtctggccagttccattcctctgtcccatgtcagtgattttctgagttctgacggtaaactcaggaatttgtcggtaagagcctgatttactgagacagaatctttgcccctgagtctaaggatgatcgtataacgtgattttcggtctacaagtgtggctatatgagagttttttgtacctgagactaaatcgccctcccaatgccctagagagcgtctgttatcgatatttcgggaacgttcgtgaattggtgttccgttcactatgttaatcgtacctctttcgcctttgcgggtatgacgcctgccatggcgaaggctatgcgaccgtcgcagatgctgtatattcaggtggtgtagcgcttcacggctacgaaagtacagcgttttataaattgtctcaggtgatattcgcagcgttttttgacgtggttttgttcgccttaaccatcctgatatttgctctggagaccatttcatctccagcttttccagaacaagctttcgcaatggtaaattttgatccagtaagcacggttttggccttttcgccattctgttggctcggttattagcatcaacagctttgtaatagcgtctgccccgattacgctgaacttcacgtgagatcgtcgaaggactgcgattcagcgcagtagctatcgcacgaatgctcattttggctgacaaaccagctcgtatctcctcgcgctcagacagtgtcaggtgagctacagcccgcttacgctcatggggttttatgccgccagtatcccttaacatagtgaagatcgttccgggttttgaacccaggatattcgctatttcactgaagcctgttccgttcttccatagttcaaaaacagaggctttttcctctgctgtaaatgttcgtctcattcaaaaaacctccgcaaccccatgttttcacataactgttgcgttgaccaattgaatctacaaccgcgctcttgatgtcagactccctgaacagttctcgataatcgggaaactcagagcgcattatcctgtggccacactctgccatgtgttcggggttcatcgcagcagctacagatactggaaaaaccgtcctgaaaaaccagacggcagacgggctgtattacgcagtcaggtacttgagctacatggcatcagccacggttcggccggagcaagaagcattgccacaatggcaacccggagaggctaccagatgggacgctggcttgctggcaggctcatgaaagagctggggctggtcagctgtcagcagccgactcaccggtataaacgtggtggtcatgaacatgttgctatccctaactaccttgaacggcagttcgccgtgaccgagccaaatcaggtgtggtgcggtgatgtgacctatatctggacgggtaagcgctgggcgtacctcgccgttgttctcgacctgttcgcaagaaaaccagtgggctgggccatgtcgttctcgccggacagcaggctcaccatgaaagcgctggaaatggcatgggaaacccgtggtaaacccggcggggtgatgttccacagcgatcagggtagtcattatacgagcaggcagttccggcagttattgtggcgataccagatcacgcagagtatgagccggcgcggaaactgctgggataacagcccaatggaacgcttcttcaggagtctgaagaacgaatggatgccggtggtgggttacgtaagcttcagcgaggcagctcacgccataacggactatatcgttggatattacagcgcactaagaccgcacgaatataatggtgggttacccccaaacgaatcggaaaatcgatactggaaaaactctaacgcggtggccagtttttgttgaccacttcacctgaaccatagttttttaattgtctgcttcagcatccatttccagcgtgaaatcattctgcattccctcatattgcggccgggataataattgccgcccccaggacggcatgttgctattaacgaaccaggtgcaggaagtgcaggtgtttttcgtactggtccagtatgtcattaatcagctgttcctggttccagcccatcacatcataattttgaccgccttctttgagataaacctcagcgcgataatatcgatgttgttcagtctgctgctcatcattatccattgcggcgagcgcgaaggtcggtgagatatacccgcgaagcctcacttcatatataaaattcagctcgttgcccaaatcgacttcaagacgaatacgatcgtcgactgcatcactaatgtggcttatcgtcccctgcttgttcagttcctcctgaaccagcgtcatggcaggctggataacgtcgtccataaaacgtttcacaagagatcgcttcggcagatacgcgatattgcgtaaccttctctgccaaggaattgggttacgtgcagccgtaggagcaattgtcgccatgctcaggctttcacgcttggtcaaatcccggcgcaaagcttttaaaagtccgtatatagatattagtaagatcactgagaagggcaatgcactcgctattgtcaccgtttgcagcgcacttagccctccggcaaggagaagcgcaattgcaacaatgcccatgagcgaggcccagaatattcgctgccagacgggtgtgtttgccactccacctgatgccagagtatccacaaccattgcccccgaatcagcagacgttacaaagaagacgatgaccatcgccattgcaatgaatgacagcacagaagagaacgggaaatgctccaggaaattaaacagggccagcgccacatcctgctgaacagtattggcgaggtctgtggccccctggttcataatgagatagatcgcgctgttaccaaacaccgtcatccacattagcgtaaaacccgcgggaacaaacagcacgccggtgacaaactcgcgaatggttcgcccgcgggagacccgtgcgatgaacatccccacaaacggcgaccatgaaagccaccatccccagtacagtaatgtccagccccccagccagttgctcgacttgggctcatacgcgtaaaggttgaacgttttactcaccagttccgaaagataaccgcccgtattttccacaaatgacttcagcagaagcacggttggtcccagacacaggaccagcgccaggagcaacaaagccagacccagattgagttcagacaggatacgtattcccttatccagaccggacaccactgaaatcgtcgctaaccccgtgatgaccacgatcagaattacctgcaccgtttcattgatgggcaccccgaaaagatggttcaaaccggcattcacctgcaaaacaccgtaacctagtgatgtcgcaacgccaaagaccgtgcctataacagcgaaaatatcaaccgcatgtcctacaggtccgtatatgcgatcgccaataatgggatagagtgcggagcgcagagttaaaggcagaccgtgacggtaactgaagaacgccagaatcagcgccacaatggcataaattgcccatgcgtgcagtccccagtggaaaaaggtcagacgcattgcttccttagctgccgcaacggtttctggagtgccaacgggtggcgaaagataatgcattacaggttcggcaacgccaaagaacatcaggccgatccccatccctgccgaaaaaagcatcgcaaaccaggagtggtagctgaaatcaggctgcgcatggtccgggcccagcttgatatcaccgtagcgtgagagtccaaggaacgtgacactcagtaaaatcagggccacagcaaggatgtagaaccagctggcattcgtgaagatttgttgctgaagtagtttaaaatttttgtcggcgacatccgggaatacggcggcaaaggcgacaagaaggaaaattagcaaagcagatgtaaagaataccgctttgttaatctgacttgtagacttctttgggattgtatcattttcactcataatcatttattccattaattaaattcgcactggatagaaggtactacctctcacaaagtagcaaagttcaactggctatgcggcgttaatcggaatgcatggtggaatgttgaggtgtactggcaatagcggacactaccatttgttctttttttaagcagccatctgatgatatttttccctgaaggctgccggggagatattccccagacgagagtgacgacgctgacgattgtagcaaatctcaatgtattcccgtattactgagatggcttcatcccggttattaaaacgatagtggctcaggctctcatttttcagcgttccccagaagctttccatcggagcgttgtcgtaacagttacctttacgcgacattgatgttttcagaccaaactgctcctgtatgacccggtaatcgtatgcgcagtactgtgaacctcgatcagagtggtggattagcccggcaggtgggcgctggctcctgagcgccataaacagggctttacctgtcagctcttttgtcatgcgctctcccatggcgtagccgacaatttcgcacgtataaacatctttgatgccagcgaggtacaaccatccctcctgtgtggcaacatacgtcaggtccgccacccagacctgatttggtgctgtaggagcgaacgtctggttcagcagatttggcgcaactggcagattgtggttcgagttcgtagttgctctgaacttgcgtttctgcttacagcgtagccttagctccttacgaagacgtgccagtcggtcacgaccaacgatgatgccattctctgccagctccgtctggaggcgccgggttccatatgtttcgcgagtgcggatatgtgccaccttaatctccagttttagccgctcatcactttgttttctgtctgagggttcatgctgtacccagttgtaataaccgctcttggatacaccaaatacctgacacatcgcttcaatgggaaattgttgtcgccattgttcgattaacgcgtatttttcagcgactcctgtgcaatttaatatatctcgctcaaggcgagcttcatttaacgccttacgcagttgcagaatttcagattccagttcagccaccgtgcgggaaccaggagtaccgagcccttttctggcggcggtaacccattgtcctaaagtgccttcaggaagagataatcgggaagcaccttcactgatcgaaagttgattttcaagaaccgttctgacagcttcggctttgaactctttagagtaacgttgggtttttctgctcattattagctccttctgatgccattctatttcaggaaggagtgtccgttaaactcaggctacctcattggttcccactacttatttggtggacaccactttgtctaattcgtcagattctgaccagacggttcaggctgtacgcttacaaacaactagtggaaatacttgtactttataatttcaagggtacgggtccgcttcgtttgatttgcgtgtttttaacaattttaaaacccagacatactgttccggatgtggccccaccaaaatttccactgttttgttcatttgtcgggcaatcattttattgtccgcgctggcaatgcaagcatccattggtggccgaatttcaatagtcaggagatgttttttttcatcataaaccgggaaaagtggtataatcatagcctgactgatgttcatcagacgtccaatgattggtaatgtcgctttataggtcgcaaaaaaatcagcaaattcactgtattcaggaccatgatcctgatctgggaggtaatatccccagtatccctggcgtactgactgaataaatggttttatcccatcctcccgggcatgtaagcgccccccgaatttacgccgtactgaattccagacataatcaatcactggatttcgttgctgatgaaacatggcggccattttttttccctgagctgccagcaacattgcaggaatatccacgctccagccatggggaaccagaaaaatcacatttctattattgtgtcgaatttcctcaagaatttcgaggcctttccagaacactcgtttctggaacttttccggaccacgaattgccagttctgccatcatcactatggattgcaatgctgtggcaaacattttgtcgacaattatttcccgttctgtatcactcttttctgggaaacaaagcgataaattaatcgtcgccctgcgacgagcttttttgctcaatctgcccgcccaacgccctatttttgccaagacaggatctctgaatgaagggggaaacattgaaatacctgcaatcattcccaaaaggaaccatgtagaccagtaaacaggggaaaggtaatttttcttaaattcaggaataaactcagatttatattttttcattatttattgcgaatgcctctaccaaaattatcattactgttttattcagagaatacatcaaaccttaatttaaattctgatgttctgagtgtacaggatatgcatccaaagagcggatagtagtttcatggatataatccagcaaagcgtatcgttttcggtactcagagcgttttttactggctatatcgcttagcggctttcgaatcacctgggttggtaatctgtaccagtcaccacaggtttttcctgctacagactcccagaaatcactatagaccgcaacaaaggttttgcgtttctgataccagtatctcaattgccggaaaacatgactgtgctcactgactgccagacactcagagatattgcaagctttcatcaacgcacaaaatgcttcaaaaataatccgttttgggaaaatcccataacaggcccgggttgcgcaccgaataacatcaggtccggtatttttaggggctccctgtaatccgccaataaaagcaatgtgtccattttgagtcagaatgactgaaaatgttaaccgggcaataactgttttattgtaaaacaatgacaacatcaactctccttcccggtcaaaaccactgggagaacactggatatcaaaattctctccatctttcccgatgaattggactaatgataccgatttttgtggaaacaaaaatttagaatatttttctggcaaattttgcacaaagcgataatgctcaagaatatattgtccacgggtccaggcgcgcccccctttatgcaaataagggcgatgaattcttgctggcaacgtggggtgtattgccagaatatcctcaatgcactgcaaggaacgcagttcataataatatcgaatactgacaaccggatttatagaacatcgcaaaatgtacatgaaccgaaattttctgtgttcccacttccccggtagtgaatctgaggaaaaaataatccttttaaggaaaccgataaatgataagttacttatagaaaacatattgttacttttgcttcgctaatgtgagtatttttaacgcagttttattaatatcaaaccgctcttctatatcctgttttgccaggcgagccatctgataaaaacgcccagggtcattaaaaaaatcattcagggcgcacatccatgcgtgcttattacctgctggtaacaatgtcccggtctggttgttctgaataacctcagggattccaccaatctgagtggccactacaggcacagaaaatgccgatgcttctgccagcaccataccaaaagattcgttttctgaaggcagaaccaccagactggcaacccgatatacgggggcggcaggaaaaacattgtcagcaataaaaacatcatcatgcatgcccatactgtcaatctgatactgtaaatgttcccgcagttcaggtgaaccagcccccacaatcaaccaacagaactgtcgtccattcatttttaaatggaacagtaaattcaacataaattcgtgccctttttccgggcgcaacattcctacctgagcaattacggggcatcctcttcgggacgccagccaggaaagaacactcggaggcaaactgtttcgggaatcaacgtataattcctggaaatcaaagccaggaggcacaacagtaacccgagttcgacatccttcctgctccagatgtgtcttcatatttgttccgggaacaatcacctcatcgcaaaaatgatttattgaaaaaaattttgtttttcgtgtcaaatatgtcttttgcctgataattctgaatggatgtttccaggtaaaaaaccgtactaaaccaacaatattactatcatgtccactgtgacaaacgattgcatcgggctgaaaactatgaactattccgagtaatctccatacagtaggaatgtgaagactgtttcgaaataacgcgaatgtgatatcaattccaaacttactggcttcaaaagcaattttgctgttctccctgcagacaagcagaactgaatgccccattttcttcagggccttcatttgagcaacagcctgtaattcctgaccacctatattcggtgatgattccgtaaatagtatattcattattagtcatccggtaatcttggccccttatgaagggccagcaacgatgaaaaaaacggtgttgtataataaaaaagtcgtcttttcagccatacgcaattttcccgttccttggtgcttattcttcctatccgtgtagttcctttagcaggagcattcattcttctttctgttgtatataaataatggaatccaagttcttcagcgatctgaatataatccttgttataataaccttccggccaacacaaatgtttactgcattttcctgtcattttttttaaatattctctcccgctcagtaagtcctgccgaagatgtttacactgttcttctcgtgaagtgaactttttatcccaacgtgtatgagtatgtgtatgaacatgaaattcgaccagaccagattgcaacatttcgttcacttcagaccagcgaagcataacattatcagcattcccggttgctatttgatgttcgcaatcgcgatgagaatattcctttccaggagagtgacgaaccggaccatttccaataaaactggtaattaaaaaaatatgtgccttgagattaaactcgtttaataaaggatatacctgaaaccagttgtcaaggtatccatcatcaaatgtcaacataacgcttttacggggaagttttccgccccgataaaaaaactccagttcatctgatgacagtgttttccagttgttttcagccaaccatttcatttgtttccggaatgtctcgggagaaagtgtaaccagtcctgggcaatggctgacatgatgatacattaataccggaacatgatttgctttaaacaaaatgccccctccgtttaaaatttaaagtttctggcacccagtaagtagagataaaaggaaagcctaataaagttggtgaactttatatactactaaatcaaacatcaacaatttataaacaataatatattatcatatcttttaaaaacggctcactaagaaccttgaggtggcacactaaatttagctacctgaacagaggtgatatgctcacctcagaacaacacaggtgccataatgaaaaaagaaatttcagcgcagagtttaaacgcgaatccgctcaactggtcgttgaccagaaatacaccgtggcagatgcagccagcgctatggatgtcggcctttccacaatgacgcgatgggtgaaacaattacgtgatgagcggcagggaaaaacaccaaaagcctcccccattaccccggaacaaattgaaatccgtgagctcaggaaaaagctacaacgtattgaaatggaaaatgaaatattaaaaaggctaccgcgctcttgatgtcagactccctgaacagttttcgataatcgggaaactcagggcgcgttatcctgtggccactctctgccatgtgttcggggtccatcgcagcagctacaaatactggaaaaaccgtcctgaaaaaccagacggcagacgggctgtattacgcagccaggtacttgaactgcatggcatcagccacggctctgccggagcaagaagcatcgccacaatggcaacccagagaggctaccagatggggcgctggcttgctggcagactcatgaaagagctggggctggtcagttgccagcagccgactcaccggtataagcgtggcggtcatgagcacgttgctatcccgaatcatcttgagcgacagttcgccgtaacggaaccaaatcaggtgtggtgcggtgatgtgacctatatctggacgggtaagcgctgggcgtatctcgccgttgttctcgacctgttcgcaagaaaaccagtgggctgggccatgtcgttctcgccggacagcaggcttaccatgaaagcactggaaatggcatgggaaacccgtggtaagcccgtcggggtgatgttccaagcgatcaaggcaatcattatacgagcaggcagttccggcagttactgtggcgataccggatcaggcagagtatgagtcggcgtggaaactgctgggataacagcccaatggagcgcttcttcaggagtctgaagaacgaatgggtgccagcgacgggctatgtaagcttcagcgatgcagctcacgccataacggactatatcgttggatattacagcgcactaagaccgcacgaatataatggtgggttaccaccaaacgaatcagaaaaccgatactggaaaaactctaacgcggaggccagttttagttgaccacaacagactacctgaagggagccgcggtcgcctagcagttgcagtagcaggagatcatccagccgcagtacaggtcacgatgactctggttaatgataccggctttgaccccgtattttccggctctatcgctgaatcatggcgtcagcagccgtgcacaccatcctattgttgtgactgggaggctgccaccatgcttcgcgctttccctctggcgaaaaagggagaaggacgggcccgtctgccttcactttatgccagcttcggtaagctgggtgagacaccgactcatgaagatatcattgataacaatcgatccatcaactggcctgtataacgtggctgccggtgattaagaaagctgcacctacctaagtagtagcaaacgcacactttttagaaaaatcgatggtcagaaactggattagcaattccgttccagggttgcttttgatttacgttggcgtctgatcattgatttatcctcaaaagcccaacctcattggtaatgaaccagctccgtgaatgtccgctctggcacagagcgaaattttttgatctccccccctgaaatctaaacttagtcatgtcacgtttttgggtttctaaaattttaacttcgcgtttttcgttgccgtaagggttatacagaaatgtccgttaagcagagttcaaaattgattaccgtgatcacgactggtttgaaagccgcgcccaagcctgtacagctctggtttgcgttgattatgaacctgtcagcctaaagcaagcggatggacgatgagtattggtaatctttcagagtccggaaaagttcagccccagtctgaacaggcttgctggcgccagtccagtttcattcagtcgtggtttggttcttacggcctgtgcaatctacctcattaggcacatcggcctgccagataccggctcggggtgtatttccgcttccacgctgaatactgttctcagcaatcctggggtcatcacctcttctggtgtgccttgcgccataacatgtccgtttgccattaccaccagttgatcgcagtaccggctagcctgattaaggtcgtgcagcacagcgaccaccgttttcccctgagtccggagttcgcccatcaaccgcatcaggtccacctggtgattgatatcaagataggtggttggctcatcaagtaatacaacgggcgtattctgggccaggaccatcgccagaaatgcgcgctggcgctgaccgccggaaagctcggttaaccgacgaacggcaagatgattgatccgggtctggttcatggcgacattaactcgtgcattgtcttcagcggagagacgcccccagagtgacagccagggattacgaccatacgaaaccagctcctggactgtgatcccctctggcgttaaatggtgctgaggcagcagcgaaagcctgcgggccaactggcgtgatgagagcatatttatgggattatcgccgagaaatacggtgccagactgcggcattaaaagccgcgaaaaacagtttaacagcgtcgatttcccgcaaccgttaggaccgatcagggcggtgatcttccccgttggcagtgagagtgaaacgtcgttaagtaccttgtctgtcccgtaactgaccgtcagattttcagttcgtaaagtcatttatcgcattctcacaagcaaccagacaaaccacggcgcaccgataatggcggtcagcacgccaaccgggagctccagtgggggatgaataattctcgccagcagatcggcaaccaccaacagcaacgcacctgtcagggccgaaacaggcagcagtctgcggtgacgtccaccggtgatgctacgcatcatatgcggcaccacgagaccaataaagctaatcgggccgcaggcggccacgccggtagatgtcatggcgacagctagtaacaaagcccagaatcgggtatggggcaccgacacaccgagcgtggtggcgcgcgcatcgccgagtgcaaggaggtcgagatcgcggcaaaaactcaggctcagcggcagaaataaaatcatcagcgggatggcaatcttcacaaagctccagtcacggccccataagctgccggtcagccacagcagggcgttgttcacatcctgcgggcgcgagagcatcagataatccgtcaggctggcccagcatgcagaaagcgccacgccggtgagcgccagcttcatcggctggtgggtctttgccagcatcttcagtaatatcaaccccgccatgccgcccgcaaaggccagcagcggcagcaccatcacgggcagtgacggcataagaagtagagcccccacagaggccaggctggcggcatggttaacgccgagaatatccggtgatgccagagggttgcgcacaatcccctgtatcagcacgcccgccacggcgagggctgcaccgacaaacagtgccagcagcaagcgcggcagtcggtactccatcaatacataataatgctcgcgtccggcctgccagtcggtcagcagcgcgcgccacggcacggggatcactcccatatggagtgataacagcgcacagcccgccagggcaagggtgatgaaaataaccagcgcaattttcatcctcgcctcctcacaagccagacaaagcaagggctgccaatcagcgccagcactgcgcctgcgggcagatctccggggaaggccagcgcgcgtgcgagtacatctgccagcagcatcagcgtggcccccagcagcatgctcactggcagtacgttgcgctgatcgaagcctgcccagaagcgcgccagatgtggcaccagcagaccgataaacgccaccggacctgccacgctgacgcacgcaccaaccagaagcagcactaacatattgatgaccaaacgtagcctcgtcaggttcactcccagcgtatgggcggtgctgtcgctgaggttgagcaggttcagttgattcgccagcagtaacacgacagggactgcagtgaccaccaccggcaagagctgccagacatcctgccagcgggcgtgggacactccgcctgccagccagtaaaagatgccgtaagcatgatcttcggccagcagcagggtgatgcgggtaaggcccatacaaaaggccgacagcgcgatacccgcgaggatcagtttgtttctgtcatgggtatgacgaaatccgcctcctgcggtcatgaccagcagccagctcacgccgcccccgcatgccgcgatgaacgacagagaatagcctgcaatcggcgtcggactcagcgcgctggtaagcgccatagccagcgccgcgccgctgttaatgccgagcagtgaaggagaggccattgggttgtgggtcagggtttgcagcagcgtgcccgcgagcgccaggcttgcgccgatcagaacggcgaccaggcttcgtggcaaacgaaggttttgcaccagcgcttctggtagcgttggcgtgtgtccaggcagcagggcgcgggttgcatctgctccggaaacaggaatggccgagtagcaaaacagactcagccagaaaataataataagtgctgcaacgggaagcccccacagcagcaccgggtgttttatcgcggtcatttcacaacggtaagcggctgatggtggaagatttttaccgtgtcagcggcaatacgctctgcagcaaaaataccgcgcatccgcgcccaggtgttactgtcgaccgaagcaacctgttgcttctgcgcggcggttaacatctgccagagcggatcttgttgccagcgtttaacaatgctctcttcgcgatagtgggcaaccagcagccaggcaggattgaccgccagcagttgctccaggccgatggacggcatggacgcacccgccatcgcagcgggaacgttcagccccagagaggccagcacgctgccggtccaggtctcctgagtatgcaggttgaattgctgttcgcgtgatgtgccaaaggccacgcgtgtccctttgggaagctggctggcccactgcgccatcctctctttatgttgttccagacgtgcctgcatctctcgctttttacccaccatttcgccgatgatagccgcagattgcaaattttcagcgtaggtttcgttgcgggacttaagcagcagtaccggcgcgatttgctgcaaggcgatgtaaacccccgcatggcgactgctgtcggcaataatcaggtctggtttcagagcggcaatggcttccaggctcggctgcgcgcgcgttccgacggactgccacggtttcaggtgcgcacgcacttcgggcaggatgcgttttgcatcgttatcgtcggcaataccgatcgggctgacgtccacggcggccagcgcatcggcgaacgagagttccagcaccacaatccgttgtggcgttttttcgagtgtaaacgtgccgtgttcgtcctgaaccatggcggcaaaggcgtggctgatcaccagcagcaggcctgcaaaaagaaaacggataaatgccaacataatcacattccagctaaaagcccggcaagccgggcgttaacacatcagaacttcaacgacccctgcatatacagcgtgcgcggctggcctgcatagatgcctttgttgttgtcgtcataagagcggatgaagtagtcctggtcgaagatgtttttcacaccgaatgccaggttcagatctgccatctgcgggccaaagtcatacgccacgcgtgcgccccagagcatgaagccgggaatgcggccggtactgccgtcggcgctctctttcaccgtattggcgttatccgcaaactggctggactggaaatcgctgttcagattgaacgtccagtttcctggcttgtagtccacgcccagcgtgcctttatgtttcggggagaatggtaccagattgccgtaggtgtcgcctttctcgcggatttccgcgttcacatacgcatagctggcgtagatggaaacgttatcaagcgttggcgttagcgtacccagatcgtaacgtgcctgcgtttccagcccggtatggcgcgttttgccacgtgcagtgacggtgtcgttggtctggttggagtcgtactgattgttaaagttaatcaggaacagccccatttccgccgtcagcgcgccgtcgtcgtagcgggtaccgagttcccaggttcgcgctttttccggttccacattgccgctttgcacagccttgccaatctggctgtactgtacggtgccgaacgagccttcagtgtttgcataaagattccagctgtcagtcaggtgatagagcacgttcaacgccggaagcggtgcgttatagctcacttcttcgtgcgtgcctgtgatggcgttgttctggtatgactcgatatgttcgaaacgcatacccggcgtgatggtccagttgccgatgtcgattttgtcatccagataccaggcgtgcgcctcggtgccggaacgcgtatcgcggtcgtaagggcttgagccggacggcaactgcccgctgctggtggcggtgtagtaacgcatttcatgcgttgattcattcaaatagcgatagcccacgcccacttcgtgcgcggaagggccgatcataaagatctggctgtagcgtggctcaataccgcgcacccagtagttacgcggcgagagggtgatgcgtttgccttgctccaggtagccgctgcgcagggtttgggtgtagaacccctgaatgttgaatttatgctggctgtctggctggaactggtagcccaggctcgccagcttgcgacgaccccagaagcggtcatacgggcgggtggattgccagcgatcggcgtcgtaatccgcgcgagacaggccaccgggcatgtcggcttcaccgtcgtaatattgcagcaggctgttgaaggtgtgcacctcatccggcgcatatttgcttttcagcatcaggtcgtcgatgcgggtggcgctgtgctcgcgccagtcactgccgcgcgtgccggagtagagcagcgcggtgccaaaaccgttgtccgctgtgccgcccaccatcaggttgtgcgtctctttcgggttgttttgtgaagaggttgggctgagctgaccttccacgcccgcctcgataccaaagtcctgcggaatggcacgggtaacaaagttcaccacgccgcccacgctctgcggtccgtaacgcaccgcaccaccaccgcgtaccacgtcaatggcatccatgttgccgagcgaaacgggagccagtgaaagctgcggctgaccgtaaggggcgaaggggacggggatgccgtccatcaggacggtcgagcggctggcgaggcgcgggttcaggccccggatgccaaagttcatcgccaggtcgtggctgccggtgccgttgttttccggcgcgctgacgccagggatgcggttaagtacctcacgcatggtggttgcgccggttttggcgaaatcctcacggcggatcacgtcacgcgcgccagcatgttcaaatacgtcgttttcacgcgcatcacccagccagtcgccgaccacggtcagggcatcttcttttggtgcgggcgcgggctccagcgtccagctgttatttcccagcggttttacctgcagtccgctgccgtccagcagttgttgcaggccgctctcgacgtcgtaatcgccgtgcaggccgttgctctgcttgccgcgcgtcaggctggcgtcaaccgagagggtaaatccgctgtgtgcggcatactgattgagcgctttatcgagcgatcccggtgcgatattaacctgtgcagcaaaagcggaaaacgagagaccggccagcggcagcaggctcaggcgaatggtgttaaccaaaggtgttgttttacgaaaaacgcgtaacggcgtcataccttccccatcatcatttttgttgtgttcagctatgagtcgaacgagaagggtaaaaaggacaatcgaaataagaattattttccttacagtggtgaaatgtttatccagtaccgcgtaatagactgaattttaacgggaagcgtttgcgcgataacgttcaggatcgcatcggtatttttcagcgggaacgtcccgctcaggcgcagcccggcaacggcgggatcgcagcgcagcacgccgttgcggtaacgggttagcgtggctatcacctcacccagcggtttatcgctgaagctcaggatgtccttcgtccagcttgtactctcgtcatccagcggtttcactgcgccaaactcagaggcgctgaactgcaggctttcaccagcgttcacgatgcgtttttgcgcgggggcactggcgagaagcacttccacagcgtgctgctgcacgtcaagctgcgtgaaattatcctgctggcggacggtaaattctgtccctaaagcagtgagctggccctgacgggtcaggacacggaaggggcgttgcagggcatctttcgcggtagtaatggcgatttcaccgtaccagagccggacggtgcgctgatgcgcatcaaaacgcacatccgccgcgctttgggtattcagcgtgagcagggagccatcttccagttgctgacggctgactgtgcctttggcggtgcggtaatctgcccgcagaccttcgccggtttccgactgccagagctgccagcctccgccagcgccgagcaacagcagtaatcctttcatcacgtgacggcgggtgaggcgggtatcgtgcaacgcccggctggcaacgtcgccaggcacaccgccaagctggttgcgcaggttttcaacctgctgccaggcccactggttatcctgatcctgttcataccactgttgccagcgcgcttcctgttgtgggctgacgcgctcgccgcttagcacggcataccagtgggaagctgaacgcagcgcctgacggcgggaatcggttaacaaaggattcataacccatactccagacggaacagcaggcagtgctcgacggctttcgccacgtattttttcacggagctgatggaaacaccgagtttgtgcgcaatctcgctgtatgtcagaccatccagttgcgaaagcagaaacgcttcacgtgttttgccgtttagcccgtccagcatgctgtcgaggagttgtagggtctcgagttggctttcgcgttcctcaggtgaaggcgctcccccctccggcataagcgccagcatctccagatacgctttttccagcgcgtttcggcgaaacaggtccaccatcacgcgtttggcgatagtgcagaggaaggagcgaggatcgcggatcgtcgagagcgtttcgctgaccattacccgcaaaaaagtgtcctgggcaatgtcatctgcatcaaaagcagactggagtttgcgcgtcagccagcttttcaaccagccgtgatgtgtgccataaagcgactcgaacgttaaggaagctgtggtagtggcgcggtcagacatgcggagtgcatcaaaagttaattatcacgtagtcatattaatatgagaatggttatcattacaattggaaataaaattgtttccaatagacatttttaacatgttgtttttctaagtgttataaggtaggtataaaatgggatggagcctctgcttctggcatgtgtcggtcagaatgactcatgatgtggtctgctattattgacatcctcactgccctaaaggatggggatttcggtaatgctgccaacttactgatttagtgtatgatggtgattttaaggtgcttgcgtggcttccatttccatcagatgtccttcctgctccgctactgaaggcgtggtgcgtaacggcaaaagcactgccggacatcagcgctatctctgttctccttgccgtaaaacatggcaactacagttcacttacaccgcctctcagcccggtaagcaccagaaaatcattgatatggccatgaatggcgtcggatgtcgcgccagtgcacgcattatgggcgttggcctcaacacggttttacgtcacttaaaaaactcaggccgcagtcggtaacctcgcgcatacaaccgggcagtgatgtgattgtctgcgctgaaatggacgaacagtggggctacgtcggtgctaaatcacgtcagcgctggctgttttacgcgtatgacaggatacggaggacggttgtggcgcacgtcttcggtgaacgcactctggccacactggagcgtcttctgagcctgctgtcggcctttgaggtcgtggtatggatgacggatggctggccgctgtatgaatcacgcctgaagggaaagctgcacgttatcagcaagcgttacactcagcgcattgagcgacataatctgaatctgagacaacatctggcaaggctgggacggaagttactgtcgttctcaaaatcggtggagttgcatgacaaggtcatcgggcattatctgaacataaaacactatcagtaagttggagtcattacctcctcccgaactcaaagctatcatacagataattactggttaaccctatatagggcattttaaagtgttgtgatcttacccagcaatagtggacacgcggctaagtgagtaaactctcagtcagaggtgactcacaagacaaaacagtttcaaccagtaaaaaaacgtaaacaccattcgcatgaatttcgtagttaagatctgaagcttgcagaatgcatcggtgttactgccggagtccgtgaacttagtctgcatgaatcaccacagctttacatctgtcgcagtaaacagcaaaatcagcaaacttacttaattatatcgagtgcgattacaatcgctggcgatggtacagttggtgtggcggtctcagtccggaacaatttgaaaatcagaatctcacttaaaacggcatccattttacaaaagatggccgtctgtgtatttgtaatgaataccttctacatgtttagagtgcataatccacgacaaggcgatatcctaaaaattagctagcaggcaactttgatggcatagataatgtttttagtaaaaaagagttgactgaatataatacagcctcttcctacataagaaggaatgtgctcacaaaaaaaaccattagtctgcttcctgttcttacaataatcagtattatgtattttatttatatagcaaaatatgcttgttacacctgtcataattaggcatggtaaaattattgattgaaccctgggggagaaagatgcacagtgattattataatatggtttttggtgaaaaaattggccaatattttatatgaagctaactctcaatttttttacgagagaaatgtcatagaagaggcagtcaacgctttattctgtgagcgtgaaataataaacaacaagaacataataaagaagctgatgttctttttgtcagatgttaatcacaccaagaaagatgttgttcagagcgcacttaatattatcattgacattacatcaggtgatatttgagattttacataaaagataatctttcaaggagtcttatctgaaaacgaaatatatagtccctctcgttttgtaatatcgattggctttgttgaatcggttacgtaccccggagccggtcatattttcaggtaatacacacgctttcagacatttcggctttcgtcattttggtatcatgggcatagcttctgctacctgaccatcataatcacgcagcttcagtgaagcagtgaccacctgtttaacccggtgtatcgttatgatcttatccagcaattgaaccgccccgggtttcctggagagtgttttatctgtgaactcaggctgccagatcatcgtttccgatggaagcataataagctttttctgcttctgccggtgggatatggccctgcctttccagcaatcgtcgattgttataccagtccacccacgtgagtgtggtcagctcatcatactgacacgtgcattacccctaccgcgataatgcaaccgtacaatatagggcgtttcctaaacgcagccctcatcactccaatccaacaagacacagcatttttgatcacgaagaaagacaaataatttccgtaaatgtttccgttgttacaaataacaacagtgttttacatttctttggcctcaggcccgcgcatgttgccattcgatgtcattttcctgactcgtttcttctttatggtgtagtgtgatcttcactttatggatgctaacaatatgaaaagaaaaattattcccgtgctaatcggttgtacgctctctttctctgccctggcggcacaacctacggctgagcgctatgtcgtcagttttccagaaggcacgcacgtgaactacgccggcgcatttgccagtgcattcccgaacggccttccggttgggataggttctggcctgctgttcaccggtaaacagggcgatgccctgacattcgcaaccattaccgatcgcggtccgaacgcggattcaccgaaagaggggaaaaacgaaactaaaattttcgttacgccagatttcgcgccgctgctgatgacgattcgtgtacaaaacggcaaagcggaggccatcgatccccgtcctctgcatgacgataaaggcgcgatcaacggtctgccgctggcaagcgacgtgattggctccaccaatgaagtggccttcagcgacacgttacatagactgaagggggataatcgcgggctggatacggaagggatcactccggatggtaaaggaggttactggctgtgcgatgagtatggcccgttcctgattaacatcgacagtaaagggaaaatcctggcaatccacggtccgcaggcggcggaaggggaaaaagcgattgcgggcggtttgccaaatatcctcaaatggcgtcaggcgaaccgcggctttgaaggcctcacccgtatgccggacgggcgtattattgtcgccgtgcaaagtacgctggatatcgacgctaagagcaagaaaaaggcgctgtttacgcgtctggtgagcttcgatccggcaagcggaaaaaccgcgatgtacggttatcctatcgacagcgcggcctacagcaaaaacagcgacgctaaaatcggagacatcgtggcgctcgataaccagcacatcctgctgatcgaacagggaagagataaaaacaacagaatgcgtaacctgatttacgaggtcgatctcaataaggcgagcgacctgtcaggcttcgacaagccgggtgagtatccggagtttgatgatgagaaaaccctgtcacagcgcggcattacccttgcgcagaaaacgcaggttgttgatctgcgctccttgggctggcagcaggagaaggctgaagggttggcgctgatcgacagcaaaacgctggcggtggcgaacgataacgactttggcgtgaaggtggcgatgcaacatccggtcgagggcaagacattcaaggattatcgggtgaacgcggaaggaaagctgacgcttgacgacaagcaggttgaaacgaccctcagagtgaagccactggagaaaccggagtctgacagtgaactgtggattgtgacgctgccggaagcgttgaaataagtttataaggtacggacagcagtatcgcttagtttttcaaattcatgtatgtgaacaatattggggttccggcgtagacccccaatgaaagcgtcaccacgtgaaaacatgcctgcacggtttacacgtcatcccatggtggcagccggttaactttcctgcgccaccagtggaaaaaggccataagcagtccgaacaaaagtaagcgtacagcgagggccgtattgacggggatgtgttattcagctggcagtgctatgcgccacggaagcagttcgctgacccggttgaccggccagtctgctatgacgccaagcacatggcgaaggtagctttctggatccacgtcattcagtttgcacgtcccgatcaggctgtacagtagcgctccccgctcaccaccatggccagagccgaagaacagggtcttcatcttttcacgcaaccagctttccagggatttcaacagcggtttcgtttttcgctgacgttcagcaagccgctgctctgccggcattccccttatatccgcctctatggcgtacaactgaccgatctgctccagggcttcttccgtcagtgctgacgggatgcggacgtgcacatcgtggatctttcggcgggcatgagcccagcaggcagcttccgttatcccaccattgcgatacagctcgttgaacccggcgtacgcatccgcttgcagcacaccgctgaagcaagcaagatgagtctgcggatggatgccttttctgtccgggctgtaagcgaacctcactgcaggtgccaacgctgacccggcattgcggtcatcacgaacatacgcccacaaccgcccggtcttcgtcttcttattacccggcagcagtacctggaccgggrtatcatcggcatggagtttgccgtcagtcatgacatagccatgaagcgcctcttccagcggagacagcagccggcagcatgcatccacccagcccgacagcagtgaacggctcagctccacaccttgccggctgtatatttctgactggcaatacagcggggtgtgctctgcatacttcgaggtcagcacgcgggccagcagccccggtccggcgataccccgctcgatgggccgcgaaggtgcaggtgcctgcacgatggcatcgcactgagtacaggcatgtttttcccgtaccgtccggataacccggaaggcgctacgcatcaactccagctgttcggcggtatcctcgcccagatagctcagtgaaccgccgcagttcgggcagcacggcgccgcaggcaacagtcgcttttcgtcacggggtagtgattcagggaacggcttacgggtgcgggtctgacgcaacggacgctgtactgccgggtcatacaccctaccagtcagcgtatcgctctctttctgaagccggttcagatcggcttccatttgtgcgatacggcgggagactttttcggaacgactgccgaagttcatccggcggagtttatccagctgcgcctgcagatgtctatttcgcgctcccggttgctcagcttttcctgcagggcgtggatcagcgcttcctgttcggccaggcgctgtttcagcaggaagatgtcgtcagaagagatgtcgttcataagcccgtattttaccgggcttattctgtgacaaccaggataaagagatttacagcatggtcagggaggtcagcagccgcttgggctgtcgccagtcgataccttccagcagcatcgccagctgcgcctgcgtaaggaacactttgccatcacgggctgacggccaggcgaagcgcccacgctccagccgtttggtcaggaggcacagtccgtcaccggtggaccacagcagtttaacctgactgccgctgcggccccggaaaatgaaaacatggccggacatgggatcgtctttcagcgccgtttgtactttcgcagccaggccgttgaagccatttctcatatcggtgataccggcaaccagccaaattttgctcccggaaggtaacrggatcatcgcttcagttcctgtatcagcagagtcaggagcttttcgctgacattgccattgaagcggagcgtcccgtgccggaacgttacctcacagctgatactggagggtttcccgggtcctctgcgagcgattctggctgttcggcagctgcatcgagagtcacaggaagtagctgggggctctctgaagaaggtaatagcagctttccctcgcgccattgttgtcgccatttgaacaacagattggcgttaatgccattttcaagagcaagttttgagatggatatcccgggttcacaggaggcagcaacgagctgctgtttaaattcgggaggataattagggcagccttttcacctgccgggagtcacatttttctgcatatctgaggaaggtgcgaataagcggggaaattcttctcggctgactcagtcatttcatttcttcatgtttgagtcgattttttctcccgtaaatgccttgaatcagcctatttagaccgtttcttcgccatttaaggcgttatccccagtttttagtgagatctctcccactgacgtatcatttggtccgcccgaaacaggttggccagcgtgaataacatcgccagttggttatcgtttttcagcaaccccttgtatctggctttcacgaagccgaactgtcgcttgatgatgcgaaatgggtgctccaccttggcccggatgctggctttcatgtattcgatgttgatggccgttttgttcttgcgtggatgctgtttcaaggttcttaccttgccggggcgctcggcgatcagccagtccacatccacctcggccagctcctcgcgctgtggcgccccttggtagccggcatcggctgagacaaattgctcctctccatgcagcagattacccagctgattgaggtcatgctcgttggccgcggtggtgactaggctgtgggtcaggccactcttggcatcgacaccaatgtgggccttcatgccaaagtgccactgattgcctttcttggtctgatgcatctccggatcgcgttgctgctctttgttcttggtcgagctgggtgcctcaatgatggtggcatcgaccaaggtgccttgagtcatcatgacgcctgcttcggccagccagcgactgatggtcttgaacaattggcgggccagttgatgctgctccagcaggtggcggaaattcatgatggtggtgcggtccggcaaggcgctatccagggataaccgggcaaacagacgcatggaggcgatttcgtacagagcatcttccatcgcgccatcgctcaggttgtaccaatgctgcatgcagtgaatgcgtagcatggtttccagcggataaggtcgccggccattaccagccttggggtaaaacggctcgatgacttccaccatgttttgccatggcagaatctgctccatgcgggacaagaaaatctcttttctggtctgacggcgcttactgctgaattcactgtcggcgaaggtaagttgatgactcatgatgaaccctgttccatggctccagatgacaaacatgatctcatatcagggacttgttcgcaccttccctaatgcaggtacgcaatattacctgaagctaaaacctgcacgttagccctttgtaggccagataagacgcgtcagcgtcgcatctggcataaacaaagcgcactttaccgacaatccgaacagagcctgccaatggcaggctcaggtgctcttttacgctaccatgctaataatcagcacaataatcagcccaaccacggagttgaccagctccagcagaccccaggttttcaacgtgtcttttactgacaggtcaaagtaacctttgaacaaccagaatgaggcatcgttaatgtgggtgagggtgttggaacccgcagccgtcgccagtaccagcagcgccggattcacgccaaccagctgaccagttgctggatcaaggattgctgcactgataatcccggcggcggtcatcgctgaaaccacaccctgacccgtcgccagacgaatcagtacggtgatcagccatgccatgatgtagggagagatattgccgtgggacatcagcatgccgatggtgtcgccgatgccggtgtcgatgatggtctgcttcagcacgccacctgcaccgatgatcagaatcaccattgcaatgcttttcaccgcgctttcaaaagcgttcattacccactgcatatcgtgcccgcgcgcggtgccaaagagtacgaatgcaaccaccatcgcaataaacattgcaatcggcgaggaaccgataaagttaaccacttcccacgcaggggtatcttttaccagccagatattggcgatggtggtagagatcataatgatcgccgggatcaacggcaccagaatcgaaacgccgaaagagggcagattattcatatctaccggttgatctgctttcaggaatgatggcgttgggcgctcaagattgccgaggaacttcggcaggatcagacctgcgcagatgacacttgggatcgtcaccagtacgccatagatataaaccatccccatatccgcgccataagcattcaccagcgccaccggacccggctgcggtgggaacagtgaatgtgcggtagtggcagctgctactgccgggatcgccagtttcaggaacggaattttagcttcggcggcaataacaataaccagcggtgctaacatgataaaggccacttcatagaacatcgccagaccgaaaatcaggccgatgataatcaccgacagctgtacataacgcagaccgagacgtgccagcagcgtatgcgctatctggtgagccgcgccggagtcgaccatcaatttaccgatgaccgcaccgaacaccacgatgatagccagttcccccagcgtgttgccgaagcccgctttcatggtgtgcagcagcgacatcaaatccatgcccgccagcatcccgacggacagcgccgccaccaacaaggccaccattgaattgattttgaacttcaaattcagtaccagcatcagaccaatgccgaataccacccagataatgttaagcacatgcataacgttttaccttacctggttgaaccgttgttattttgggcgacatgttatgtaaattggtcaaccattgttgcgatgaatgtcacatcctctgatcaataaccatcgattaccttttgctgcaatttgcagcaacaaccaggagagtgaaattcttgtgatgtggttaaccaatttcagaattcgggttgacatgtcttaccaaaaggtagaacttatacgccatctcatccgatgcaacgccacggctgcggtctggttgttcatccggatacctaaacaactccagggttccgcgtctctttgctgtggaacccactatgtgaaagaggaaaaatcatggaacagacctggcgctggtacggcccaaacgatccggtttctttagctgatgtccgtcaggcgggcgcgactggcgtggttaccgctttgcaccatatcccgaacggtgaagtatggtccgtagaagagatcctcaaacgcaaggctatcgttgaagatgcaggcctggtgtggtctgtcgtagaaagcgtgccaattcacgaagatatcaaaacccacactggcaactatgagcagtggatcgctaactatcagcagactctgcgcaacctggcgcagtgcggtattcgcaccgtgtgctacaacttcatgccggtgctcgactggacccgtactgacctcgaatacgtgctgccagacggctccaaagctctgcgcttcgaccagatcgaattcgctgcattcgaaatgcatatcctgaaacgcccaggtgcggaagcggattacaccgaagaagaaattgctcaggcagctgaacgcttcgccactatgagcgacgaagacaaagcgcgtctgacccgtaacatcattgccggtctgccgggcgcggaagaagggtacaccctcgaccagttccgtaagcacctggagctgtacaaagatatcgacaaagccaaactgcgcgaaaactttgccgtcttcctgaaggcgattattccggttgccgaagaagttggcgtgcgtatggctgttcacccggacgatccgccgcgcccaatcctcggcctgccgcgcattgtttctaccattgaagatatgcagtggatggttgataccgtaaatagcatggcgaacggtttcaccatgtgcaccggttcctacggcgtgcgtgctgacaacgatctggttgatatgatcaagcagttcggtccgcgtatttacttcacccatctgcgctccaccatgcgtgaagataacccgaaaaccttccacgaagcggcgcacctgaacggtgacgttgatatgtacgaagtggtgaaagcgattgttgaagaagaacaccgtcgtaaagcggaaggcaaagaagacctgatcccgatgcgtccggaccacggtcatcagatgctggacgacctgaagaagaaaaccaacccaggttactccgcaattggtcgtctgaaaggcctggccgaagttcgcggtgtcgaactggcgatccagcgcgctttctttagccgttaatatccaccggcatggctgcgcgccgtgccggttccttcttccttgccgtcactctctgaagacggattctggagtttacgatgactactattgttgacagcaatctgccggttgcccgcccgtcatgggatcattctcgtctggaatcacgcattgtgcatctcggttgcggggcgtttcaccgtgcgcaccaggcgctgtacacccatcatctgctggaaagcaccgacagcgactggggtatctgcgaagttaacctgatgccaggcaacgaccgcgtgctgatcgaaaacctgaaaaaacagcaactgctgtacaccgtggcggaaaaaggcgcggaaagcaccgagctgaaaattatcggttcgatgaaagaagcgctgcacccggaaatcgacggctgcgaaggtattctcaacgcgatggcgcgtccgcaaacggcgattgtctctctgacggtcacggaaaaaggctactgcgctgatgcggcaagcggtcaactggatctcaataacccgctgatcaagcacgatctggaaaacccgactgcgccgaagtccgcgattggttacatcgtcgaagccttgcgtctgcgtcgtgaaaaagggctgaaagcatttacggtgatgtcctgcgataacgtgcgtgaaaacggtcatgtggcgaaggtcgcggtactggggctggctcaggcgcgtgacccgcagctagcggcatggattgaagagaacgtcaccttcccgtgcaccatggttgaccgcatcgttccggcggcgacgccagaaaccttacaggaaattgctgaccagctgggcgtttacgacccgtgcgccattgcctgcgaaccgttccgtcagtgggtgattgaagataatttcgttaatggtcgcccggactgggataaagtgggcgcacagttcgttgcagacgttgtgccgttcgaaatgatgaagctgcgtatgctgaacggtagccactctttcctggcgtacctcggttacctcggcggctatgaaactattgccgacaccatgactaacccggattatcgcaaagcggcctttgccctgatgatgcaggaacaagcgccaacgctgtcgatgccggaaggtacggacctgaacgcctatgcgacgctgctgatcgagcgtttcagcaacccgtctctgcgtcaccgtacctggcagattgcgatggacggcagccagaagttaccgcagcgtctgctggacccggtgcgtctgcacctgcaaaacggcggcagctggcgtcacctggcgctgggcgtggctggctggatgcgttacacccagggcgtggatgagcagggtaatgccattgacgtggtcgaccccatgctggccgagttccagaagattaacgcgcagtatcagggcgcagaccgcgtgaaagcgctgctaggcctgagcggtatttttgccgatgatctgccgcagaatgccgactttgttggcgcggtgacggcggcatatcagcagctgtgcgaacgcggtgcgcgcgagtgtgtggctgcgctgtaactaactgattaccctacagacttactggtcaatcaaactgatatttggttgaccagttttcgtttttttgcccacctgtacgtgccaacttccagtgctaatggtatagtttgagattaacaggggccgtaaaattgcccgttgtaggccggataaggcgttcacgccgcatccggcaaaaatttgattaaccgcacctaacggacacaacaccatgaaatctgccacctctgcgcaaagaccttaccaggaagtcggggcgatgatccgcgatctgatcataaagacgccgtacaatcctggcgaacggctgccgccggagcgtgaaattgcagaaatgcttgatgtcacgcggacggtggtacgtgaagcgctgatcatgctggagatcaaagggctggtggaagtgcgccggggtgccggtatctatgttcttgatagctcaggcagccacaacacagacagttcggatgccaacgtctgtaatgatgcgggtccttttgagctgttacaggcgcgtcagttactggaaagtaacatcgcggaatttgccgctttgcaggctacccgcgaagatatcgtcaaaatgcgtcaggcattgcaactggaagagcgtgaactggcttccagcgcgccgggtagcagcgaaagcggtgatatgcagttccatctcgccattgccgaagcaacgcataacagcatgctggtggagttattccgtcagtcctggcagtggcgggaaaacaatccaatgtggatccagttgcacagccatctggatgacagcctgtatcgcaaagagtggttgggcgatcacaaacagatcctcgccgcgttaatcaaaaaagatgcccgagcggcgaagctggcaatgtggcagcatctggaaaacgttaagcaacgtctgctggaattctcgaacgttgacgatatttattttgacggctatctgtttgattcatggccgctggataaagtcgacgtctgacttattataataagcgcaagggtaaacgttccttgcgctttcttaaattaagaagtcgcaatgagtattgctttgtaaattgcagggtattgtttaaatatctgtataacctgaatattagtactcattcttctcagtggctatttaccaatataattccattcaccattttttaattcaaacagttctggaagagatgacggttgcagagtcatgcgtttgagtggcgcatcttcatcaccggggataactttatatcccatttttgcatggatctccgcggtaccaggataggcttctataccaatgattgggtcatttcccatctcaatattagcattaagtaatgcggcaagggcgaatccggaagaatttgctacccctgagacagttattatctgatcaatatagatatcaattcttggctgctcattggtccatctttttgcctgagaaactggaagggttgaaatatatcctatcgtggttccggcgtaacctggaacattgcaaccagggcctaatgttatttcatgaactgtatagttctcaacaggatcgaaagggctcttcataaataaatttagccgtaaaccttctgctaattctgtagcagcatgcgcctttttacatatgccaccatatatttcgtctaaagctgaggtgattttcaagtttcgatagagcatacgtcctgttgttgtaataccatcggattctctgcatgcttctgtcacataattaaatggccaggactctttactaatatcaagttttctaatttcgacaacgctttttccatcgtaattatggttattgccacgagcaagaggcagaagatagatattttccgtatccaggcgtgcacgttcatatttacgtgttaactcactgtcgacttttggatgatgaaggaagtgattatctgtaataatttggctctgaagggtattgcttaatggcatagacataatagttaccttttatgagtatttcactgatgtttagaaaaatagataaatttttctgtagtaaaatgagaagtaaacaaatgacatgcatgtttctgttgtagtgatatcaactctacacggtgatattaaagggtaggaaacactctaaagtatcaaaaaacgctcatttgaaattattttcatgcaatttaaaagcatatcttattactaattggaatttgatgttgctatattgatgtctatattaataatgcctgtgaatggtatttttgatgtatttgatatgttatcaatttatattatttacaaactaattgtttcaaataatacatggctgattatgcggaaataaataatttcacaccggaattaagtagcggtggtgacaagtattttcatctacgtaactattcggaatattcagaatatactagcggtttttttttgagtttgatgatttttatcaaatcatgacttttttcctgaaaagtcagtagatattcataggcaagtaaggttttatactttgctgacaggattcaggcctgtctcagactgacatggatgtaatgaacaaaagggaatggctatggaaaatgagcatcaatacagtggtgcccggtgttcagggcaagccgcatatgttgctaaacgtcaggagtgcgcaaaatgatgcgccaatcacgtcaggctgttttacctgaaatttcaggcaataaaacgtcatcgctgcgtaaatcaatatgtagcgatctcctcactctttttaattctcctcattcggcattaccgtcattacttgtttcaggcatgcccgagtggcaagtgcataaccagagcgacaaacatctccagagctggtattgccgtcagctgcgttctgcactgttatttcatgagccacggattgcggcgttgcaggtcaatctgaaagaagcgtacagccacacgctggcgatcagccttgagataatgctgtaccacgacgatgaaccgctaacgtttgatctggtctgggataatggcggttggcgtagtgcgacgctcgagaatgtcagctaagtacaatctccagctcgcgcagttcacgccagaagcgttcggcaactggattcatgcgggtattcattcggtatgcataggcctgaatcgggatcaccagttcgtcccgattcagtacaacgagcttcccgctgcgaatttcttgttggatggcgtactccggcagccaggcaatcccacagccgtcgagggcaacctgctttaaaagctcgctcatcgaagagacaaaaaaggtgctgaaacttaactcactgtggcgcgtcagggtgcgattaatcaatcgccccatgtaggagttgcggctgtaattcagtaacggaaagtgtggctgcgcgaggttaaaaagtgcttctccgtgttcgtcactggcgcagacagggaacaattgagattcaaataagcgaatgtggtcaaacggcgcttccagcaaatcttcgtcgtgaaaggaaaaaatacagtcactttgcccttcacgcagtttatcgaccgcttcatcgacatcaatagcttcaattgcccaggtaaagagcggcggcatctggctgataatggacggtaacagcccgagggaaagagagtgtgcagcggctatcttgattttacgttgcgcgtaatcgctgccgccacgcagctctgccagattgctctctaactgttgcaacagatggcggatctgcgaatggaagattttcccttgttctgagagttgcagcggcgttacctggcggttaaacaattcaacaccaatcgcctgttccagcgcacggatgcggcggctgaatgccggttgcgagacgttgcgactgactgccgcctgggaaaaattgcggcatttttccagggtcagaaaatcataaagccatttggtttcaatattatgcaaaatcgcaccacagtcatccattacgttttactctgtcagccgcccttgcgggcattctacgtccattcgggcggctgacaaccgtttaagccgtttcaaacgttcctttcacgcaggctttgccgtctttgaccatcagtttgccgcgagcgtatacctgctcaatgcgcagttctggcgtcatgaccagcaagtcagcatcattgcctggcagaatttcgcctttcccggtcaggttaaggaaaccggctacgctactggtgagcgggcgcagggcatcgctgatactgaaatcatagtctttgaccagcacctgcacggtttccagcaacgtttcaaaaccggcaacaccgatatgggttaaattcccttcgtcatcgaagaacggctggctaccgttgccgtcggagctgagggtgacgcgtgccagcggaatacccgcctgaacggcgcgggcaataccttcggcaggggcgaccggttcgtcaatgctgctggtgatatcgatagtgccgcctttgcgcgcgaactccagcgcctgctcaaacaacggaacgttgcggttaacgtgggtcggcagcaacttgctgatcggcacatcgcagttttccagcaggtcatagacaggctgtaacgcctttttgctgtcgcccatgtggaacacggtgacgccaggtttaccgccgagcaaaccgccaacgcgggattccgccgccatattagccaggtgataaacgtccggtgcggcagaacggtgatcagagatggcgcatttcacgccaatcacacgatcgataatcgccacgtctttttccacggaacctgtaatggtgcgggaagggacatgataagcgccggtcagcatccaggcgctgatgccttcttcattgagcgcacgggtcttggcgagcagggattccgggtggcgagagatagagtcggtgcccagcagaccaaccactgacgtgacgcccgcttccgtcaggcgacttagcgccacttctggcgtgcgcgtcgtaggacctgcttcaccgccaccaccaatcaaatggacgtgttgatcaataaaacctgggcagaggatctgcccgctgagatcgacaaccgtgcagtccggtacaatgtcagaagggatattgctggcaacggcgataattttgccgttagcgacgaggacatcgcaaattccccgatcttccggcgcatacaaatgcgctccctgcagcagggtaaaaccggctgcggtataatcaatcatggtaactccttgttaaacaataagctgcataacccagatcgacagcaatgcgttaataacgcagaccgtaatgatatgcgggtaatatttggcattcacttcggctgtccccaggcagcgaccgacattttgcaccgggttgcccattaaatacatcgcgggtagtaaaacggtgacatcgtggccggttaaagcgccagcggtcgccagactggcggcaacaccgactgcgccgcccatactcatcaatgcggctaaaaggacggttgccgcttcaccaggcaatccccacagcgccattacgggttcacagatatgccccacccagtcgagcaggccggtaattttcagcgcctgaatgatgacaaacgccatcaccacgtttggcagcaggttggtcgtggcgatagtaaagccacggcgcgcgccatcgataaacatatccatgacgtttttgcggacctgagttgtcatgcttgcgctccttgcgttgggttgcgacgttcttcgaagttaagccagacgcgcaaaatgttggctccgacaaatttaaacaccaggatgacggctaaaggtacgattacggacgtgcccagaaaggcaaacaccgcgacgccggaagagaagtagttggtgatgatggcgctaccgctggtttgatatgcggcgaaaatcactttatcgcgttcggtaatttcaccttcctgcgccagctctttggtcataccggcggcggcatcagtgttttgcaagttagcgatcagcgccagcgagcagatccctggaatgcccaacaacggttttagcacaggtgtcattaactgctgcgcggcgcgtaatccaccaagaccatcggtaattgaaataatccccagagagagaatgactgacggtgccagttccagcgcaaagagaaagccatctttagcccccgcgccacccgccccgcgaaatgaggtggtggctccgttcgcaccaggcagttgcccaaacgatccgttcagcacggaaaaatcaaaaacgcgccaccagctgtctgttccggaaaaaacaccggaaaaaaagattatggtgagaaaaaaagccagataccctttaatgcccactttttctgtcgccagctccccggctacagcatccccttgttgtgtcataacaatccccattgtttttttgtgtttgtgtgttgcttgagccaggaaaattcctggagctgaaaaaccttatcagccatgtgggtatggggaaaatgcaagtatgtttctggctatgcgttttttgcatagcggaaaaattacgctgtgtggaaaaggctctgcgcaggattgagttgcagaaaattcataaacccagtgacaatgacatcagtaaataaaagcagaaaatccagggacgaaaacgagatggcaaagtacaacgaaaaagagctggcggatacgagcaagtttttaagttttgtcctccgacacaaaccggaggcgattggtatcgtacttgaccgtgaaggatgggcggatatcgataagctcatactttgtgcccaaaaagcgggcaagcgattaacccgtacattgctggataccgtggtcgccaccagtgataaaaagcgttttagttattccagtgatggtaggtgcatccgcgcggttcaggggcatttgacttcgcaggtcgctatttcctttgccgaaaaaacaccgccacagtttctttaccacggtacggcaagccgtttccttgacgagataaaaaaacaggggctgattgcaggtgagcgtcactacgtacatctctctgctgatgaagcaacggcacgcaaagtgggagcaagacacggatcgccggttatcttaaccgtcaaagcacaggaaatggcgaaacgaggcatccctttctggcaaacggaaaacggggtctggctgacatcaacggttgcggtcgaatttcttgagtggtaagggaaacactcctcatgaagtgaccacttgcagcttaaataattgtactgtgctgataagcgcagcaataaacaacgccgccgcgccgcagagagtggcgccggcaagcgccgatgttccattgccgagcatactggtcagcgccgggccgaggatttgtccaatgccgtaaatgagcgtcacaaagcctaaaagattgagatttcccggaacgctcagttggcgggcgatagtcatcaccagagatgtcgtgcccataaaggtaccgccaaaaccgatactactaatgataagcaagagaggagagtcgctggcgagagtaagcagcacactgatagcctgcaccagcaaattcgccgtcaggcaaggcaaagccccccaacgttttgctgcccatagccagccaaagcagcctggcacaattgataagccgactaacgtccagagatgggcggttaacaatggtgagcctgcatctttcgccatgagcggcaggtaagtcgcgacgatgatataaccaaatcccgccaggccgtacagaatagccagtaaccaccagctcattatctgttgctccgtttttgccaatggcattggtgcgatggcgtgttttttcgagggcattaaaagcgtaagtgcaatcagcatcatgccagaaagcgccccggcgccttgccataacgtttgcgaggataaggcaaaatgcaggcctgccagaacatattcgttgcccagtgcaatgccaatgccaacgccagaaaacaaagctgccagcacaaaaggatggcgcgtgtgctgcataatcagcgtcgaaccaaaaatcagcataccggcgctggcgacacccgccaggaagcgaatcaataacaccagaataaatggcggcaaccatgccattgcgaggatcaacaacccgctcgccagggcagaaaccaacagaaatgggcgcaggcgcgacggctggtgaaatgcgccaaacgaaaatagcagactgccagccagataccccgcatagttgccgctggcaatccacgagagctggctaaatgaaaacgccccttccgccatcatgacgggcaacataggcgtataaaggaagcgacctaatcccatacctaaggtcagaaccagcatcccgaaaagcgcggtgctgaaagaaaagcgttctacgggatgcgaggacgaaggcatgtttaaccttgtatgtcatttttgttgttaacaagttaataacaaaaaggtgaaatatgccagcctgttaatgcgatgatttaggggtaaagcgataaaaacgatttggttcgctaacgatataaatattaccagaggcatccatcgcaatcccttcggcctgtttgatgttatgcgacaaacctcgactacctttggttagtgatatttcaccgataacctcgccaaccagggttacttcctggagtgcgcgagattcatgagacagcaccagaagcgtatttttttgctggttaaattctgcgccggacacatcatctaaagtaaattgccgttgtagtgcctcgtctttgctgatgtgtaattcattgctacttaacagcccgttaactttgtagacctcaatcggatttttctctttaaaaaaccagaaagtgtgatcctggcgagaataagccaacccttcaaaaccgcaattggttggggagtcttgcagcgggatttttatttttttgaggatttttacttccgagtttggggtcagtgaaatcacataaatggcgtaatcgcgctcatcgctaatgacaaactgattatcgccaatgtattcgatcgtctcgagatccttaacaaaatccagaggaattgtgcggataaaatcaccattggtggtcatttcaacaatggcggcaggtttgttgatagtgctaaaaagagtattgctttgtgccgaccaggtcagcgaagagatattattcgttatgcctgcaatttctttgccgtcaatggtggcgtggtaattctgaaatgatgctgcatgattgcttttacgggcgcaagattgcacgaagaaagtacacactgccacaatggcaaaaagaatcacaataacggagatgcgtttacttaacgaaatactttttgtcacggtaatccctttaaggcaaatcaataagatatcgagaagtatacgtagcgaccttaatgaatccttaacgcggagaaacccggtaatgtgcaatgcagcgccagacaccatcctgctgacaataaattgactcagtcagcccagggatcacccattgtatttcctcgccggggggacaggtcagccaaatgcataacccgcagccgccgcgtaaatcacggggaatatcgctgacgcgaaaagtcatgcccgctgcctgcaacgctttgcgggtttgtatgacgccgactgtggagtgaaataaaaataaaaactctttcatcggcgtgtcctcactcgttgaccaattaccgccgcgccaattgcgccagcaaattgcgcatcaggatgggtatttaccggcattcccagatgagattccagcatccgggcaaacgtctggcaatgactaacgccaccagtaaacagaatcggcgcttcacaggagagacgagcaatgaaattggcactcctccgcgccatcgcgttaatcactccggcgagaatcgcttctggcgcgacgcccgctgagcgcaggctgatcgcttctgattcagcaaacactgtgcacatactcgtgatggcgtgcggcgtgacattttcggtaatgctgtcgagttgctcgacgctggtgccaagcgtgcgcgagatcacctccaggaaacgcccggtgcccgccgcgcatttgtcattcatcaggaaatcgcacaggttaccgtcatcatcaagctgaatcactttgctgtcctgaccaccgatgtcgattaccgcgcgcgttgctggcgcaagaaaccgtgcgcccagcccatgacaggagatttccgtcacttgtttatcggcaaaatccaccagttgccgtccatagccggtgagcgtcagaaacggcgttgtctctaacccttcgcgcagagtttcccaggcttcagtaattgctgttgccggacgaaagggtgttggaacgaggaaacggcgcgtaatcacgccgtctgccagtaagatccctttggtggcggtagaaccagaatcaatgccaatcgaatatgtcactgccactccttacagcatctcaataaaggccgcgacacgggtactgagctgcccgacatctgaggtggagtagtctgtttcaatagcgatataaggaatgttgtgctgctgacgcacatgacgtttaatcgccagcgattccaccgcgtaggtatggcacgcctgcaaaatcacatcaactacgccatcgacctgatattcttctaccatctggctgagcatttgcaggcgctgatcgttcggcgaaacacaggagcagccaatcgccagatatttatccgccagtgcgtcgtagacatcgcccgtttctgccacgcattgctcggtcgctttcgccccggtgcagttttcataaccgacaacccagccgccattctcttcaatcgcgcgcaccactttttctgctgcgccgccaatcgggcagccggtgattaaaatgcgtggacgcagggccagccgctggccttcttcccactgctgacgaacgcgggctgtcatcgcgtccagttcattgatcaacgcctctttatcgaaccggaaggttgcgccgtagaccactttcagaatgtcgctgccgctaagcgccggaggatttaactgcccaagatgataaaaattagccagtgcgcgacgttcgcggtttttcagcgcaatggcatcgcgcagagcatcttcgctaatctcgtgcccaaaacgttcttctaccgttttttgcaagcgcagcatctcggctttccataacgcacgcgaggcatcgtccttaacgctgttcggcaactgtatcacatgaacgggcttaaactccgccatgtattcatacattttctttttgccgtcgcaggtggtttcaccgaccaccagatccgaaaagtagaagtaggggcatttatcggttttgccaaagccgtagctgcttttaatcagcgggcagaggttgcgcggcagatctttctccgcttcttcaatggtttcatcagaggtagaacagagcgaaaccacaaccgcaccggctgccatcgggatctcttgcggcataaaggtgcagtaagtgccaaccagcggaatgccgcgctccttgagatccatgacggtgagaaagcctttctggcgagcttcagagaactgatcgaaaatggcgggtagatcggtgataagtgacatgattttccttccccgtaccacgggagataatgaaaagaggccacattattaccattcttttagtgtggtttatttgatctctctcgcggttagccacttagtttttcatggatttctaaaaattgctgagggggaacaaggccgggagctgcgacaacaaatataaaattagcccaatacaaccgccaaccagcgtaccgttgacacggataaactgcagatctttgccgatatttaactcgatttgccgcgacatatcccgagcatcccagctttttactgtatcgctgatgtggcgcgtcaggaatgcggaaaactcaggcgcgacgcggtgcgcggcttgttccaggtgaccatttaacgatgcccgcaaggcatcatcggcaattaacgtttcgccaaaccattgacccgcccgcgcgatacgttctttcacacgagaatcttcactgttgatatccgctttcagccattcccgtaaatccccccacaattcactgagatagcggttaaaagcttcatcttctttcagataactttttacggcatcggctcgcgctgccatttccggatcgtttttcaacttgtcgatcagggcaaaagtggcgcgatcaaacgcatgacggatctgatgcgcacgatcacggctgatatcatcaagcaaagaattcaccgcgtcagaaaccaactccgcgctatgttcgcccaaccattcggtggggagaattttggctttcagtggatgctcactctccagccagcgaacaatctgctgggcaataaacttgcgcgatttatcgcgctggagaagggcgatcaactgtgcgatcagcgtatcgagcagcacctgatgacgatcgtttttggtcatactctccagcatcaacgcactggttccggaaagatcgaccttatcaatcgcccgatggaccgcgcgcttaagcaggcgctgaatacgtgcatcatcggtcagttcaagaaaaccgctcatgatctgcaacagatgctgaccaacgcggcgggcgttctccggctgactaaaccagttgccaatcaacaacgccggttcgtgacgtcgaatcaatgccaccagcgactgggtatcgagaaatttttcctgcacgaactgaccgagattttcgccaatccggtctttattacgcgggataatcgccgtatgacgagaaatgatcggaatcggcacgcggcgaaacagcgccaccaccgcaaaccagtccgccagcgcgccgaccatcgccgcttcagcaatcgccttcacgccgctcacccaaaaattgggcggcaaaaacagcgtaactacaaaggtagcagcggcgataagcagtaaagagagcgccaacattttggcgcgtctgagttcaatgagtttattcataacgttaagaatagagcctgacggcaggatcgcgcaaaaatcaccgctcctccgccagctcggcagcctgatgttggcgcacgcgattgagcaatcccgccagggtgaaaacgacgataacgcccgccacgacggctaacagatgaaacggcaagcgaccgccgttaaaccacagccagcggccgatttcgaccgagacagacatcaccatcaggatcaccatattcagcgatgcggagacggtccctttcggtaagttattggaaaacagcgtaaagcggaataaggtcgggaagatcaaaccaatcccgaaagcatacaaactggtgcccagcaccgaccacagccatacgtgcggtgacagcagattgccgataatcaacagcgcgaggccaaccagttgaatgggtacggcacgccagataaagcgcggttcggtcggatctttaacgaaacgcgccacgatggcattcgcgacaatcaccgcgccgaacaccggaacctgtgtccaggcgaactgcgaggtcgttaagccgcctgcgtcaatcaggatcaccggcgagacagccacccaactcatcattgggatatagcttaaagagatggttgctgcaccaaagaggaactgccgattgcaaaagacattacgaaaatcgcgcaagacgcttttggcgctaaatgaaaccgcgccgcgcttcaccgtctctggcatcgccagcagtaagccaacaaatgagataaaacccataatcgcaatgatggcaaaaaggactttccagtgtacaaagtgcatcagagctgcgccggaaagcgggccgataatcggcgcaatcagtacgatggaggtgataatcgccatcaacctgatcccttttgtctggccgaacgcctcctgcaccgtgacataaccaacggtggcaataaaacagatactggtgccctgaattgcacgcgcgataagaaactgtgtcatagacgttgtgaacattgtcgcagcgcaggcaagggtaaatattagcgccccggtaatcagcaccggcctgcggccaatcctgtcggaaagcggccccagcagccactgtaacgccataccgcccgcgagatagagactgacggctgccggggccagactgacatcggcattaaaatcacggaccacattaatgatccccggctgaatcaagtccgtcgacaggtacgcggcaaaatcatacaaaatcaacgccatcgggaaaaacagcgtggcggcatgcgttgcttttaatcccgccattaagcctttaccaaaatggttattcatcgttcaccccattcgctatatattgtcatatatagcgatattttaggcaaagaacgacttttgcgcacgctattttttcatgcttgtttaagacgtaatcccgtaagagataaacctatcaggagagatatttatcgaaccatttcagtgtcctttgccaggcaagatcggcggcagatttgtcataacggggcgtggaatcattatggaatccgggtaatgctgccaacttactgatttagtgtatgatggtgattttaaggtgcttgcgtggcttccatttccatcagatgtccttcctgctccgctactgaaggcgtggtgcgtaacggcaaaagcactgccggacatcagcgctatctctgctctccttgccgtaaaacatggcaactacagttcacttacaccgcctctcagcccggtacgcaccagaaaatcattgatatggccatgaatggcgtcggatgtcgcgccagtgcacgcattatgggcgttggcctcaacacggttttacgtcacttaaaaaactcaggccgcagtcggtaacctcgcgcatacaaccgggcagtgatgtgattgtctgcgctgaaatggacgaacagtggggctacgtcggtgctaaatcacgtcagcgctggctgttttacgcgtatgacaggatacggaggacggttgtggcgcacgtcttcggtgaacgcactctggccacactggaacgtcttctgagcctgctgtcggcctttgaggtcgtggtatagatgacggatggctggccgctgtatgaatcacgcctgaagggaaagctgcacgttatcagcaagcgttacactcagcgcattgagcgacataatctgaatctgagacaacatctggcaaggctgggacggaagtcactgtcgttctcaaaatcggtggagctgcatgacaaggtcatcgggcattatctgaacataaaacactatcagtaagttggagtcattacccgacagcgaggtgtttagtgtgccatgtcaggcgagaaattctattggatgaatcaagtccaacttactcattgtcaatttcatggttgattattcgaaacgtgatgctatttccaacatcaacgctataattgcagaataattgtagatacatttttgtatatacaattagggatggcaattatgccaatggagtttgaatgggatgaaaacaaggccaaaagtaatcgggtgaaacatggcatccgctttgaagatgcggtgttattgtttgatgatccacaacatttgtcacagcaagaacgcatagaaaacggtgagtatcgctggcagacaatcggcctggtttacggcatcgtggttattctggttgcgcataccatccgtttcgaaagcggaaatgaaattattcgaatcatcagtgcacgaaaaacagatcgtaaagagaggaatcgctatgagcatggttaaacataaacgagggacctcctctacactcgatgtgcagcatgaggccgaactgaaggcgctggcgaataaatccgacgaagatattgattacagtgatatcccaccttccagcgatgagcaatggtctaacgccgaacgcggtaagttttatcggccattgaaaactcaggcttcggtgcgtattgatgctgatgtgatggaatggttgaagcgaccaggtaaaggctatcaaactcgcctgaacgcaattttacgtgaagcgatgctgcgcgatcagaacaaaaaataattcaggccgccacatggcggccatcatccaaaattacttcctcaaccccgcaaacgctgcccgaatctcttcctccggcaactgaatcccgataaacaccatcgtgctatgcggtttttcatcgccccacgggcggtcccagtcggcgctgtagaggcgttggacgccctggaatagcaggcggttaggttcgccgtcaatccatagcatccctttgtaacgcagtagtttatccgccgactccagcagcaggttttccatcacccgggaaacttcgctgatatctaccgggtaatccagttccaccacaatcgacgaaatatcgttttgtttgtccgcgataaagtggaaacgcggtttggtgctgacgacgttttcttccagcataaaaccgttggtgttgaacagaaggcccaggtcgatatcgccgtgggtaacggtgtagaccggtgcgcgggcgttgatgcgcgccaggcgttcacgcagtttctctgcttcgcctgcgacgtcggttttcgtcagcagaatacggtcggcgtagccaacctgggactgggcgatggtgaactggttcatctgctcatcggcatgtaccgcatccaccagcgcaatcacgccgtccagcaggtagcgctggcataaaatctcatgggagaaaaaggtctgaataatcgggccgggatcggccatgccggtgcattcaatgaccagacggtcgaactgaatattgcccttgtcgagattatccagcaggtcgagtagtgcgtcttccagctcgttggagcgcgaacagcagatgcagccgttggtcagcgttttgatctgcgtggcgcggtcgccaatcagttgatcatcaacggagacttcgccgaattcgttttcaatcacggcaatcttgtagccgtgttgttcgttaagaatatggcgcagcagggtggttttgcccgcgcctaaaaaaccggtgagtagggtaactgcaatcgggttcatgctctctccattaacaacagcgcataccgcctttaccatcgccgccgtagcgtgcgttctggcgttcgcggaagaattcttcatagctcatgtacggcttgtcgggatggttggtcttcatatgctcgacgtagttgtcgtagtctggaatgccaatcaacatcttcgccgcctggccgagatatttttttgcctgtcctaagttaccaaacatagttcactctgataagaacaaagccccgccgaagcggggctaaacacggttagtggtgcgaagagatcttcacgccgccttccgggattggaacgtacggtgtttctttgtcagtacgtttgtcgctgttacgcaccgcaagccaggttttgaaaccgtagaagatgatgctgtacaccacaatcaggaacagaatactcagacctgcgttggtgtagttgttcacaacgatgtggttcatgttggcaatctgctgcgccgtcaggtcagtaccgttagcaatcttctctttgtactggcttgccatgtagaagaagccttccatctgcgggttggtgctgaacagtttcaggcccagcgcccaggtggtgcagataagcagccatacagccggaacaacagttacccagatgtattgggtgcgcttcatcttaatcagcacaacggtgcccagtaccagcgctacggctgccagcatctggttggaaataccgaacagcggccacaggctcttaacgccgcccagcggatcgaccacgccctgatacagcaggtagccccacagacccacacagcccgcagtaccgatgataccggcaaccagagagtcggtttttttcaggaacgggatgaagttacccagcaggtcttgcagcataaagcggccagaacgggtacccgcatccagcgcggtcaggatgaacagtgcttcgaacagaataccgaagtgataccagaagcccatgtcagccatcggcagcactttgtggaacacgtgagcgatacctaccgccagcgtcggcgcaccacctgcacggttcaggacagaaggctcaccaatgtctttcgcggtttgcaggatctgctctggcgaaatcacgaagccccaggagctgacggtcgctgccgcgtgtgcggtaacgtctttcagctgcgccatgatgatcggcgcgttctcgccacccatttcatgcaggttaggcatggtgatgccaaggccagcaggcggggtgttcatcgcgaagtaaagacccggttcgatgatggacgcagcaaccagcgccataatcgccacgaaggactccatcagcattgcgccgtagccgatgaaacgcgcgtcggtttcattagccagcagttttggcgtcgtaccggaagagatcagcgcgtggaagccagataccgcaccacaggcgatggtgatgaacaggaacgggaacagagcgcctttccacagcgggccagtaccgtcaatgtactgggtcatggcaggcattttcagttccgggttcagcaccacgatacccagcgccaggccgacgataacgccgattttcaggaaggttgccagatagtcgcgcggtgcgaggatcagccacaccggcagcagtgcggaaacaaacgcatagccaatcagcgcgaaggtaatggtggtgtctttaaaggtcagtgccggaccccagtacggatcgtgagcaatcacgccaccgaagtagatagaggcaaccagtagcacgataccaatgacagagacttcacccacacgccccggacgaataaagcgcatgtagatacccataaacagcgcaatcggtacggttgagcaaacggtgaagacaccccacggactttcggccagggctttaaccacaatcagcgccaggacggcgaggatgatgatcatgattaagaaacagccaaacagcgcgatagtccccggtactggtcccatctcttctttgatcatctcaccaagagatgcgccattacggcgagaggagataaacagcaccataaagtcctgaaccgcaccggccagcacgacccccgccagcagccacagcgtgccaggcaggtagcccatctgcgcggcgagaaccggacccaccagcgggccagcaccggcgatagcggcgaagtggtgaccaaacaacacgtaacggttggtcggaacgtagttcagaccgtcgttgttaataaccgcaggcgtcgcgcgcgtggggtcgagtttcatcaccttctgggcgatgtacagactgtagtagcgatacgccaccagatacaccgatacagaggcgaccacgatccacagggcgctgacgtgctccccccgacgtaatgcaactaccgcgaggcagaatgcaccgatgattccgagaatcacccagggtatgtgcttgaatatctttttagtatccatagtaaaacctggcatgtattgattaatagttggccgaagccgttctaggtttgcgttgcgtttgaggaggtaaattgaccgctatcctgtagtgatgttgccagagttacgcgcgcgtaaagtaaggtaaataactgagtggttattttagggatgtaagcggtcagttttgcggttgagcggcaaaggcgtcgtttaagtgacgataaatatgtgattcatatcacatatttatattgtgaataatttatgtaaataatggctttttaaattcagagtgtgaataaaattactcggcgtaatctccgcgggatattcataaagtttttcctttccaggccgaaaatcttgcatcggtccacaggaaagagaaactatgttaaaacgtatcaaaattgtgaccagcttactgctggttttggccgttttttggccttttacaactgacatcaggcggtctgttctttaatgccttaaagaatgacaaagaaaatttcactgttttacaaaccattcgccagcagcaatccacgctgaatggcagctgggtcgcgttgttgcagacgcgtaacaccctcaaccgcgcgggtatccgctacatgatggatcagaataatattggtagcggttcaaccgttgctgagctgatgcagagtgccagtatttcgctgaaacaggcggaaaaaaactgggcggattacgaagcgttgccgcgtgacccgcgtcagagcaccgccgcagcggcagagatcaaacgtaattacgatatttatcacaatgcgctggcggagctgatccaactattaggtgcaggcaaaatcaacgagttctttgatcagccgacccagggatatcaggacggtttcgagaagcagtatgtagcttacatggagcaagacgatcggctctatgatatcgccgtcagcgataacaatgcctcctacagccaggcgatgtggattctggtgggcgtgatgatcgtcgtactggcggtcatcttcgccgtctggttcggtattaaagcctcgctggtagcgccaatgaatcgcctgattgacagcattcgtcatattgcaggcggcgatctggtgaaaccgattgaggtggatggctctaatgagatggggcaactggcagagagtttgcgccatatgcagggagagctgatgcgtaccgtcggtgatgtgcgcaacggggccaatgccatctatagcggtgccagcgaaatcgccaccggcaataacgatctctcttcgcgcaccgagcaacaggccgcttcgctggaagagacggcagccagcatggagcaactgaccgcaacggtgaaacagaacgccgagaatgcgcgtcaggccagccatctggcgttaagtgcttctgaaacggcgcaacgcggcggcaaagtggtggataacgtagtacagaccatgcgcgatatctccaccagttcgcagaaaatcgccgatattatcagcgtaattgacggcattgccttccagaccaatattctggctttgaacgcggcggttgaagcagcgcgcgcgggtgagcaagggcgcggttttgcggtggtcgcgggtgaagtgcgtaatctggctcagcgcagcgctcaggcggctcgtgaaattaaaagcctgattgaagactcggtggggaaagtagatgttggctctacgctggtcgaaagcgcaggggaaacaatggcggagattgtcagtgccgtgacccgcgtgacggacattatgggcgaaattgcttctgcttctgatgagcagagccgtggtatcgatcaggttggcttagcggttgctgagatggaccgggtaactcaacagaacgctgcgctggtggaagaatctgccgctgccgccgccgcgctggaagagcaggccagtcgcctgaccgaagctgtggcagtgttccggattcagcaacagcagcaacagcagcgtgaaacatcggctgtggtaaaaaacgtgacgccagctacgccgcgtaaaatggcagtggcagatagcggggagaactgggaaacgttttaatcgccataaaaatgcccgataagcaaaatgttatcgggcatagggagtttaatctttacgcgggtcgttgatcggctgacgaaccaggaagatgtacgccagtgctcccgctgcggtgacgcaaccgcagatgattagtgccagacggaatgagtgggtggtatcaacaataaaaccagtaatgatcggcgcaaaagaggcgcagatgaagctggcaaagttctggatactgcccaccgacgccgtcatgcgagaagcaactgcgacgtggatcaagccccagcaggatgttccggcaaagtgaatacagaacagtgccatgccaatcagcagaaccgccgtcatggatgttgtcgcttgcggtacgaccagcgtaaaggcggcagaacagaacatcccggcaataatgcagatcttacggcttttaatcggagccattccccctttgaccagccagtcagtaacgtaaccgttgaccagcatcccggcagccccaaacaggaaagggatagccgccatcaaccctgtgctttttaaatccaggttataggctgtttgcaggtaaccaggaagccaggccagatacagccacgcagtgtagttgatgccactgaatccgagcatcattccccacattgtgcggttacggaacaggctgcgccattcggcaaaactgagcggatctcggcgggcattgacgctacctgcattgagataagcttgttcaacggcagtcagttctacgtgctcgcggttgcgatagagcatataccagccaatggcgagaaaaatccccagcacaccaatggtaataaacatcccacgccagcccatcaccagcatcatcgccgccagaatcggtgggcttacggcaacgccaatggtagaagctgcgttgaagaagcccatcgggcgtccgcgctctttgatgttgaaccagtcgttaatgacttttacgccacatgggttcatcggcgcttcaccaatccccataccgatacgcaccaacacgaactgcgtaaagctgtgcaccatgccagacatggcctggaacagtgaccagaagaacatccccagtcccagcatcaggcgtgggcctttacgatccaatagtgggccgcaaggaagttgcgcaatcccgtaagcgagtgaaaacacggagagcaaagcgccgatttcggtggcacttaatcccaattcttcacgaatcgttaaatttgctaccgacagcgaactgcggtcgagataattgattaccgccgcaaaaaataataacaacatggcggtggtttgaatgcgtttaattcgggtactgcgttgaactaatccatctggtggcacgggaatatctgccgacgaagatggagtaaatgaagaacgcggatcgagggtgatattttctttttccacgccggactcctgtatttataattttaattgtttacgtaattgtgcattacgcaaggttgacattaacggcaggttaaagttttaggactttactaccgctcacaaaaacatttttagtcgactgattgtgagcataggtaagcgggaatttcccggtatttatcttttgataaaaccgtgcacccgctaatagtttgctgtttttaatccgtacttaatgagcataacgcgtgttctcattaatggatcgaatcattgattgtttagctgaattcaaatggttacggagcgcaagggtggcatcaaggtcactgcggcaaatcagagcgctgagaatggtcatatgctcatcgacggcaatgatattgcgctgtttaagatcgctttcgtcccattgatagtgaaaatgaaagatgactgagatgatctcaagagattgatcaaaaaagatattgtcggcagctgaaagcagtaaggagtgaaaatctctgtcaagttgcgagaacatgcgaaagctattgccgatgttgtcacgcagtagccgatgacgttcgagcatggttttcgcctgcagccagcggggatcatgatcaggcaggttgagaaagtgctgaagtgaatgtgtttcgagcatttcgcgtagttcaaacagctgctcggcgtaggattgatcgaattgcttcatgctccactggccgcgcttttcgctttgaataagattataacggccgaattttaaaagatattctcttactacaaccgggctgacacccgcggcccgagccagttgcagttcagaaaaagtttccccagggcgtaactggcgctggtttatcatcgtgaaaaaagcctgctcaaacactttgttttgttcactcattgaagcggtagtacaggcgaaaccgtcatcatggtcaggtttacgcgcaatcacatagtcgtttccaacctgcgttaagacgccgcattcgcgtaagtggctgagaatatgacgcactgtagtgcggctgatgttgtacatttccgccagcgcactttgcgatggaagtggggaagggatatgaccccgcgccatatcatcaatgacctggttaatcacattgtggcgtaaattttgtgaacgactcatattttcctccttgtgagtccattaaaacccgatttaaaacatttttatgcgtgtgttttcacaaaacagattttccgttccgctgccatttttcattttcattgatatctaaggcaacaaaaaatggagagccgaatcatgtctacgatgaatgttttaatttgccagcagccgaaagaattagtctggaaacaacgcgagatacctattccgggtgacaatgaagcattaataaaaattaagtctgtcgggatttgcggtaccgatattcatgcctggggtggaaatcaaccattttttagttatccacgggttttaggccatgaaatatgtggggagattgttgggctgggtaaaaatattgcaaatcttaaaaatggacagcaagtagcggtgatcccttatgttgcctgtcagcaatgcccggcgtgtaaaagcgggcgtaccaattgctgtgaaaaaatttcagtcattggcgtgcatcaggatggcggttttagtgagtatttgagcgtgccggtggcgaacattttgcccgcagatggtattgacccgcaggcggcagcattgattgaacctttcgctattagcgctcatgcggtacgtcgcgcagccattgctcccggcgagcaggtgctggtggtcggggcggggccaatcggtctgggcgcggcggcaatcgctaaagccgatggcgcacaggtggtggtggcggataccagtccggcgcgccgtgaacatgtggcaacgcgtctggagttgcccgtgctggacccatcagccgaagattttgacgcgcagctgcgggcgcagtttggtggttctctggcgcagaaagtgatcgacgcgacaggtaatcaacatgcgatgaataacaccgtgaatctgattcgtcacggcggcacggtggtatttgtcggtctgtttaaaggtgagttgcagttctccgatccagaattccataaaaaagaaacgacgatgatgggtagccgcaacgccacgccggaagatttcgctaaagtcggtcgactgatggcggaagggaaaatcactgccgacatgatgttaacccatcgctacccgttcgccacgctggcagaaacctacgagcgtgatgtgattaacaatcgtgagttgattaagggtgtaattactttctgataaggcgagattattaaagttgccatgcagcgtccggggaagtgttgggcgctgttttttttctgtttctcaatgatgttttgtaggccggagaagatgtgtaggtcgcaccttatgcgacctacacatcagtcagaaattacccttcacgttccacaactttaatttccaccatgccgatcccgagcttacgcggcgagtgtccgaggatattcccttcgttggttgagacaggttccggtggcacaattaccagtgtgtcggcatcggttgggttatcgaaatgcagtgtggtggtggtcacttcattgcccagcacaagagtttgttcttcattgcctacgcgtaccggaataggacggctggcgttattgccgtatgctttggcggtaatcaccaggtcaaatttcttcggcagcggatgcttgtactcgatttttacttcatcgcccagctgcgcgttggaccagcggccccacgactctggacgggaaatcccactaaactgtttcacctcttctggcgcaccggcgacgttgaagatgaaactgtcggctttgtagcgaatatcgttatcaacaattttcagcgtatcgacattgcctttataacgcgccatgtcgatgaccgtatctttaaatgccgttttgccctgccatgttgttttgtcaacatgctgaacaatttgctgaccgccaagctgcccttgcgagacacaccagtcggtggagagtgccagttccggagcccagagttgtgccatcttatagcaacggtcaacccagacgaaattgtcgcgtggagcgaaatcggccagctggaaacgcagcggtgctgagtattcgctttccggcagcggttccacgcgtttgtctgaaacccgcaacagcagcggcaaacggaaatggctacccgagaaggcaatcatgtttttctgctggtcgatggtgaactctttcatctctttagggaatttccacaggcggatgatatctggcttccacgccaatgttttctctttgatattgaggaagatttccgacatcgactgcccggataaactgctacgaccaagtccgagatagttatcgccaccgagaatgtccagcaccgtcgcgccgttatccatcgtgttacgcttcactgccagcgtctcttgctgcggcttgtcgccacgaatgacaaaaaacaggttattgcgatcctgcttattgaggtatttccacgccgtgttgttcatcgctaaatggtcagaagagacgacgatgacagtatctttaaaccacggtgacgctttgattttgttgataaacgtcgcgatattctcctggctgcaacttaccgcgctgaatgactgattcggtttaccgtcaaaatcatattttttgcggttacaggtacgagaaataaaaccatccgggtgatgggtatcgactgtcagggtaaacagtgagaatcgctgacctgagcgggaaagctcttcaaactttttccacgcttcatcgagaacggtatcgtcgtagaatccccagtcgttgcgatagtgcgggtcggctaccacgcttttcagctcttctgagccgtataagtggtcgaagccgtgcgatttcaggaacacatctttaccggcaaaacgcagatttgcgccctgcacgaaatagttctgataacccgagtttttcaggatatcgcccagacagatgttctgcgggaagaagctggagacagaggcggaggcgttgccttcaaagggggcaaacagcggtatgccgcactgagaagccaccatgcccgcaatcgtgtaatccgttcctggcagctgctgcgtgtggctgaaatccaggccttcatttttcaacgcgcccagttcaggcgtgagatccgggaaagcttcgttatcaaaataggttcgctcgagactttcgccgtagatataaaccaggttgagtttcgggtcagggatagttttcgacggctctttataataagccgcaaagtccgggtcgccgtcgcgtgactgggatttcaccagttccgttatctgacgaaatgccgggctggcatccactgaacccagcgccagtaagagtgccagcaggctgtaaccaaaatggtgcggatgatggcgacgacggcgcaggatccagcccagcgcaccgaacaccgccgtcagccccagcacaatgccgatacccggaagaatgtatttgctgacaccagcaccggtcaggctgttggttaaggtatagagaaccgcgtcgttaataccatcgccagtaaaatagtcgctggcaaacagggtgatatttaaaacgacaaatagccccagcaccgttaacgtggctgcaaaccaccaggtgttacgtcccgctttccatgcgtaaatcagcacagaggcgagaaaaagggcgaaagagagtagttctgacaacgggcgatcctcactaaaccgggccgtttagccaacgtttaagctttttgagaagcacaatgtaatggcgtcgccatattgctgcaattctagtgtcaaaaaaatgcgatgttgttaggaattagtttataaacagacttttttgattacggtcgcttcccgtgtaacagggggaaaaccgtccaggagcagggaaaagggcaggagagagccgcgtcagccgggtaacagctaaaacgcggcgtttcgcggttcaggaaatgaagttcagcccctgctttaacaccagatcgcaggctttggttttcaccttttctgccagcggagtcgttccgatattatccagattgagttgctgaccatctttagttttcagcaaaccctgaatgccatccagatagttggtgtcttctttttgctcttcactgttcaggcccagtttttccagtacctgattcttgatgttttcggcatcggttaccgacgccagcttttgcttcgcgcagtattgcagaatgcctgcggcattgttcatgttatctgcgcttaaggcctggtttccgctgctaagcaagttagttaatgacgcgagcgaccaaccgccttcctgtgtcgtgctgttttggttgccaagttcgctggcggcgctggagagcgcatctttccaggacgcagcatgcaccccggtggaaattaatgcgctggcggcaatggcacagcacagaagatgtttaacagttttcatcatcattactcaaggtggaattgtgtcgcagtataccgccagaaacggggattaatactctttacctgttacacggctacggtagctatcccagttgaagatcacccacaaactgttacccaggcgcatacggtccatcacgcgttcgcccagcaacttggtcatctcttccatattactgttggtcagcatcccggttgggcgtttggaagaagagcggcgatcgacgatctggttgatgatcactttttcgtatttcgattcggtctgcacgccgatctcatcgatcaccagcagatcaacgttgctcagatcgttaagcagttgttcttcgctggtaccgctattcctgaaggtatctttcatcgccgacataatatcggccacggtgatgatcaatacggatttaccgcgtagcagcagctcgttgcagattgccgccgccagatggtttttgccggttcctggcttaccagaaaagatgaagctggcgatgttgccgtcaaactcttcgacatactggcgcgctttgcttaacgcattcatctgcccttcacactcaacgcgatagttctcaaaggagcagttctgatgcagtggacgaataccggagcggttaaaggtgcgctgcattttcatcgcccgattttcacgttcgagagcggcggagcggatcgccccttgttctttctgccaggccagtagctcttcacccgttttgaatgcaggtttgatatgggcaggcatcattttttgcaggcgttgcatcaggtcgccaacgtttttcatcgttaccctctgaatcctggtggaatttggctgtcaggttcgctgaccgtattcacatctcgtttcggcagtccgccgttgctggcacgaccgatttgcaggctgcgcgccagtttttgttgccactgcacatggtgaaagactttaccttccgcctgccagtaggcaatgaatgaggccagttcttcggtggtcaccggctctcttagcgccacgccccatagcgccgccaggcggataaagtcggcatcgggttgccagtccggatacatggcgaatttccccatggggacagcaacgggagcggcttgcggttcctgatagagttgatcgtccagagcgacatcgcttcccggacgcgccagcttttcttccagcgccagcagttcagccaggcgtgcaggcgtgacggcataaaacgccggggcattgttagcaaatacggcaaccacaccgccttcagcttttgccagaacggtttggtgatcgtgtaccagggcgtcaataccaacgacgtccggggtcaaaactctggaagacatactgtttctcaaatatggaacgatgaacgagaagggagataacttttatagtaacacacggaggagaggaggctgtctctcatccgtgtgcttaagcgaggcaattttatacgcgagggcgcttgcggtacaaccataatccaggaatggaaagaccgatggataacgcaccaacaatcgatgaagctgtaagaaagttggttaacagggtaatcatcaacggttcgctgtaacctaactggctgatttttaccgccgaaatcattgcggtataagccgatatgcccgggaacatagggataacggccgccacggtaaacactttcggatgcgccagataccagcgcgaccattgaataccaatggtgccgaccagcatagaagccataaaagttgaccactcaatattcagcccgctggtcattaagatcattcgtgaaccatgaccaatcgcgccaagcagcgcacaccagcgtaacgcccgaacgggaacgttgaacaccatcgcaaagccgaccgcaggaatggcggcgaggatcatatcctgcgccaacgctaacagaaattcgatcacacccatccgcgtagcccccaaatcgtcagtgccatcactacgccgacgcaggtagccagtgtcagcagactggcgatcgcccagcgtgccagtccggtattgatgtggcctttaaacatatcggcgacggcattaatcaacggaaatcccggcaccagcagcagaacgctggcggccatcgcgatagtgggtgtattgctgaaagtgggaagttgcaaaagcaatccggaaatggtggtggcggcgaaagcggtgaggcaaaagttgatctgcggatgaagatgacgttgtgccagcagctggcggatatacatcgcggccgtactggcaaagaaggtgatgacggcaccatcccagccacctttattgagtttgcagaaacaggcgcaagaaaggccaaccatcaatgctaccagccatcgcgggtaacgtaatggctgaatttggctaaatcgtttctctacgcctttgtaatccagcagatggtgctccgccagaatcacaatgtgctggacttcagtcaccacatgcatattaatgccgcgatcgtgatttttacgtgtcgatgtcaggcattgcccatctttaatggttgtcagcactatggcgttcgaagagatagaactttcgacgctgtccatccccaacgcccgacccagtcgtgaggaaagctcatcaaccaacgcgctttccgcaccatgttgcaaaagaaataatccacactggatacaaagccgtgttacggctcgctgttgctcagtttgcataactcgccctttgtcatagacgtgctgcgtattgttcagataatgagaattcatttgtatcatgaagcacggttgttttgcggtaggttaagatcaaaattgcgctgattaatcctggttatcgggagaagctcggtgataaaaagcgaattatctctcgccgcaaacaaattatcacatgaatattatcaccataatgaatttattgtttggcctttacgaatcaggataatagataactgggcgcgttttttaatgccaataagttaaaacaatcagattttattgaataaatattggttgtgtgattttgcattttgcgggaagaggtatcattgaattataaattaaatgaatgatatttctgtttttcattaagtatttctaacaacttaatgtagatattttaaatgtctccaggctatttcaccaggttatcatttgatgctaaccttctgacacatgcagtggagttgttgtgcagcaggagtatgctgatatgaaagtgaatgctaaggataatttattcgcttaatctattaatttgctggaaacatttaaggaatgaatatcctgaataaaccatcatgatttttagacagtggatgtggaggaaatatgttgccaggatgctgcaaaaatggaattgttatcagtaaaatacctgttatgcaagcagggttaaaagaggtcatgaggactcacttccctgaatatgaaataatatccagcgcctctgcggaggaccttaccttattacaattacgtcgttccggattagtcattgctgatttagccggtgaaagtgaagatccacgttctgtttgtgaacattattattctttaatctcacaatatcgggaaattcactgggttttcatggtgtcacgctcctggtattcccaggcagtagaactgctcatgtgccctacggcgacgttattgtctgatgttgaacccattgagaatctggtcaagaccgtacgttccggcaatacgcacgcagagcgtatcagcgccatgctgacctccccggcaatgactgaaactcatgattttagctatcgctccgtcattctcactctttcagagcgcaaggtactgcggctattaggtaaaggatggggcatcaaccagatagcttcattgcttaagaaaagtaataaaactatcagcgcccaaaaaaacagtgcgatgcgtcgactggcaattcacagcaacgctgaaatgtatgcatggataaatagcgcgcagggtgcaagagaacttaacttgccttctgtttatggagatgccgcagaatggaacacagccgaattaagaagagaaatgtcgcactcatagaaaaatgcgtcatgagtagtatcggtattgagagtttattcagaaagtttgcgggcaacccttataagctccatacctataccagtcaggagtcatttcaggatgccatgtcgcggatctcgtttgcggcggtcattttttctttttctgccatgagaagtgagcgcagagagggattatcttgcctgactgaactggcgattaagtttccgcgtacccggcgtttagttattgcggatgatgatattgaagctcggctgattggttcattgtcgccatcaccgctggacggtgtattaagtaaagcgtcaacgctggagatttttcatcaggaactctttttgtcattaaatggtgtacgtcaggcgaccgaccgactgaacaatcagtggtacattaaccaaagccggacgctaagccccacggagagagaaatattgcgctttatgtcgcgtggctactcaatgacacaaattgccgagcagcttaaacgcaatatcaaaacgatccgtgcacataaatttaatgtgatgtcgaaactgggcgtcagttctgatgcagggttgttggaggccgcagatattctgttatgtatgcggcattgcgaagcaagtaatgtgttgcatccctattaatccgcatgatgccgggtttacttccccggcagtgctttcatttcagcgtacaatcgccacattgctgcacatccggtaagcgataacgctggcagcaagtgcggcgcaccagcaggccatcgcgcagtaccacggtacgccagagtggattatcttcaccgttcgtgagcgttttctcaaaaaagagggcatggcgcagcgattcaaccgtcgcctcgccgagcagctgcttcatctcagtgagataccagttgatcaaataaccggtattactccagataagtttgccgttgatctctccggtcgcttctagtgcctgcacaaccggaaccagcgcctggctgattaacgtttccattcgctgctgcggcgaatgtggtgttgcgtttttatcttcacacacatcgacccagaaacaggcgacgcgtccggtttcgtgaaactcagcatggaaatgttccggcgacacatctaatgccttttcctgcgtcagtagcgccagcattaatggtggcaccatcaggccgatataccattgtgcccatagtgagatcagcggtttgttctcgcggatcatcgttggttggttgcgatagatatgatcggaatagaccgcgagtagagaacttagcgcattcggtgatgaccattgcgccagcgtcatggcgttaagcggagcgggttcatccaggcggataaactcgagcaaatgttcacgatgtttggcgatcgtcgcacgtacggcttgtgcaagcccagcatcctgcggctggagatgcgttcgccagatgatatcttcatagagcggtgcggaacgataggccataatcgggatagtaatctaaatgataatgattgctaatcctagcgataggtttacccgatagcaagggatttctctggcttgcaaatgataaaaattatcatatgatattggttatcattatcaatgaaagagatgaaaccatgttgcaacgtacgctgggcagtggctggggagtgttgctgccgggattgctgattgcagggctgatgtatgcggatttatcgccggatcagtggcggattgtcattctgatgggattagtattgacgccggtgatgctgtatcacaaacagttacggcattacgttttgctaccatcgtgcctggcgcttattgctgccatcatgctgatgataatgaatttgaatcagggatgaaaaatcaaggaagaaacaagaaaggaagtaaagataattggtgcgaggggggggacttgaacccccacgtccgtaaggacactaacacctgaagctagcgcgtctaccaattccgccaccttcgcacagtcatcttacttttttgatatcgcctcgtttggtgcgagggggggggacttgaacccccacgtccgtaagaacactaacacctgaagctagcgcgtctaccaattccgccaccttcgcccagtgcgagcaatatcaacgtggtttttggtgcgaggggggggacttgaacccccacgtccgtaaggacactaacacctgaagctagcgcgtctaccaattccgccaccttcgcataccatcaattcttaaaaagaattgctaccacggaggcgcattctagtggttttcagcttttcgtcaatagttaattatcggcagatgtgtaattgctggaaaaatgtccatcaggagactaacgagcaggttttgtaggtcggataaggcgttcacgccgcatccgacacggtattcgggggcagatgccagatgcgacgctggcgcgtcttatctggcctacgaaggattaatgtgcagttgtataaggcgagcacgccgcatccgacaaggcttgcggcgggatactcaacctttcttcgcctggcgggtcataatggcgcgatacaccttgaagcgcccggtttgcgcgataacttcatggaagccaaatgtctcatccagcacgtccgggtaaggcaggaaggcgttcgctacaattcgcagctcgccgccgctattaagatgacgcaccgcgccgcgaatcagcgtttgcgccgcatccaggctggtttgcatcccatcgtggaacggcgggttggagatgatcatatcaaaacgacctttcacctcggaaaagacgttgctggcaaagacttcaccttcaacaccgttggccgcaagtgttgcgcggctggcttctaccgctggcgcagagacatcgcacaaggtgagacgaattttcggcgaatggcgcgcaaaggcaactgaaagcacacccgcgccacagccgacatccagcactttacctttcgtgtgcggggttaacgtcgagagcagcaactggctaccgacatccagactgtcgcggctaaacacgccaggcagcgttttgaccgtcaggccatcgacgctgtattcgccccagaatttatcggcatcaaataccggctgtttttccagacgaccaaaatagaggccacagcgacgagcgctgtcgactttattcaacggcgcataatctgccagcatctgctcggcgctgcgcacgccgctgcggttctcgccaacgacaaaaatatctgtccccactggcagcagagaaagtaaattcatcaactggaactgggcttccggtttgttcttcggccagtagtaaatcagcgtatcgcaatctgcgacgtcatccgccgtggcgaccagactgaaacgggcgttatcccccatctggcggcttaatacctgccagtggtggaattgctgggtatgagcacggctggccgcggtatctaaacgcgcgggcaggtcatcctgtaagtctccggcaaacagaatacggctttgttcgaaatcatcactgtgacgcagcaagacttcacttgccggggtaaatgcagacatggaatgctcctcaattgatactggcggcgattatagccatatgttggcgcggtatcgacgaatttgctatatttgcgcccctgacaacaggagcgattcgctatgacatcccgacgagactggcagttacagcaactgggcattacccagtggtcgctgcgtcgccctggcgcgttgcagggggagattgccattgcgatcccggcacacgtccgtctggtgatggtggcaaacgatcttcccgccctgactgatcctttagtgagcgatgttctgcgcgcattaaccgtcagccccgatcaagtgctgcaactgacgccagaaaaaatcgcgatgctgccgcaaggcagtcgctgcaacagctggcggttgggtactgacgaaccgctatcactggaaggcgctcaggtggcatcaccggcgctcaccgaattacgggcaaacccaacggcacgcgccgcgttatggcaacaaatttgcacatatgaacacgatttcttccctcgaaacgactgatttaccagcggcttaccacattgaacaacgcgcccacgcctttccgtggagtgaaaaaacctttgccagcaaccagggcgagcgttatctcaactttcagttaacgcaaaacggcaaaatggcggcgtttgcgattacgcaagtggtgctggatgaagctacattgttcaatattgcggtcgatcctgactatcagcgtcagggattgggaagggcgctgctggaacatctgatcgatgaactggaaaaacgcggcgtggcgacgctctggctggaagtccgtgcctcaaacgctgccgccattgccctgtacgaaagtttaggctttaacgaggcgacgattcgccgcaattactaccccaccacggacggtcgcgaagacgccatcatcatggcgttgccaatcagtatgtaagacaaggtggaataatgaagtgggactggattttctttgatgccgatgaaacgctgtttacctttgactcattcaccggcctgcagcggatgtttcttgattacagcgtcacctttaccgctgaagattttcaggactatcaggccgttaacaagcctctgtgggtggattatcaaaacggcgcgatcacttcattacagcttcagcacgggcgtttcgagagctgggccgaacggctgaacgtcgagccgggtaaactcaacgaagcctttattaatgcgatggcggaaatctgcacgccgctgccgggcgcggtttctctgcttaacgccattcgtggcaacgccaaaatcggcatcatcaccaacggctttagtgccttgcaacaggtgcgtctggaacgcacgggcctgcgtgattacttcgatttgctggtgatttccgaagaagttggcgttgccaaaccgaataagaaaattttcgattatgcgctggaacaggcgggcaatcctgaccgttcacgcgtgctgatggttggcgacactgccgagtccgatattctcggtggcatcaacgccgggcttgcgacctgctggctgaatgcgcacaatcgcgagcaaccagaaggcatcgcgcccacctggaccgtttcttcgttgcacgaactggagcagctcctgtgtaaacactgattgcctcccccccgttgatgggtaaaatagccgcaatttttcgttttcaacaagcgcggcgcgatgccgcttactcaagaagaaagaattatgacgttgtctccttatttgcaagaggtggcgaagcgccgcacttttgccattatttctcacccggacgccggtaagactaccatcaccgagaaggtgctgctgttcggacaggccattcagaccgccggtacagtaaaaggccgtggctctaaccagcacgctaagtcggactggatggagatggaaaagcagcgtgggatctccattactacgtctgtgatgcagtttccgtatcacgattgcctggttaacctgctcgacaccccggggcacgaagacttctcggaagatacctatcgtaccctgacggcggtggactgctgtctgatggttatcgacgccgcaaaaggtgttgaagatcgtacccgcaagctgatggaagttacccgtctgcgcgacacgccgatcctcacctttatgaacaaacttgaccgtgatatccgcgacccgatggaactgctcgatgaagttgagaacgagctgaaaatcggctgcgcaccgatcacctggccgatcggctgcggcaagctgtttaaaggcgtttaccacctttataaagacgaaacctatctctatcagagcggtaaaggccacaccattcaggaagtccgcattgttaaagggctgaataacccggatctcgatgcagcggtcggtgaagatctggcacagcagctgcgtgacgaactggaactggtgaaaggcgcgtctaatgagttcgacaaagagctgttccttgcgggcgaaatcactccggtattcttcggtactgcgctgggtaacttcggtgtcgatcatatgctggatggcctggtggagtgggctcctgcgccgatgccgcgtcagactgatacccgtaccgtagaggcgagcgaagacaaatttaccggcttcgtatttaaaattcaggccaacatggacccgaaacaccgcgaccgcgtggcgtttatgcgcgtggtatccggtaaatatgaaaaaggcatgaagctgcgccaggtgcgcactgcgaaagatgtggtgatctccgacgcgctgacctttatggcaggtgaccgttcgcacgttgaagaagcatatccgggcgatatcctcggcctgcacaaccacggcaccattcagattggcgacacctttacccagggtgagatgatgaagttcaccggtattccgaacttcgcgccagaactgttccgtcgcatccgcctgaaagatccgctgaagcaaaaacagctgctcaaagggctggtacagctttccgaagagggcgcggtgcaggtgttccgtccaatctccaacaacgatctgatcgttggtgcggttggtgtgctgcagtttgatgtggtggtatcgcgcctgaagagcgaatacaacgttgaagcagtatatgaatcagtcaacgttgccaccgcccgctgggtagaatgtgcagacgcgaagaaattcgaagagttcaagcgtaagaacgaaagccaactggcgcttgatggcggcgataacctcgcttacatcgctaccagcatggtcaacctgcgcctggcgcaggaacgttatccggacgttcagttccaccagacccgcgagcattaattcttgcctccagggcgcggtagccgctgcgccctgtcaatttcccttccttattagccgcttacggaatgttcttaaaacattcacttttgcttatgttttcgctgatatcccgagcggtttcaaaattgtgatctatatttaacaaagtaatgacatttctgacggcgttaaataccgttcaatgcgtagatatcagtatctaaagccgtagattgtcattctaccgatattaataactgattcagaggctgtaatggtcgttattcatcacccatcgcttttgtgatggcgaccattgacttctgtagagggtgaagtctctccctattcagcaatgcaacctcgtgttgccaggctcaaattacgagcaaacttacaggaataaatcgatgactatgacaagactgaagatttcgaaaactctgctggctgtaatgttgacctctgccgtcgcgacaggctctgcctacgcggaaaacaacgcgcagactaccaatgaaagcgcagggcaaaaagtcgatagctctatgaataaagtcggtaatttcatggatgacagcgccatcaccgcgaaagtgaaggcggccctggtggatcatgacaacatcaagagcaccgatatctctgtcaaaaccgatcaaaaagtcgtgaccctgagcggtttcgttgaaagccaggctcaggccgaagaggcagtgaaagtggcgaaaggtgttgaaggggtgacctctgtcagcgacaaactgcacgttcgcgacgctaaagaaggctcggtgaagggctacgcgggtgacaccgccaccaccagtgaaatcaaagccaaactgctggcggacgatatcgtcccttcccgtcatgtgaaagttgaaaccaccgatggcgtggttcagctctccggtaccgtagattctcaggcacaaagtgaccgtgctgaaagtatcgccaaagcggtagatggtgtgaaaagcgttaaaaatgatctgaaaactaagtaattcgtcgtaattcgtcctcccgaactttgtcgggaggcgcgatgtgcaccacactaaaaatatcgcattgagtgattttcacgctcatatcaagcggtgacattaactatggtaaaggagacgcttatgtttcgttggggcatcatatttctggttatcgcgttaatcgccgccgcacttgggtttggtggtctggccggtaccgctgcaggcgcagctaaaattgtctttgtcgtcgggattattctgttcctggtgagtttgttcatgggccgaaaacgaccctagatttcagaccattaagaaaattttatccaaagccagtccagcggactggcttttgcggttttagcgaataataaattgcgttactttgtcattctttcacaacaaaaacaggaaggcagaggtggggcagcgaatacctgtaacgcttggtaatattgcgccgttgtcgctaaggccgttccagcctggacgaatagctctggtgtgcgaaggcggcggacagcgtggaattttcacggctggcgtgctggatgagtttatgcgcgcgcagtttaatcctttcgatctttatctcggcacatctgccggggcgcagaacctctcggcgtttatctgcaatcagcccggttacgcgcgcaaagtcatcatgcgctataccacaaaacgcgaatttttcgatccattgcgctttgtccgtggaggaaatcttatcgatctcgactggctggtggaggccaccgcaagccagatgccgttgcaaatggataccgccgcgcggttgtttgacagcggcaaatcgttttatatgtgcgcctgtcgtcaggatgactacgcgcctaattactttttaccaaccaaacaaaactggctggatgtgattcgcgcctccagtgcgatacctggcttttatcgtagcggagtgtcgctggaaggcattaactacctggatggcgggatcagtgatgcgattccggttaaagaggcggcaaggcagggcgctaaaacgttggtcgtcatccgcactgtgccgtcacaaatgtactacacgccgcagtggttcaaacgcatggaacgctggctgggtgacagtagcctgcagccgctggtcaatctggtgcagcatcatgaaaccagctatcgtgacattcagcaatttattgagaaaccaccgggcaagctgcggatattcgaaatttatccaccgaaaccattacatagtatcgcgcttggcagtcggattccggcgctgcgtgaagactataaacttgggcgtttatgcggtcgttatttcctcgccacggttggcaagctattaactgaaaaagcgccgcttacccgccatctggtgccagtggtgacgccggaatcgatcgttattccgcctgcgccagtcgccaacgatacgctggttgccgaagtgagcgatgctccgcaggcgaacgacccgacatttaacaatgaggatctggcttgatttgccgttttatcgatacccactgccattttgatttcccgccgtttagtggcgatgaagaggccagcctgcaacgcgcggcacaagcgggcgtaggcaagatcattgttccggcgacagaggcggaaaattttgcccgcgtgcaggcgttagcggaaaaatatcaaccgctgtatgccgcattggggttgcatccggggatgttggaaaaacatagcgatgtgtctcttgatcagctacagcaggcgctggaaaggcgtccggcgaaggtggtggcggtgggggagatcggtctggatctcttcggcgacgatccgcaatttgagaggcagcagtggttactcgacgaacagctgaaactggcgaaacgctacgatctgccggtgatccttcattcccggcgtacacacgacaaactggcgatgcatcttaaacgtcacgatttaccgtgcactggcgtggttcacggtttttccggcagcctgcaacaggccgagcggtttgtacagctgggctacaaaatcggcgtaggcggtactatcacctatccacgcgccagtaaaacccgcgatgtcatcgcaaaattaccgctggcatcgttgttgctggaaaccgacgcgccggatatgccgctcaacggctttcaggggcagcctaaccgaccggaacaggctgtgcgggtgtttgacgtgctttgcgagttgcgcccggaaccagaagatgagattgccgaagtgttgcttaataatacgtatgcgttgtttagcgttagtgggtagtttacccttcgtaggcagcatccggcagtcggcgcataatgcctgatgcgacgcttgtcgcgtcttatcatgcctacaggtttgtgccgaaccgtaggccggataaggcgttcacgccgcatccggcagttggcgcacaatgcctgatgcgacgcttgtcgcgtcttatcaggcctacaggtttgtgccgaaccgtaggccggataaggcgttcacgccgcatccggcagttggcgcacaatgcctgatgcgacgctggacgcgtcttatcatgcctacaagtctgtgccgaaccgtaggccgcatccggcatgtcacaaatacagcgccggaaatatcaaccggcccaccccgcgcacctttaatgcatcagccaacggctcaacgtcttccggcgtggcgctcgcccagctttgcgcctcgccatacacgccgtgggcatgaaacgcgttcaggcgtaccggaacatcgccaagtcccttgataaacgccgccagttcttcgatgtgttgcaaataatccacctggccagggattaccagcaaacgcagttccgccagcttgccgcgctctgccagcaaacagatgctgcgcttaatctgctgattatcgcgtccggttaattgttgatgacattcgctaccccatgctttgagatcgagcattgcgccgtcacacaccgggagtaatttttcccagccggtttcgctcaacatgccgttactgtccaccagacaggtgagatggcgcagttgcggatcgtttttgatagcagtaaacagcgccactacaaacggcagttgggtcgtggcttcgccgccgcttaccgttatcccttcaataaacagcaccgctttgcggacatggctaagcacttcgtccacgctcatggattgcgccatcggcgtggcatgttgcggacacctcttcaggcaggtatcacactgctcgcagaccgcagcgttccacaccactttgccgtcaacaatctgcaacgcctgatgcggacactgtggcacgcactctccgcaatgattacagcgccccatcgtccacggattgtgacagtttttgcagcgcagattgcagccctgcaaaaacagagccagacgactgcctggcccgtcaacgcaggagaaggggataatcttactgactaaagcgcatctgctgttcatggcttatcacgcgcggctggcgttccagaatacgagtgttgcgtgcggcttcttcgcccagccaggtggtgttggtgcgtgaaccttcggcgcgatatttttctaaatccgacaaacgcaccatataaccggtaacgcgaaccagatcgttaccgctgacattggcggtaaattcacgcattccggctttaaaggcaccgaggcaaagctgtaccagcgcctgcggattacgtttgatggtttcgtcgagcgtcagaatgtcgctgatgccggaataataataagcatgatgcggggcgacagtttgcagatgggtgatcggatctggctcatcgccatagggtaaacgcgcgcccggcgtggtgccgatatcggaactgatccccgactgtgcgtgtaacatggcgcgtttttgccagccatatttcacgggggtattggcgacaaactccgccagttgcgcgctgatgcgataacccacttcatttgcggcggcttctttaccgtagcgcgcggcaatcccttctttctcacacagcaagttaaccgcttccgccagcccatacatgccaaacattggcacaaaacgttcagggttaatcagcccttctttcaccaggaagctattctcaaagaagtgtgattgttgatagaggaattcacaccgcgcatcgatgatggcgatctgctgctggcagtagtgcggtagagtgcgcgtaaagaagtcatccagcgattcgctgcgctcggcaatggctttcaggttaaggcgtaccagcgtgctgccaccacccgccagcggcagtgagttgtaacagctcacaatcccgtagcccccttttgtgaaaattttatcatgcaccggaccgttggcgatgtgcggtttgctacattcacagatgttcttcgccacttccagcagcaggtcatcaggggtgatttctggatcgtagataaaggtcaggttcggtgaaacctgcttcaactctgcatctgcacgtaatatcgcacgggtgatgggcgaatcagacgggccgatattggcgtgcataaaggcgtctggcagggttctgtcgaggtaacgccagaaacgttttattcgaatatcgatctcgtcttgtgttagaattctaacatacggttgcaacaacgcatccagttgccccaggtagaccggcatcgatgtgaccgacggtacgtggtggtaaagaatggtcagcagagagagtgcgtcatcaagatctttcgcgccttccagctccagccattcggaaccgttcgccagaaaacgggcgtaatcgggtaagacatagcgcggtttgtacggcgcatgaccttcaaacatatcgcagattacaccctcatccagcgcgcggcgggcctcggcaggcagctgcggataaggcagattgttttctgcttccagtgccagaaaatggcgcttctgctccgggctaagcactgggctggtgacaatttgctggcaacgttgttgcagtgcattttcatgagaagtgggcatcttcttttccttttatgccgaaggtgatgcgccattgtaagaagtttcgtgatgttcactttgatcctgatgcgtttgccaccactgacgcattcatttgaaagtgaattatttgaaccagatcgcattacagtgatgcaaacttttaagtagatttccttaattgtgatgtatatcgaagtgtgttgcggagtagatgttagaatactaacaaactcgcaaggtgaattttattggcgacaagccaggagaatgaaatgactgatctgaaagcaagcagcctgcgtgcactgaaattaatggacctgaccaccctgaatgacgacgacaccgacgagaaagtaattgctctgtgtcatcaggccaaaaccccggtcggcaataccgccgctatctgtatctatcctcgctttatcccgattgctcgcaaaacgctgaaagagcagggcaccccggaaatccgaatcgctacggtaaccaacttcccacacggtaacgatgacatcgaaatcgcgctggcagaaacccgtgcggcaatcgcctacggtgcagatgaagttgacgttgtgttcccgtaccgcgcgctgatggcgggtaacgagcaggttggttttgacctggtgaaagcctgtaaagaggcttgcgcggcagcgaatgtactgctgaaagtgatcatcgaaaccggcgaactgaaagacgaagcgctgatccgtaaagcgtctgaaatctccatcaaagcgggtgcggacttcatcaaaacctctaccggtaaagtggctgtgaacgcgacgccggaaagcgcgcgcatcatgatggaagtgatccgtgatatgggcgtagaaaaaaccgttggtttcaaaccggcgggcggcgtgcgtactgcggaagatgcgcagaaatatctcgccatcgcagatgaactgttcggtgctgactgggctgatgcgcgtcactaccgctttggtgcttccagcctgctggcaagcctgctgaaagcgctgggccacggcgacggtaagagcgccagcagctactaagtaagatgctttacgcctgatgcgctgcgcttatcaggcctacgagacgtatctacccgtaggccggataaggcgtagacgcatccggcaaaagccgcctcatactcttttcctcgggaggttaccttgtttctcgcacaagaaattattcgtaaaaaacgtgatggtcatgcgctaagcgatgaagaaattcgtttctttatcaacggtattcgcgacaacactatctccgaagggcagattgccgccctcgcgatgaccattttcttccacgatatgacaatgcctgagcgtgtctcgctgaccatggcgatgcgagattcaggaaccgttctcgactggaaaagcctgcatctgaatggcccgattgttgataaacactccaccggcggcgtcggcgatgtgacttcgctgatgttggggccgatggtcgcagcctgcggcggctatattccgatgatctctggtcgcggcctcggtcatactggcggtacgctcgacaaactggaatccatccctggcttcgacattttcccggatgacaaccgtttccgcgaaattattaaagacgtcggcgtggcgattatcggccagaccagctcactggctccggcagataaacgtttctacgcgacccgcgatattaccgcaaccgtggactccatcccgctgatcactgcctcgatcctggcgaagaaactggcggaaggtctggatgcgctggtgatggacgtgaaagtgggtagcggcgcgtttatgccgacctacgaactctctgaagcccttgccgaagcgattgttggcgtggctaacggcgctggcgtgcgcaccaccgcgctgctcaccgacatgaatcaggtactggcctccagtgcaggtaacgcggttgaagttcgtgaagcggtgcagttcctgacgggtgaatatcgtaacccgcgtctgtttgatgtcacgatggcgctgtgcgtggagatgctgatctccggcaaactggcgaaagatgacgccgaagcgcgcgcgaaattgcaggcggtgctggacaacggtaaagcggcagaagtctttggtcgtatggtagcggcacaaaaaggcccgaccgacttcgttgagaactacgcgaagtatctgccgacagcgatgctgacgaaagcagtctatgctgataccgaaggttttgtcagtgaaatggatacccgcgcgctggggatggcagtggttgcaatgggcggcggtcgtcgtcaggcatctgacaccattgattacagcgtcggctttactgatatggcgcgtttgggcgaccaggtagacggtcagcgtccgctggcggttatccacgcgaaagacgaaaacagctggcaggaagcggcgaaagcggtgaaagcggcaattaaacttgccgataaagcaccggaaagcacaccaactgtctatcgccgtatcagcgaataacggtatactgatctgatcatttaaatttgaagcactgagtacggagaacatatgaaacgtgcatttattatggtgctggactcattcggcatcggcgctacagaagatgcagaacgctttggtgacgtcggggctgacaccctgggtcatatcgcagaagcctgtgccaaaggcgaagctgataacggtcgtaaaggcccgctcaatctgccaaatctgacccgtctggggctggcgaaagcacacgaaggttctaccggtttcattccggcgggaatggacggcaacgctgaagttatcggcgcgtacgcatgggcgcacgaaatgtcatccggtaaagataccccgtctggtcactgggaaatcgccggtgtcccggttctgtttgagtggggatatttctccgatcacgaaaacagcttcccgcaagagctgctggataaactggttgaacgcgctaatctgccgggttacctcggtaactgccactcttccggtacggtcattctggatcagctgggcgaagagcacatgaaaaccggcaagccgattttctatacctccgctgactctgtgttccagattgcctgccacgaagaaacctttggcctggataaactctacgaactgtgcgaaatcgcccgtcaagagctgaccaacggcggctacaacatcggtcgtgttatcgctcgtccgtttatcggtgacaaagccggtaacttccagcgtaccggtaaccgtcacgacctggctgttgagccgccagcaccgaccgtgctgcagaaactggttgatgaaaaacacggtcaggtggtttctgtcggtaaaattgcagacatctacgccaactgcggtatcaccaagaaagtgaaagcaactggcctggacgcgctgtttgacgccaccatcaaagagatgaaagaagcgggtgataacaccatcgtcttcaccaacttcgttgacttcgactcttcctggggccaccgtcgcgacgtcgccggttatgctgcgggtctggagctgttcgaccgccgtctgccggagctgatgtctttgctgcgcgatgacgacatcctgatcctcactgctgaccacggttgtgatccgacctggaccggtactgaccacacgcgtgaacacattccggtactggtttacggcccgaaagtaaaaccgggttcactgggtcaccgtgaaaccttcgcggatatcggccagactctggcaaaatattttggtacttctgatatggaatatggcaaagccatgttctgatggatttgggcggagcgttgactccgcctttgttatgtcacaaaaaggataaaacaatggctaccccacacattaatgcagaaatgggcgatttcgctgacgtagttttgatgccaggcgacccgctgcgtgcgaagtatattgctgaaactttccttgaagatgcccgtgaagtgaacaacgttcgcggtatgctgggcttcaccggtacttacaaaggccgcaaaatttccgtaatgggtcacggtatgggtatcccgtcctgctccatctacaccaaagaactgatcaccgatttcggcgtgaagaaaattatccgcgtgggttcctgtggcgcagttctgccgcacgtaaaactacgcgacgtcgttatcggtatgggtgcctgcaccgattccaaagttaaccgcatccgttttaaagaccatgactttgccgctatcgctgactttgacatggtgcgtaacgcggtagacgcggctaaagcactgggcgttgatgctcgcgtgggtaacctgttctccgctgacctgttctactctccggacggcgaaatgttcgacgtgatggaaaaatacggcatcctcggcgtggaaatggaagcggctggtatctacggcgtcgctgcagaatttggcgcgaaagccctgaccatctgcaccgtgtctgaccacatccgcactcacgagcagaccactgccgctgagcgtcagaccaccttcaacgacatgatcaaaatcgcactggaatccgttctgctgggcgataaagagtaattgtgtttcgctgaaaggcgaacgtcgtgttaagccggagcaggagactgctccggctttttagtatctattcatcaatagcaactgatttatagatttactattatttttcatatggatagaaaataaaatccattcaagtatctattcacgaatctattcatttatgttcagccgtcatccaggaagggcatatcagcaactctggtggacaaccataaatttctgccattttgcttttgatgtttgagctaagccgttccgtcttttcgatctgttttagagaattaatcgagatacctaacattttacttacttcagcaagcgataatttatgcctgatacgcacggcggctagccaggaaatacgctggcttaacattaaattgataatctcccgctcctggttttccagatcgatcatattcccttcctttggtattttaatcagcgagttaccttaccgcccccgctatccacgtcgacaactcccgtagctctttttcctggtccgggaagtcaaccaacagcgcttcgcactcttgttgcagcatatccgcgcggtacaggcagccttgcagtcgcccggcgagggcttccagcggcgcggggttgaggctgtcggtaaacacctgggcgcgggtgatatggcctttttcaacgtcgaaatgcagttccacgccgccccagctaaagcgttcatccagcagatgcgagaatgccggagcctgaccgaagttccattcccagctactctgacgggcaaaggtttcggcgaagtttggcaagtctggcgttttgtccggggagatgatttccgcttctacacgctcgccataatgggcgaaaaaggccttggttatgacctcgcaaacctgctcatgggtgatccccggcagcagctcggtgaggttggtcacgcgggaacgcactgaggtaatgcctttcgccgccagtttctttttatccggattgagatagtttgccaggcggctaaggtcggcattgagcagcaaagtgccgtggtggaagccacgatctttggtttcgcgataggccgagcctgagactttgcggtcgccttcgactgttttcaccaccagatcgttacgcccggacgcttcggcgctgacgccgagcgcgttcagcgcattgagcacaatcgacgtagagatggttttatcgtactccggcttgccagccataaaggtaaagcaggtattgccgagatcgtggaacaccgcgccgccaccgctactgcgccgcgccaggcggacgttatcttcttccatccgccgggtattacactctttccacgggttctgcgcgcgaccaatcactaccgtgtcggcattgcgccagagaaacagaacgcgctgcgtggcgggcatttggcgaaaaatacactcttccaccgccaggttaaaccacgggtcgtaagagtcagagatgagcaggcgtaatgtggacataacgatttcctttcttgtagtaatgggtcactcttttttctcgctttcttcctcttccggcaccggtttgctggcggttaacaggaagggcgattgctgccagcgggtgcgtttaccctgtagcagcgtgcgggtcagcactacgccgattgccagtgagagcagcaacatcaggcgtaaaatgttagtggtgttatccacctgttgggcttcggtggcgagcgtatgggtgtcgagtgtcaggcgcagatagccgagcggtccgtttttacccgcaattggctcgacaatctgctggttaaaatagccgcctgcttttttaccgtcgagcgccagccggtcgcgcacttcgacgctttcgcctgaacgggcgataagatcgccttgttcgtcatacacacccgcgtcgaggatgcggctttcatccgttaactgatcgaggatcgcctgaatgcgtttttcatctggtgagtcggtacgcatcagcggtgcaacgttcagcgttacctgacgcgccagggtgcgggccagttcttccagctgtggattacgttgtcgctggtggttttgactaaaccatgacgctccctgcatcagcgccactaacaaggcaagacagaacaggacaatcactgcccgatgcagccggaatttcagttttgtgcgagccatcttccaccctttgaaaatttgagacttaatgttgccagaagcaatggatacaaggtagcctcatgcgttattttccctgcttcgaacgattttacaggagccttaatgcctaacattacctggtgcgacctgcctgaagatgtctctttatggccgggtctgcctctttcattaagtggtgatgaagtgatgccactggattaccacgcaggtcgtagcggctggctgctgtatggtcgtgggctggataaacaacgcctgacccaataccagagcaaactgggcgcggcgatggtgattgttgccgcctggtgcgtggaagattatcaggtgattcgtctggcaggttcactcaccgcgcgcgctacgcgcctggcccatgaagcgcaactggatgtcgcgccgctggggaaaatcccgcacctgcgcacgccgggtttgctggtgatggacatggattccaccgccatccagattgaatgtattgatgaaattgccaaactggccggaacgggcgagatggtggcggaggtaaccgaacgggcgatgcgcggcgaactcgattttaccgccagcctgcgcagccgcgtggcgacgctgaaaggcgctgatgccaatattctgcaacaggtgcgtgaaaatctgccgctgatgccaggcttaacgcagctggtgctcaagctggaaacgctgggctggaaagtggcgattgcctccggcggctttactttctttgctgaatacctgcgcgacaagctgcgcctgaccgccgtggtagccaatgaactggagatcatggacggtaaatttaccggcaatgtgatcggcgacatcgttgacgcgcagtacaaagcgaaaactctgacccgcctcgcgcaggagtatgaaatcccgctggcgcagaccgtggcgattggcgatggagccaatgacctgccgatgatcaaagcggcagggctggggattgcctaccatgccaagccaaaagtgaatgaaaagacggaagtcaccatccgtcacgctgacctgatgggggtattctgcatcctctctggcagcctgaatcagaagtaattgcctgcccgtcatcctgcgggcggcacagcattaacgaggtacaccgtggcaaaagctccaaaacgcgcctttgtttgtaatgaatgcggggccgattatccgcgctggcaggggcagtgcagtgcctgtcatgcctggaacaccatcaccgaggtgcgtcttgctgcgtcgccaacggtggcgcgtaacgagcgtctcagtggctatgccggtagcgccggggtggcaaaagtccagaaactctccgacatcagccttgaagagctgccgcgtttttccaccggatttaaagagttcgaccgcgtattaggcggcggcgtggtaccgggaagtgccattctgattggcggtaacccaggcgcggggaaatccacgctgttgctgcaaacgctgtgcaaactggcccagcagatgaaaacgctgtatgtcaccggcgaagagtcgctgcaacaggtggcaatgcgcgctcatcgccttggcctgccgactgacaatctcaatatgttgtcggaaaccagcatcgagcagatctgcctgattgctgaagaagagcaaccgaagctgatggtaattgactccatccaggtgatgcatatggcggatgtacagtcatcgcctggtagcgtggcgcaggtgcgtgaaacggcggcttatttgacacgcttcgccaaaacgcgcggtgtggcgattgtcatggttggacacgtaaccaaagatggctcgctggcgggccctaaagtgctggaacactgtatcgactgttcggtgcttttggatggcgatgccgactcccgttttcgcaccttgcgcagccataaaaaccgcttcggcgcggtgaatgagctgggcgtcttcgcgatgaccgaacaggggctgcgtgaagtcagcaacccttcggcaattttcttaagtcgcggagatgaagtgacctccggcagctccgtgatggtggtgtgggaaggaacgcgtccgttgctggtggagattcaggcgctggtcgatcactcgatgatggcgaatccgcgccgcgtggcggtaggtctggagcaaaaccgtctggcaatcctgctggctgtcttgcaccgtcacggtggtctgcaaatggccgatcaggatgtatttgtgaacgtggtcggtggtgtgaaggtaaccgaaaccagtgccgacttagcgttactgctggcgatggtttccagcctgcgtgacagaccgctaccgcaggatctggtggtgtttggtgaagtcgggctggcaggggagatccgcccggtgcccagcggtcaggagcgaatctctgaagcggcgaaacacggttttcgccgggcgattgttccggcggctaacgtgccgaaaaaagcgccggaagggatgcagatttttggcgttaaaaaactctccgacgcgcttagcgtgttcgacgacttataatgagagatacggagggagatatgtcgtcatttgattacctgaaaactgccatcaagcaacagggctgcacgttacagcaggtagctgatgccagcggtatgaccaaagggtatttaagccagttactgaatgccaaaattaaaagccccagcgcgcaaaagctggaggcgttgcaccgttttttggggcttgaatttccccggcagaagaaaaccattggtgtcgtattcggtaagttctacccgctgcataccggacatatctaccttatccagcgcgcctgtagccaggttgacgagctgcatatcattatgggttttgacgatacccgcgaccgcgcgttgtttgaagacagcgccatgtcgcagcagcccacggtgccggatcgtctgcgctggttattgcaaacttttaaatatcagaaaaatattcgcattcatgctttcaacgaagagggcatggagccgtatccgcatggctgggatgtgtggagcaacggcatcaaaaagtttatggctgaaaaggggatccagccggacctgatctacacctcggaagaagccgatgcgccacagtatatggaacatctggggatcgagacggtactggtcgatccgaaacgtacctttatgagtatcagcggtgcgcagatccgcgaaaacccgttccgctactgggaatatattcctacggaagtgaagccgttctttgtgcgtaccgtggcgatccttggcggcgagtcgagcggtaaatccaccctggtaaacaaacttgccaatatcttcaataccaccagtgcgtgggaatatggtcgcgattatgtcttttcacacctcggcggtgatgagatcgcattgcagtattccgactacgataaaatcgcgctgggccacgcacaatacattgattttgcagtgaaatacgccaataaagtggcgtttattgacactgattttgtcactacccaggcgttctgcaaaaagtacgaagggcgtgagcatccgttcgtgcaggcgttgattgatgaataccgtttcgatctggtgatcctgctggagaacaacacgccgtgggtggcggatggtttacgcagcctcggcagttcggtggatcgcaaagagttccagaacttgctggtggagatgctggaagagaacaatatcgaattcgtgcgggttgaagaggacgattatgacagccgtttcctgcgctgcgtggagctggtgcgggagatgatgggggagcagagataaccgcgatgaaacggctcaaaggcgaggtataaaataagttttttgatgagttgaaaacctttctggaagaggctgtcgagattaaacaaggtttgaaaaaacctgcacgggtgacccgctacgaaattgcggatactaaggctgttgtaggccggaaaaggcgttcacgccgtatccggcattcggtgctcaatgcctgatgcgacgcttaccgcgtcttatcaggcctggagattcacaacgtattgaaatttcttggtttgtaggccggataaggcgttcacgccgcatccggcattttacgcattacttcgcaatacgcttgtacttgatacgctttggctccagtgcgtctgcgcccagcgtgcgtttcttgtactcttcgtactcagtaaagttaccttcgaagaactcaactttaccttcatcctggtagtccaggatgtgcgtggcgatacggtcgaggaaccaacggtcgtgcgagataaccatcgcacagcccgggaactccagcagggcgttttccagcgcgcgcagggtttcgatatccaggtcgttggttggttcgtcgagcagcagcatgttgccgccaacctgcagcagcttcgccagatgcagacgaccgcgctcaccaccggaaagttcaccaacgcgtttaccctgatcaacccctttaaagttaaagcggccaacgtaggcgcggcttggcatctcggtgttgccgatcttcataatatccagcccgccggaaacttcttcccaaacggttttgctgttatccattgagtcacggaactgatcaaccgatgccagtttcaccgtttcacctaaagtgatggtgccgctgtccggctgttcctgaccagagatcatacggaacagggtcgatttacccgcgccgttcggaccgatgatcccgacgattgcccctttcgggatcgagaagctcaggtcatcaatcagcaggcgatcaccgtaggatttacgcaggttgctgacttccagcactttatcgcccagacgcggtccaggtggaataaacagttcgttggtttcgttacgtttctgatattcggtgctgttcagctcttcaaagcgtgccagacgtgctttacctttcgactggcggcctttagttccctgacgtacccactccagctctttctcgatcgacttacgacgcgccgcttcttgtgaagcttcctgcgccaggcgctgatctttctgctccagccaggaggagtagttgccttcccacggaataccttcaccgcggtcaagttcgaggatccagcctgcaacgttatcgaggaagtaacggtcgtgggtaatcgccaccacggtgccctcgaagtcgtgcaggaagcgttccagccaggccacggattcggcatccaggtggttggtcggttcgtcgagcagcagcatgtctggtttttccagcagcaggcggcacaacgctacgcgacgacgctcaccaccggagaggttagcgattttcgcgtcccagtccggcagacgtagcgcatccgccgcacgctccagctgtacgttcaggttatgaccgtcgtgagcctgaatgatctcttccagacggccttgttcagcggccagcttgtcaaaatcggcatccggatcggcgtacagcgcatacacttcatccaggcgtttcagggcgttaaccacttcagaaaccgcttcttcaatggactcacgcacggtgtgttccgggttcagctgcggttcctgcggcaggtaaccaatcttgatgtctggctgcggacgcgcttcaccttcgatgtctttatcaatgcccgccataatgcgcagcagggtagacttacccgcgccgttcagacccaggacaccaatttttgccccagggaagaaactcagagagatgtttttcaaaatatgacgtttcggcggaacaactttgccgacacgatgcatggtataaacgaattgagccacgttggacttcgcctctatgtttatcgtgatgatgagttttcaaaggcgaagtgtagcctttttccccgcctaatcccagttggtcgatcaccttcgcagtaaaagtaaaaaagtgtccgtaacgtggcgtaaacggcaatgactggttagcataaatctattacgcggcatgacgctgcattgatgtatttacacttagaggatgcgcttgtggaaaaagccaaacaagttacctggcggctgttggctgccggtgtctgtctgctgacggtcagcagcgtggcgcgagccgactcactggatgagcagcgtagccgttacgcgcaaatcaagcaggcctgggataatcgacaaatggatgtggtcgaacaaatgatgcctggactgaaggattatccgctttatccctacctggaataccgccagatcaccgatgatctgatgaatcaaccggcggtgacggtcactaactttgttcgcgctaaccccacgcttcctcccgctcgcacgctgcaatctcgtttcgtcaatgaactggcgcggcgtgaagactggcgtggcttgttagcctttagcccggaaaagcccggaactaccgaagcgcaatgtaattactactatgcgaaatggaacaccgggcagagtgaagaagcctggcaaggggcgaaagagctgtggctaaccggcaagagccagcctaacgcctgtgacaagttatttagcgtctggcgtgcgtcaggtaaacaagatccgctggcttatttagagcgtatccgtctggcgatgaaagcgggtaacactggcctggtaacagtgctggcagggcagatgcctgccgattaccagactatcgcctcggcaatcatttcactggcgaacaaccctaatacggtactgaccttcgcgcgtacaaccggagcgaccgattttacccgtcaaatggcggcggtggcgtttgccagtgtggcgcggcaggatgctgaaaatgcacggctgatgatcccgtcgcttgcccaggcgcagcagcttaatgaagatcatattcaggagctgcgcgatatcgtcgcctggcgtttgatgggcaacgatgtcaccgacgagcaggcgaaatggcgcgatgacgccattatgcgctcgcaatccacgtcgttgattgaacgccgtgtgcgaatggcacttggcaccggcgatcgtcgcggcctgaatacctggctggcgcgtctgccgatggaagcaaaagagaaagatgaatggcgttactggcaggcggatttattgctggaacgcggacgtgaagctgaagcgaaagagattttgcatcaactcatgcaacagcgtggtttctacccgatggttgcagcacaacgcatcggagaagagtatgagctgaagattgataaagcgccgcagaatgttgacagcgccctgactcaggggccggagatggcgcgcgtgcgcgagttgatgtactggaatctcgataacaccgcgcgtagcgagtgggccaatctggtgaagagcaagtcaaaaacagagcaggctcaactggctcggtatgctttcaataaccaatggtgggatcttagcgttcaggcaacgatcgccgggaagctttgggatcatctggaagagcgattcccgctggcttacaacgatcttttcaaacgttacaccagtgggaaagagatcccgcaaagctatgcgatggcgattgcccgtcaggagagcgcctggaatccgaaagtgaaatcaccggtaggggccagcggcctgatgcagattatgcctggtacagcgacccatacggtgaagatgttctctattcctggttatagcagccctgggcaattgctggatccggaaacgaatatcaacattggcaccagttacctgcaatatgtttatcagcagtttggcaataaccgtattttctcctcagcagcttataacgccggacctggacgggtgcgaacctggcttggcaacagcgccgggcgtatcgacgctgtggcatttgtcgagagtattccgttctccgagacgcgcggttatgtgaagaacgtgctggcttatgacgcttactaccgctatttcatgggggataaaccgacgttgatgagcgccacggaatggggacgtcgttactgatccgcacgtttatgatatgctatcgtactctttagcgagtacaaccgggggaggcattttgcttcccccgctaacaatggcgacatattatggcccaacaatcaccctattcagcagcgatggcagaacagcgtcaccaggagtggttacgttttgtcgacctgcttaagaatgcctaccaaaacgatctccatttaccgttgttaaacctgatgctgacgccagatgagcgcgaagcgttggggactcgcgtgcgtattgtcgaagagctgttgcgcggcgaaatgagccagcgtgagttaaaaaatgaactcggcgcgggcatcgcgacgattacgcgtggatctaacagcctgaaagccgcgcccgttgagctgcgccagtggctggaagaggtgttgctgaaaagcgattgattttgtaggcctgataagacgcggcagcgtcgcatcaggcatcgtgcaccgaatgccggatgcggcgtgaacgccttatccgtcctacaatgcctgatacacggcattatgaaacggactcagcgccaggatcaccgcctggtgatagacgctggcgcgagtgagtttcccggcggtaaacacgccgatcgccccttccttacgaccaatctcatcaataccggtataacgcgacatcacgggaccaagcgcctcaccttcacgcactttttccagaatcaccgcaggcaacggcaaagtagccgaacgcgcctcgccgcgctggctggcgttttcaatcaccacccaactgaaagtgctgtcaccatcaatgccagcttcaatcgccacccaaaaatcagcctctggaagtaaacggcgggcatttgctacccgatttcgtgcgccagcgcgcgtttcctcactgccaaagggctgttccggtacaccgctctcgacggcaacggatgcaatatggcaggatccttcgccgaagatctcgtgaaatgcctgcagaatggcctgaattttagcgggattggtggtcgcacagacaacttggtgcataatcagcattactcagaaaattaacgttacagcagtatacggaaaaaaagcatgttacaggtatacctagtccgccacggtgaaacgcagtggaacgccgagcgacgtattcagggccagtctgacagcccgctgaccgccaaaggtgagcaacaggcgatgcaggtggcaacccgtgccaaagagcttggcattacgcatattatcagtagcgatttaggacgcacccggcgtacggcggaaatcatcgcccaggcctgcggctgtgacatcatctttgattctcgcctgcgtgaattaaacatgggtgtgctggaaaaaagacatatcgattctctgaccgaagaagaagagaactggcgtcggcagctggtcaatggcaccgttgacgggcgtattcctgaaggcgagtcaatgcaggagctcagcgatcgcgtcaatgcggcactggaatcttgccgggacttaccgcagggaagccgaccgctgctggtgagtcatggtattgcactgggatgcctggtgagtacgattctcggattaccagcatgggcagagcgccgcttacgtctgcgtaactgttctatttcgcgcgtggattatcaggaaagcctgtggctggcgtctggctgggtcgttgaaaccgcaggggacatctcgcatctggacgcccctgcattagatgagctgcagcgttaacggcggataggaatcagcagttcacagcgcagattaattgggcgatctcccgctttggcgtcttctgccgggtagtatcgctcaatatcctgacctttacggcgcgtcaggttgagcattggcatgcacgttccgtataccgtcaggataaactcctgcacgccggttcccagaccttcataggtaaacatcacatattcgccgccctgcagcatcaccggatgccccgtcagtacatagccatctgcctgatcctgggctaacgcggtggtatagaatacttcttgttcgtcgtctttatcctgactcggacgcgtttcattcaggccgtagagcactggcggaatggtcggcgcgttgccgagaaaatcgtgccagaactgataacgcatttcatggcggaaatcagagatttgctccagcgaacaggagtagctctgggtaacaccaatcagcggcgtatcttccagggtgacaaatttatgctctggcatagtgaattcacccagacgcagcggcgggcgaataccaaaggcgctccattcaggagaacggcggtaaagtgcaggagtctgggcaaactgcttcttgaatgcgcgggtaaatgtctgttgagagtcgaagcggtattgcagcgcgatgtccagaatcggacgcgcagtcaggcgtagtgcgaccgccgatttcgacaaacgacgagcacgaatatacgcgccaatagcatggccagtgacatctttaaacattctctgtaagtgccacttggaataacctgctttcgccgctacattgtcgagcgacaggggctgatccagatgaccttccagccagattaaaaggtcgcgaataatgccggcctgatccataaaatatcctcatcctttcaacaacgagcacctgacatcaggtaattggataatagcattttttgctgttttagcattcagtgtttttttcttagtagagtatgttttaggtcttgacggaaataaaagtattgagattttgttcttaatcaatatgttatttaccgtgacgaactaattgctcgtgtaatagataaaaatggtaacaatatgaaatacaagcatttgatcctgtctttaagcctgataatgctggggccattggctcatgcagaagagattggttcggtcgacaccgtatttaaaatgatcggcccggatcacaaaattgttgtggaagcctttgacgatcccgatgtgaaaaatgtcacctgttatgtgagccgggcgaaaacaggtggtattaaagggggattgggtctggcggaagatacctccgatgcggctatttcttgtcagcaagtcgggccgattgaactgtcggatcgtattaaaaacggcaaagctcagggcgaggtagtattcaaaaaacgcacgtccctggtctttaagtcgttacaggtcgtgcgcttttatgacgccaaacgcaacgcgctcgcttatctggcttactccgacaaagttgtagaaggttcgccgaaaaacgcgattagcgcggttcctgtcatgccgtggcggcaataacagaggcgatttatgcaacgggaaacggtctggttagtggaagatgagcaagggatagccgacacgctggtctacatgttgcagcaggaaggttttgccgtcgaggtctttgagcgaggcttgccggtgctggataaagctcgccagcaggctcccgacgtcatgattctcgatgttggtttgcctgatatcagcggctttgaattatgccgccagttactggcgctccatccggcgttacctgtactgttcctgacggcccgaagtgaagaggtcgatcgcctgcttgggctggaaattggcgctgacgactatgtggctaaaccgttttcaccccgcgaagtgtgcgccagggtgcgcaccttactgcgtcgggtgaagaagttctcgtcgccgtctcccgtcatccgtattggtcattttgaattgaatgaacccgcggcgcagatcagctggtttgacacgccattaacgctgacgcggtatgagtttttattgctgaagacgttactcaagtcgccaggccgcgtctggtcccgccagcaactaatggatagcgtgtgggaagatgcgcaggacacctacgatcgcaccattgatacccacattaaaacgttgcgtgccaagctgcgcgccatcaaccccgatctttcaccgattaatactcatcgcggcatgggatatagcctgaggggcctgtaatgcgtatcggcatgcggttgctgctgggctattttttactggtggcggtggcggcctggttcgtactggctatttttgtcaaagaagttaaaccgggcgtgcgaagagcaacggaggggacgttaatcgataccgcaacgttgctggcggagctggcgcgtcccgatttgctctctggggacccaacgcatgggcaactggcgcaggcgtttaatcagctacaacatcgcccgtttcgcgccaatatcggtggcattaacaaagtgcgcaatgaatatcatgtctatatgaccgattcgcagggtaaagtattgttcgattcggcaaataaagccgttgggcaggattattcgcgctggaatgacgtctggctaacgttgcgtggtcagtatggtgcgcgcagcacgttgcaaaatcctgccgatcccgaaagttcggtgatgtatgttgccgcgccgattatggacggctcgcggcttattggcgttttgagcgtaggcaaaccgaacgcggcgatggctccggtcattaagcgtagcgagcggcgaattttatgggccagcgccattttgctggggattgcactggtgattggcgcaggcatggtttggtggatcaaccgctccattgcccggctcactcgctatgccgattccgtcactgacaataagcccgttcctcttcctgaactcggcagtagcgagttgcgtaagcttgcgcaggcgctggaaagtatgcgcgtgaagctggaagggaaaaactatattgagcagtatgtttatgcgttaacacatgagctaaaaagcccactggcggcgattcgtggcgcggcggaaattttacgcgaaggtccgccaccggaagtggtggctcgttttaccgacaacattctgacgcaaaatgcgcgtatgcaggcattggtagaaacgttactacgccaggcaagactggagaatcgtcaggaagtcgttctgactgttgttgatgtggcggcattatttcgccgcgtcagcgaagcgcgcaccgtgcagttggcagaaaaaaacatcactctacatgttatgcccactgaggttaatgttgctgctgaaccggcgttactggagcaggcgctggggaatttactggataacgccatcgattttacccccgagagcggtcgcataacgctaagcgccgaagtggatcaggaacacgtcgcccttaaggtgctggataccggtagtggtattcctgactacgcgctgtcacgtatttttgaacgcttttactctttgccgcgtgcaaatgggcaaaaaagcagcggtctggggttggcgttcgtcagtgaggtcgcccgtttgtttaacggcgaagtcacgctgcgcaacgtgcaggaaggtggcgtgctggcctcgcttcgacttcaccgtcacttcacatagcttcaaattcttcccacatagccttcgtatcctgctgccattgcaaaggagaagactatgttgaaatcccccctgttctggaaaatgaccaccttgtttggtgcagtattgctgttgttgattccgataatgctgattcggcaagtgattgtcgaacgtgccgattaccgtagcgatgtggaagatgcgattcgccaaagtaccagcgggccgcaaaaactcgttgggccgcttatcgctattcctgtgaccgagctttatacggtgcaggaagaggataaaaccgtggagcggaaacgaagttttatccatttttggttacctgagtcattgatggttgatggcaatcagaacgtggaagaacgcaagatagggatttataccggtcaggtctggcacagtgatttaacgctaaaagccgatttcgatgtttcgcgtcttagcgagctcaacgcgccaaatatcatcttaggcaagccctttattgtgattagcgtcggggatgcgcgtggtattggtgtggtgaaagcgcctgaagttaacggaacggcgctgaccattgaacccggcaccgggttagagcaaggcgggcagggcgtgcatatccctttacccgaaggggactggcggaagcagaacctgaagctgaatatggccctgaatttaagcggtaccggcgatctttctgtggtgcctgccgggcgtaatagcgaaatgaccttaaccagcaactggccgcatcccagttttttaggtgattttttgccagccaaacgggaagttagcgagtcaggttttcaggcgcaatggcaaagcagctggtttgctaataatctcggtgagcgttttgcttcaggcaatgataccggctgggaaaacttccccgcgtttagcgtcgcagtgacgacgccagccgatcaataccaattaactgaccgggcgactaagtacgctattctgctgattgcgctgacttttatggcgttctttgtttttgaaacgctcaccgcgcaacgtttacacccaatgcaatatttactggtggggctttcattagtgatgttttatttgctcttgctggcgctttctgaacataccggttttaccggggcatggataatcgccagtctgattggggcgttaatgaacggtatttatttgcaggcggtattgaaaggctggcgcaacagcatgttgtttaccctcgcgctgttgttgctggatggtgtgatgtggggactactcaactctgccgatagcgcgctgttgttgggaaccagtgtgctggtggtggcgctggccggaatgatgtttgtgacccgtaatatcgactggtatgcgttttcactgccgaaaatgaaagccaataaagaagttacaacggacgatgaattacgtatctggaaataaggttgaaaaaaaaacggcgctaaaaagcgccattttttttgacggtggtaacgccgattaatcttccagatcaccgcagaagcgataaccttcaccgtgaatggtggcgatgatttccggcgtatccggcgtagattcgaaatgtttacgaatacggcggatcgtcacgtctacagtacggtcgtgcggtttcagctcacggccggtcattttcttcagcagttcagcacgagactgaattttgcctgggttttcacagaagtgaagcatggcgcggaactcgctgcgcggcagcttgtactgctcgccatcagggccgatcaacgaacggctgttgatgtccagttcccaaccattgaacttgtagctttcaacgctacgacgttcttcgctgacagtacccagattcatggtacgggacagcaggttgcgtgcacgaatcgtcagttcacgcgggttgaacggtttggtgatgtagtcatctgcaccgatttcgaggccgagaattttatcgacttcgttgtcacggccagtcaggaacatcaacgcaacattcgcctgctcgcgcagttcacgcgctaacagaagaccgttcttacccggcagattgatatccatgatcaccaggttgatgtcatattcagagaggatctgatgcatttccgcgccatctgtcgcttcgaaaacatcatagccttccgcttcgaaaatacttttcaacgtgttgcgtgttaccaactcgtcttcaacgataagaatgtgcggggtctgcatgtttgctacctaaattgccaactaaatcgaaacaggaagtacaaaagtccctgacctgcctgatgcatgctgcaaattaacatgatcggcgtaacatgactaaagtacgtaattgcgttcttgatgcactttccatcaacgtcaacaacatcattagcttggtcgtgggtactttccctcaggacccgacagtgtcaaaaacggctgtcatcctaaccattttaacagcaacataacaggctaagaggggccggacacccaataaaactacgcttcgttgacatatatcaagttcaattgtagcacgttaacagtttgatgaaatcatcgtatctaaatgctagctttcgtcacattattttaataatccaactagttgcatcatacaactaataaacgtggtgaatccaattgtcgagatttattttttataaaattatcctaagtaaacagaaggatatgtagcattttttaacaattcaaccgttagtacagtcaggaaatagtttagccttttttaagctaagtaaagggctttttctgcgacttacgttaaggatttgtaaattcgcaccgcgtaataagttgacagtgatcaccctgttcgcggtcatttggtcaagaagagtggcaatatgcgtataacgattattctggtcgcacccgccagagcagaaaatattggggcagcggcgcgggcaatgaaaacgatggggtttagcgaactgcggattgtcgatagtcaggcacatctggagccagccactcgctgggtcgcacatggatctggtgatattattgataatattaaagttttcccgacactggttgaatcgttacacgatgtcgatttcactgtcgccaccactgcgcgcagtcgggcgaaatatcattactacgcaacgccagtagaactggtgccgctgttagaggaaaaatcttcatggatgagccatgccgcgctggtgtttggtcgcgaagattccgggctgactaacgaagagttagcgttggctgacgttcttactggtgtgccgatggtggcggattatccttcgctcaatctggggcaggcagtgatggtctattgctatcaattagcaacattaatacaacaaccgacgaaaagtgacacaacggcagaccaacatcaactgcaagctttacgcgaacgagtcatggcattgctgacgactctggcagtggcagatgacataaaactggtcgactggttacagcaacgcctggggcttttagagcaacgagacacggcaatgttgcaccgtttgctgcatgatattgaaaaaaatatcaccaaataaaaaacgccttagtaagtatttttc

SEQ ID NO: 15 - DNA, 6750 bp, synthetic construct
  source 1..6750: mol_type = other DNA
gaactccggatgagcattcatcaggcgggcaagaatgtgaataaaggccggataaaacttgtgcttatttttctttacggtctttaaaaaggccgtaatatccagctgaacggtctggttataggtacattgagcaactgactgaaatgcctcaaaatgttctttacgatgccattgggatatatcaacggtggtatatccagtgatttttttctccattttagcttccttagctcctgaaaatctcgataactcaaaaaatacgcccggtagtgatcttatttcattatggtgaaagttggaacctcttacgtgccgatcaacgtctcattttcgccaaaagttggcccagggcttcccggtatcaacagggacaccaggatttatttattctgcgaagtgatcttccgtcacaggtatttattcggcgcaaagtgcgtcgggtgatgctgccaacttactgatttagtgtatgatggtgtttttgaggtgctccagtggcttctgtttctatcagctgtccctcctgttcagctactgacggggtggtgcgtaacggcaaaagcaccgccggacatcagcgctagcggagtgtatactggcttactatgttggcactgatgagggtgtcagtgaagtgcttcatgtggcaggagaaaaaaggctgcaccggtgcgtcagcagaatatgtgatacaggatatattccgcttcctcgctcactgactcgctacgctcggtcgttcgactgcggcgagcggaaatggcttacgaacggggcggagatttcctggaagatgccaggaagatacttaacagggaagtgagagggccgcggcaaagccgtttttccataggctccgcccccctgacaagcatcacgaaatctgacgctcaaatcagtggtggcgaaacccgacaggactataaagataccaggcgtttccccctggcggctccctcgtgcgctctcctgttcctgcctttcggtttaccggtgtcattccgctgttatggccgcgtttgtctcattccacgcctgacactcagttccgggtaggcagttcgctccaagctggactgtatgcacgaaccccccgttcagtccgaccgctgcgccttatccggtaactatcgtcttgagtccaacccggaaagacatgcaaaagcaccactggcagcagccactggtaattgatttagaggagttagtcttgaagtcatgcgccggttaaggctaaactgaaaggacaagttttggtgactgcgctcctccaagccagttacctcggttcaaagagttggtagctcagagaaccttcgaaaaaccgccctgcaaggcggttttttcgttttcagagcaagagattacgcgcagaccaaaacgatctcaagaagatcatcttattaatcagataaaatatttctagatctagacccgtagtctgcaaatccttttatgattttctatcaaacaaaagaggaaaatagaccagttgcaatccaaacgagagtctaatagaatgaggtcgaaaagtaaatcgcgcgggtttgttactgataaagcaggcaagacctaaaatgtgtaaagggcaaagtgtatactttggcgtcaccccttacatattttaggtctttttttattgtgcgtaactaacttgccatcttcaaacaggagggctggaagaagcagaccgctaacacagtacataaaaaaggagacatgaacgatgaacatcaaaaagtttgcaaaacaagcaacagtattaacctttactaccgcactgctggcaggaggcgcaactcaagcgtttgcgaaagaaacgaaccaaaagccatataaggaaacatacggcatttcccatattacacgccatgatatgctgcaaatccctgaacagcaaaaaaatgaaaaatatcaagttcctgagttcgattcgtccacaattaaaaatatctcttctgcaaaaggcctggacgtttgggacagctggccattacaaaacgctgacggcactgtcgcaaactatcacggctaccacatcgtctttgcattagccggagatcctaaaaatgcggatgacacatcgatttacatgttctatcaaaaagtcggcgaaacttctattgacagctggaaaaacgctggccgcgtctttaaagacagcgacaaattcgatgcaaatgattctatcctaaaagaccaaacacaagaatggtcaggttcagccacatttacatctgacggaaaaatccgtttattctacactgatttctccggtaaacattacggcaaacaaacactgacaactgcacaagttaacgtatcagcatcagacagctctttgaacatcaacggtgtagaggattataaatcaatctttgacggtgacggaaaaacgtatcaaaatgtacagcagttcatcgatgaaggcaactacagctcaggcgacaaccatacgctgagagatcctcactacgtagaagataaaggccacaaatacttagtatttgaagcaaacactggaactgaagatggctaccaaggcgaagaatctttatttaacaaagcatactatggcaaaagcacatcattcttccgtcaagaaagtcaaaaacttctgcaaagcgataaaaaacgcacggctgagttagcaaacggcgctctcggtatgattgagctaaacgatgattacacactgaaaaaagtgatgaaaccgctgattgcatctaacacagtaacagatgaaattgaacgcgcgaacgtctttaaaatgaacggcaaatggtatctgttcactgactcccgcggatcaaaaatgacgattgacggcattacgtctaacgatatttacatgcttggttatgtttctaattctttaactggcccatacaagccgctgaacaaaactggccttgtgttaaaaatggatcttgatcctaacgatgtaacctttacttactcacacttcgctgtacctcaagcgaaaggaaacaatgtcgtgattacaagctatatgacaaacagaggattctacgcagacaaacaatcaacgtttgcgcctagcttcctgctgaacatcaaaggcaagaaaacatctgttgtcaaagacagcatccttgaacaaggacaattaacagttaacaaataaaaacgcaaaagaaaatgccgattatggtgcactctcagtacaatctgctctgatgccgcatagttaagccagccccgacacccgccaacacccgctgacgcgccctgacgggcttgtctgctcccggcatccgcttacagacaagcttgcatgtacgggcagtaagtcagaagactgaagatgttccggaagccataaaaggaaaacccccactatctttcttacgaacttggcggaacgacgaaagatagtgggggcctcacagaatacgggtaaagtataatgaaaccgtaccagagattcaaccctgtgcagtgtataaatgacggcacgcagacctgccagcttgtggcaggtctgctttttttggatccttgtttcgtctgaaagtcctcactatgattaaatatgattaacagaggatcggatatgcaaatgaaaaacaataccgcacaggcaacaaaagtaattaccgcgcatgtgccattacctatggctgataaagtcgaccagatggccgccagactggaacgctcccggggctggattatcaaacaggcgctttctgcatggcttgcccaggaggaggagcgtaatcgcctgacgctggaagccctggacgatgtgacatccggacaggttatcgaccatcaggctgtacaggcctgggcggacagcctcagtactgacaatccgttaccggtgccacgctgatggagctgaagcatgagtaccgtttatcaccgtccggctgacccttcaggcgatgacagttacgtgcgcccgttgtttgccgatcgttgccaggccggttttccttcgcctgccactgattatgctgagcaggaactggatctgaacagctattgcatcagcagacctgcagccaccttctttctgcgcgccagcggtgaatcgatgaaccaggctggcgtgcagaatggtgatctgctggtagtggacagggccgaaaaaccacaacacggggacatcgttatcgctgagatcgacggtgagttcaccgtcaaacgactgctgttgcgcccacgcccggcactggagccggtttcagacagcccggagttccgcacactgtatccggaaaacatctgtatttttggtgttgtcactcacgtgatacacaggacgcgggagttacgctgatggtgactgatatgaaagaccaaaaggacaagcagaccggcgacctgctggccagccctgacgctgtacgccaagcgcgatatgccgagcgcatgaaggccaaagggatgcgtcagcgcaagttctggctgaccgacgacgaatacgaggcgctgcgcgagtgcctggaagaactcagagcggcgcagggcgggggtagtgaccccgccagcgcctaaccaccaacatatggtttgggggcgtgacagttattgcaggggttcgtgacagttattgcaggggggcgtgacagttattgcaggggttcgtgacagttagtacgggagtgacgggccctcgaccgatgcccttgagagccttcaacccagtcagctccttccggtgggcgcggggcatgactatcgtcgccgcacttatgactgtcttctttatcatgcaactcgtaggacaggtgccggcagcgctctgggtcattttcggcgaggaccgctttcgctggagcgcgacgatgatcggcctgtcgcttgcggtattcggaatcttgcacgccctcgctcaagccttcgtcactggtcccgccaccaaacgtttcggcgagaagcaggccattatcgccggcatggcggccgacgcgctgggctacgtcttgctggcgttcgcgacgcgaggctggatggccttccccattatgattcttctcgcttccggcggcatcgggatgcccgcgttgcaggccatgctgtccaggcaggtagatgacgaccatcagggacagcttcaaggatcgctcgcggctcttaccagcctaacttcgatcactggaccgctgatcgtcacggcgatttatgccgcctcggcgagcacatggaacgggttggcatggattgtaggcgccgccctataccttgtctgcctccccgcgttgcgtcgcggtgcatggagccgggccacctcgacctgaatggaagccggcggcacctcgctaacggattcaccactccaagaattggagccaatcaattcttgcggagaactgtgaatgcgcaaaccaacccttggcagaacatatccatcgcgtccgccatctccagcagccgcacgcggcgcatctcgggcagcgttgggtcctggccacgggtgcgcatgatcgtgctcctgtcgttgaggacccggctaggctggcggggttgccttactggttagcagaatgaatcaccgatacgcgagcgaacgtgaagcgactgctgctgcaaaacgtctgcgacctgagcaacaacatgaatggtcttcggtttccgtgtttcgtaaagtctggaaacgcggaagtcccctacgtgctgctgaagttgcccgcaacagagagtggaaccaaccggtgataccacgatactatgactgagagtcaacgccatgagcggcctcatttcttattctgagttacaacagtccgcaccgctgtccggtagctccttccggtgggcgcggggcatgactatcgtcgccgcacttatgactgtcttctttatcatgcaactcgtaggacaggtgccggcagcgcccaacagtcccccggccacggggcctgccaccatacccacgccgaaacaagcgccctgcaccattatgttccggatctgcatcgcaggatgctgctggctaccctgtggaacacctacatctgtattaacgaagcgctaaccgtttttatcaggctctgggaggcagaataaatgatcatatcgtcaattattacctccacggggagagcctgagcaaactggcctcaggcatttgagaagcacacggtcacactgcttccggtagtcaataaaccggtaaaccagcaatagacataagcggctatttaacgaccctgccctgaaccgacgaccgggtcgaatttgctttcgaatttctgccattcatccgcttattatcacttattcaggcgtagcaccaggcgtttaagggcaccaataactgccttaaaaaaattacgccccgccctgccactcatcgcagtactgttgtaattcattaagcattctgccgacatggaagccatcacagacggcatgatgaacctgaatcgccagcggcatcagcaccttgtcgccttgcgtataatatttgcccatggtgaaaacgggggcgaagaagttgtccatattggccacgtttaaatcaaaactggtgaaactcacccagggattggctgagacgaaaaacatattctcaataaaccctttagggaaataggccaggttttcaccgtaacacgccacatcttgcgaatatatgtgtagaaactgccggaaatcgtcgtggtattcactccagagcgatgaaaacgtttcagtttgctcatggaaaacggtgtaacaagggtgaacactatcccatatcaccagctcaccgtctttcattgccatacg

SEQ ID NO: 16 - DNA, 7129 bp, synthetic construct
  source 1..7129: mol_type = other DNA
gaactccggatgagcattcatcaggcgggcaagaatgtgaataaaggccggataaaacttgtgcttatttttctttacggtctttaaaaaggccgtaatatccagctgaacggtctggttataggtacattgagcaactgactgaaatgcctcaaaatgttctttacgatgccattgggatatatcaacggtggtatatccagtgatttttttctccattttagcttccttagctcctgaaaatctcgataactcaaaaaatacgcccggtagtgatcttatttcattatggtgaaagttggaacctcttacgtgccgatcaacgtctcattttcgccaaaagttggcccagggcttcccggtatcaacagggacaccaggatttatttattctgcgaagtgatcttccgtcacaggtatttattcggcgcaaagtgcgtcgggtgatgctgccaacttactgatttagtgtatgatggtgtttttgaggtgctccagtggcttctgtttctatcagctgtccctcctgttcagctactgacggggtggtgcgtaacggcaaaagcaccgccggacatcagcgctagcggagtgtatactggcttactatgttggcactgatgagggtgtcagtgaagtgcttcatgtggcaggagaaaaaaggctgcaccggtgcgtcagcagaatatgtgatacaggatatattccgcttcctcgctcactgactcgctacgctcggtcgttcgactgcggcgagcggaaatggcttacgaacggggcggagatttcctggaagatgccaggaagatacttaacagggaagtgagagggccgcggcaaagccgtttttccataggctccgcccccctgacaagcatcacgaaatctgacgctcaaatcagtggtggcgaaacccgacaggactataaagataccaggcgtttccccctggcggctccctcgtgcgctctcctgttcctgcctttcggtttaccggtgtcattccgctgttatggccgcgtttgtctcattccacgcctgacactcagttccgggtaggcagttcgctccaagctggactgtatgcacgaaccccccgttcagtccgaccgctgcgccttatccggtaactatcgtcttgagtccaacccggaaagacatgcaaaagcaccactggcagcagccactggtaattgatttagaggagttagtcttgaagtcatgcgccggttaaggctaaactgaaaggacaagttttggtgactgcgctcctccaagccagttacctcggttcaaagagttggtagctcagagaaccttcgaaaaaccgccctgcaaggcggttttttcgttttcagagcaagagattacgcgcagaccaaaacgatctcaagaagatcatcttattaatcagataaaatatttctagacccgtagtctgcaaatccttttatgattttctatcaaacaaaagaggaaaatagaccagttgcaatccaaacgagagtctaatagaatgaggtcgaaaagtaaatcgcgcgggtttgttactgataaagcaggcaagacctaaaatgtgtaaagggcaaagtgtatactttggcgtcaccccttacatattttaggtctttttttattgtgcgtaactaacttgccatcttcaaacaggagggctggaagaagcagaccgctaacacagtacataaaaaaggagacatgaacgatgaacatcaaaaagtttgcaaaacaagcaacagtattaacctttactaccgcactgctggcaggaggcgcaactcaagcgtttgcgaaagaaacgaaccaaaagccatataaggaaacatacggcatttcccatattacacgccatgatatgctgcaaatccctgaacagcaaaaaaatgaaaaatatcaagttcctgagttcgattcgtccacaattaaaaatatctcttctgcaaaaggcctggacgtttgggacagctggccattacaaaacgctgacggcactgtcgcaaactatcacggctaccacatcgtctttgcattagccggagatcctaaaaatgcggatgacacatcgatttacatgttctatcaaaaagtcggcgaaacttctattgacagctggaaaaacgctggccgcgtctttaaagacagcgacaaattcgatgcaaatgattctatcctaaaagaccaaacacaagaatggtcaggttcagccacatttacatctgacggaaaaatccgtttattctacactgatttctccggtaaacattacggcaaacaaacactgacaactgcacaagttaacgtatcagcatcagacagctctttgaacatcaacggtgtagaggattataaatcaatctttgacggtgacggaaaaacgtatcaaaatgtacagcagttcatcgatgaaggcaactacagctcaggcgacaaccatacgctgagagatcctcactacgtagaagataaaggccacaaatacttagtatttgaagcaaacactggaactgaagatggctaccaaggcgaagaatctttatttaacaaagcatactatggcaaaagcacatcattcttccgtcaagaaagtcaaaaacttctgcaaagcgataaaaaacgcacggctgagttagcaaacggcgctctcggtatgattgagctaaacgatgattacacactgaaaaaagtgatgaaaccgctgattgcatctaacacagtaacagatgaaattgaacgcgcgaacgtctttaaaatgaacggcaaatggtatctgttcactgactcccgcggatcaaaaatgacgattgacggcattacgtctaacgatatttacatgcttggttatgtttctaattctttaactggcccatacaagccgctgaacaaaactggccttgtgttaaaaatggatcttgatcctaacgatgtaacctttacttactcacacttcgctgtacctcaagcgaaaggaaacaatgtcgtgattacaagctatatgacaaacagaggattctacgcagacaaacaatcaacgtttgcgcctagcttcctgctgaacatcaaaggcaagaaaacatctgttgtcaaagacagcatccttgaacaaggacaattaacagttaacaaataaaaacgcaaaagaaaatgccgattatggtgcacagaggccatcacatgaataatcattactcatttattggcggctccgagggctcttggcgagtcaccagttgtgaaacactcattggcatacctcttgagattgtggagagggtcaatgtagttaatatgccctcaacaaatttgatcgaacgtggcacctgggtgcttcaaggctttacaagcaatgttcggtacgccgaacggcatgagatcaatcaacttcgcgcaaaacaggaggaattaaaccgtcctacgtcatcatgcgctgcactcattcccataaagaaaagtccagaatggtgggcaatgtcacaagaggaacggcgcgaaatttttgaagcaaagtcccaccacacagaaattggactggcttatcttccagaaatcgcaagacagctacatcattctcgcgacctcggagagccgtttgacttcttaacctggttcgagtttgctccggagcatactgcaatattcaacaaactgttggctcagttacgctcatcaaaagagtgggaatatgtcgaacgcgagatagatatccgactggtgaaaaatgtctaacaacaggttcaaatcgctcgctccgcaagcttgtgacaaatcaccctcaaccttccagatcaaatgtgacgaaccacccttaaatctgtgacaaatcaccctcaaccttccagatccaatgtgacgaaccacccttaaagctgtgacagataaccctcaaccttccagatcaaatgtgacgaaccacccttaaatctgtgacagataaccctcaatttacccaccatggtttatcccttgatacatttagatgtgaatagattattcgtgcaaatgcttttctcgcattaaactaaatgccttttcaattcaagtaaatgcttttcttattcaatcaaatgctttttacatgcacctgaatgcctgatcatggtgtagtggagatccattgtagcagagtggaaaggagaagaatgtccactataccggccgctatagtgtatcgaatctacccggtatagtggattatgcgcccggtacagtggatggattacccgacatagtgtatttctccccctgtacagtggatgctgatccgcttgaatcctgcatatataaatcatctcaatcatccttcctgatttattttcaaaaaacgttcgttcaggttattagccagcgaggccaatctgtcattattacttcagaccaaacctgaggaatcaaaaatggataaatactttgaccgtagcggaatggcaatcgataacgctaagattaagtgtattgattcagtaaaaggcaccggggaatatatttaccgtgttacttgcaataaatgcaatggacgtggcgaacgcaatcacttttataagagccgctgtattgcctgtaatgccactggctatagcctggtcactacccgtacctgttacaccctgactgcactgtatcgcatatacccagaagctgctcgcaagatctcagccgctcaggcagcagagcgtcaacgtgctgttcaatcaaagacttccgcgttcaacctctggtgtcagaaccaccaagaactggtggacgccatcacgcagcaagacggcgagaacagttttttgaacagcctgaagtcgacgttatcacgcaaatttccattaagtgataaacaactgacggtcgcagccagaatcctcgggatgtaatttttcaaattaacccgaggcccctgtatgctagtcacattcagagtagcctcttacccgcttaaatgcaaggagaagaaggccatgaaactgccgaaccaacccgttgttttgtgcgtattgatagtatgtcttacgctgttgatattcacctcgaccgatgcccttgagagccttcaacccagtcagctccttccggtgggcgcggggcatgactatcgtcgccgcacttatgactgtcttctttatcatgcaactcgtaggacaggtgccggcagcgctctgggtcattttcggcgaggaccgctttcgctggagcgcgacgatgatcggcctgtcgcttgcggtattcggaatcttgcacgccctcgctcaagccttcgtcactggtcccgccaccaaacgtttcggcgagaagcaggccattatcgccggcatggcggccgacgcgctgggctacgtcttgctggcgttcgcgacgcgaggctggatggccttccccattatgattcttctcgcttccggcggcatcgggatgcccgcgttgcaggccatgctgtccaggcaggtagatgacgaccatcagggacagcttcaaggatcgctcgcggctcttaccagcctaacttcgatcactggaccgctgatcgtcacggcgatttatgccgcctcggcgagcacatggaacgggttggcatggattgtaggcgccgccctataccttgtctgcctccccgcgttgcgtcgcggtgcatggagccgggccacctcgacctgaatggaagccggcggcacctcgctaacggattcaccactccaagaattggagccaatcaattcttgcggagaactgtgaatgcgcaaaccaacccttggcagaacatatccatcgcgtccgccatctccagcagccgcacgcggcgcatctcgggcagcgttgggtcctggccacgggtgcgcatgatcgtgctcctgtcgttgaggacccggctaggctggcggggttgccttactggttagcagaatgaatcaccgatacgcgagcgaacgtgaagcgactgctgctgcaaaacgtctgcgacctgagcaacaacatgaatggtcttcggtttccgtgtttcgtaaagtctggaaacgcggaagtcccctacgtgctgctgaagttgcccgcaacagagagtggaaccaaccggtgataccacgatactatgactgagagtcaacgccatgagcggcctcatttcttattctgagttacaacagtccgcaccgctgtccggtagctccttccggtgggcgcggggcatgactatcgtcgccgcacttatgactgtcttctttatcatgcaactcgtaggacaggtgccggcagcgcccaacagtcccccggccacggggcctgccaccatacccacgccgaaacaagcgccctgcaccattatgttccggatctgcatcgcaggatgctgctggctaccctgtggaacacctacatctgtattaacgaagcgctaaccgtttttatcaggctctgggaggcagaataaatgatcatatcgtcaattattacctccacggggagagcctgagcaaactggcctcaggcatttgagaagcacacggtcacactgcttccggtagtcaataaaccggtaaaccagcaatagacataagcggctatttaacgaccctgccctgaaccgacgaccgggtcgaatttgctttcgaatttctgccattcatccgcttattatcacttattcaggcgtagcaccaggcgtttaagggcaccaataactgccttaaaaaaattacgccccgccctgccactcatcgcagtactgttgtaattcattaagcattctgccgacatggaagccatcacagacggcatgatgaacctgaatcgccagcggcatcagcaccttgtcgccttgcgtataatatttgcccatggtgaaaacgggggcgaagaagttgtccatattggccacgtttaaatcaaaactggtgaaactcacccagggattggctgagacgaaaaacatattctcaataaaccctttagggaaataggccaggttttcaccgtaacacgccacatcttgcgaatatatgtgtagaaactgccggaaatcgtcgtggtattcactccagagcgatgaaaacgtttcagtttgctcatggaaaacggtgtaacaagggtgaacactatcccatatcaccagctcaccgtctttcattgccatacg

SEQ ID NO: 17 - DNA, 249803 bp, Escherichia coli
  source 1..249803: mol_type = genomic DNA
cggagtggacgcatcactggtgttcgggttgtcatgccaatggcactgcccggtagctaaatgcggaagagataagtgctgaaagcatctaagcacgaaacttgccccgagatgagttctccctgaccctttaagggtcctgaaggaacgttgaagacgacgacgttgataggccgggtgtgtaagcgcagcgatgcgttgagctaaccggtactaatgaaccgtgaggcttaaccttacaacgccgaaggtgttttggcggatgagagaaagattttcagcctgatacagattaaatcagaacgcagaagcggtctgataaaacagaatttgcctggcggccttagcgcggtggtcccacctgaccccatgccgaactcagaagtgaaacgccgtagcgccgatggtagtgtggggtctccccatgcgagagtagggaactgccaggcatcaaattaagcgaaaggccatccgtcaggatggcctttttgcattggcgcagaaaaaaatgcctgatgcgacgctgcgcgtcttatactcccacatatgccagattcagcaacggatgcggtttccccaacttgcctacttccatacgtgtcctccttaccagaaatttatccttaagctcctcaataaccattttcctgctaactaaattcatggttaaggttgcataatgatacgcaacaaatgtataacattttctttaccaaaagaaataaacaaaagcgaccaacaaaagcatcggattacggcaggagacataatggcatggctgaaagtactgtaacggcagacagcaaactgacaagtagtgatactcgtcgccgcatttgggcgattgtgggggcctcttcaggtaatctggtcgagtggttcgatttctatgtctactcgttctgttcactctacttcgcccacattttcttcccttccgggaacacgacgactcaactactacaaacagcaggtgtttttgctgcgggattcctgatgcgcccaataggcggttggctatttggccgcatagccgataaacatggtcgcaaaaaatcgatgctgttatcggtgtgtatgatgtgtttcggatcgctggttatcgcctgcctcccaggttatgaaactataggtacgtgggctccggcattattgcttctcgcgcgtttatttcagggattatctgttggcggagaatatggcaccagcgccacctatatgagtgaagttgccgttgaagggcgcaaaggtttttacgcatcatttcagtatgtgacgttgatcggcggacaactgctagccctactggttgtcgtggttttacaacacaccatggaagacgctgcactcagagagtggggatggcgtattcctttcgcgttaggagctgtgttagctgttgtggcgttgtggttacgtcgtcagttagatgaaacttcgcaacaagaaacgcgcgctttaaaagaagctggatctctgaaaggattatggcgcaatcgccgtgcattcatcatggttctcggttttaccgctgcgggctccctttgtttctataccttcaccacttatatgcagaagtatctggtaaatactgcgggaatgcatgccaacgtggcgagtggcattatgactgccgcattgtttgtattcatgcttattcaaccactcattggcgcgctgtcggataagattggtcgccgtacctcaatgttatgtttcggttcgctggcagccatttttaccgttcctattctctcagcattgcaaaacgtttcctcgccttatgccgcttttggtctggtgatgtgtgccctgctgatagtgagtttttatacatcaatcagtggaatactgaaggctgagatgttcccggcacaggttcgcgcattaggcgttggcctgtcatatgcggtcgctaatgctatatttggtggttcggcggagtacgtagcgttgtcgctgaaatcaataggaatggaaacagccttcttctggtatgtgaccttgatggccgtggtggcgtttctggtttctttgatgctacatcgcaaagggaaggggatgcgtctttagtgacgggtcagttgccagacggtatagccggtgcttgcaccggcgacatcccaggccaaatccttccagctccagccgctcccttcggggcggctatcccaaagctcttttgacgcccccaaactgacagagaacatcaatccaaacatggcactgcgatcccggctcatcccctgatgctgtgaatattcatttccggcggcggaaagcatcgccgaggcaataaagtgttgagctttatcctgcccgctccagctatcgttagccatatggctgcatccagaaagtaacaatagcgaacagacaaaaagaatacgcaaaacgtggcctccaaaaaacaaaccccgtacaggacggggttgtgattacaggatgcggctaattaatcggtcgatgcggatacggcgcaaacggcggatgagtttacgaaccttcaccggataatcggcaatactttgcagatcgcgatagtgcttaacgatggtggtatgctcgcggatcagctccagttctttctctcgctgcggcgcaagctccagttgtggatcgtggatcaaaatggcgttttccagatccagacgccaggcgcgcgggttcaggttattaccggtgatcaacatccacttatcatcaacccacatcccttttaggtgataggtgttgtcgtcatctttccataaccgaaccactagctggtcagtattgacgtaatactgcaaacggctcaggaaacgacgcagattgatctcatagagataaggcaatgcgccaattatcttgaaaggttcatcttccggaatgtagaagtcgttcgcggttttatcaccaacaataatttcgacctttttcccttcgcgcagcaactggataatattgcgcacaaggattgctggcaggttgaagtatggcgtacagatggttagtttctgctcggcacaaggcataagatggaaaatggtcttgttcaacagactcgatttccccagccccactagcggcgttacggaaagctgatcgttgtcggcatcgccctggaaatgataagcggcatcacgcagctcctggcggaacagacgaatatcgttcttgatttccgggctttttggccgattaacatcatccagacgattaacgccgcggccattcataatattctgtgtaacccattcaaacataatgtctgacatcttacggttacggatcagatgataacggtcgtagcgatatttatcgtgctgatgcaggtaaacatcgttcaggctggcaccgctataaagtacgctatcgtcgatgataaagcctttaaagtgcagaacaccaagggcttcacgggtattgattggaacgccataaaccggaacatctacgcccggattttcctgcgccatgcggcagtaccagtcagcgttagtgttagatgccgcagcgccaatgcgtccacgttgtgcacgatgccagtcgaccagcacccgcacatccagttccggacgctgccttttagcttcatacaacgcgttcagaatgcctttgccaccgtcatcctgttcgagatacagggcgacaatgcaaatgcgctgcttcgcgctggctattttttccagcagcgtctcccggaagtcggcgggagcgtaaaagaaatcgacatcatcaactgattgagaaatcttgggtagttgggcaaggtgttgttgatgtttattacgcttaaattttgacaacatcacagtgcatttcttctctgttcattgaagggtcctctgtgcaatgcagacgacataagcgggcaataataacaccagtcccgattaagtggtcaacatttccagtaccttactcatgattcctcgcgttgggcaagatttagcgtaagcccaacgatcccctcttcgagctggatatcaacgttaaacccgagcttgcgggctagcgccaccatgccacgattgtttggcatcgtaataccattcagacgttgtagtccgtgatctcgcgtataggtaatcaacttttccattaagcgtcgacctaagcctaaccctttgagatccgagcgaaccagcacagcaaattcggcatcgatgttatcagggtcggagatcgcacgcgtgacgccgaggatctcttccgtttgatcaatacgtcgtaccgctacaaacgccatttcccgatcgtagtcgatctgcgtcatgttggctaaatcttcatgagtaaattcgttgatctcgctaaagtagcggtaataaagatcttctttggtgactcgcgaaatgaattgctgaagttgtggctcatcttctggcaaaatcgggcggaacaagcagcgttcaccgtttttcaattctacccattcttccagctgatgcggataagggcgcactgccagccgactctcgttatcgccttcaaacggcgagatatccagcgtgacatccagcgcggtaaattcactgccagaagccagcaaaggatgaatatccagacgctgaatttccgggcaatcgacaatcaagttggaaacctgcaccagaagctggctcaagcctgcaacatccaatgggcgtagcgcactgcgtgcacgaatctttttacttttgatcccctgaataaccagatagcgggccaggttcatgttcagcggcggtaacgcgacgacggcttgatcttcaggacgccactccacaccgccttcgcccagcatgatcaacggcccgaaaaccggatcgtgctcaaccacaacccgcaactcctgagcaccagcacggttagccatactttgcaccaacaggccgtggacccgtgcctgcggccaggccatttttacgcgatcgaaaatggcgtttgccgcttgctggacttcattggctgtacgcaggtacagcatgacgccctgaacttccgatttatgtggaatatccggcgaacgcaatttcagcgccaccggataaccaatctgttcggcaatatgcaccgcttcggtgctatcgctggcaatccaggtggggagcgtgttcatgccatatgcttgcaggataggctgaacttcatgggtatcgagtgacgttgctccttcggcaatcgcctgttgcaacagaagatgcgcttctgcggtattggaggtcagattgctgggcaacgccggcgtttcgcgtagttgcttctgattacgccggtactccaccatatgcataaaagcagtgatggttccttccggggtacggtaggtcggcagcccggcttcgctgaataatcgtcgtgcctcttgcgaggaatgttcgccacaccagttcgtcagcagagaaacatacttgctgcggggatgatgctttaccgcttcaattaatacttgcgcgctttctgttgcgggagcagcggcgctgggcgaatgaataaccatcagcgcatcaaaatcctggctgtggagcagaatgtccagcgttttaatatagtgctcactgctggcgtcatcgcgcagatcgagcgggttagagattgccacatgtcctggcagtgcatcgcgcagtttctggcaggtttcttcgcttagtgttgccagcttgccattgcgtgaccataaggcatcaagcgccagcgcggcaggcgcagcaccgttgctgataatcatcaaccggtcgccacgcagcgggcgcatatggctaagggtttccaccgccgaaaacagttcgtgggtgtcctgtacccgcaacaaaccggcacgctgaatagccgcatcccacgccggatccattcctgccgtggtgttcaacagacgttgagccgccgggctacgtccgcttttaatcaccagaatcggtttgttgcgagaggcactacgggccgccgaaacaaagcgtcgcgcgtcgcttaactgttcgagatagagcaggatggcgctggttttactgtcgcgtgccagatagtcaagcaattcatcaacgtcgatatccaggctgtcgccgagcgcaataaagtaggaaaagcccatctcacgctgttgcgcccagtcgaggatggtgttggagacggcagccgattgtgaaataaacgccagcttgccgcgtttaatcggcacaggcgaaaagctggcattcagaccttgccagggagccagtaaacccagactgtttggtcctagcaggcgcatgttatggcgcagggcgcaggcgcggagatcttcgtgttgcgatgccggggcggaaagaataatgcaggttttacagcctttctcgccgagctcttccagaagagcaagattacggctggcattagtacataaaaccgcaaggtcgggtgtaaagggcaagctggcaatatccggccaggccaacacacccaacaccgctttccaggctggcgtcaccgggagtaccggtccgttaaagcctcccgccagcaggttacgcatcatcaggtaacctgcgcgattgggtttcatcgatgcgccaattaccgcaatcgattttggtcgcagtagtgcttccagtcctcgctgactcataccggtctcccgcagaagtgaccgaatgattttaaacgctttctaactgttctgctgtgatgctacccagatgttgcgtttttcctgccagatagcgtgttttaaagcgggtaaaatgctcgcctaaccctgccgccgccccggtatcgccggccatatctaacagtgcgatggctacctcggcagtacaatattggccttcagcctgggcttcacgcaggcgataggcagaaagccgggaaagatcgacggaaatgacgggaagattatccagatacggacttttacgaaacatcttgcgagcttccggccaggtaccatcgagcatgataaacagcggtggcttaccggcaggtggtgtgaagatcacttcccgttgctcatcagcatacgaggcgggaaagaccaccattggttgatagtccgggttttgtaccagatccagcaaatcctgcgagggttcggtacgcgaccattgaaacgcaacggtatcaggcaaaatatcagcaatcagacgcccggtattactgggcttcattggctcggtgtcgaacatcagcaaacagaagcgactttttgcttgtgctggggtaattgtcgaacagagacataatttctctggcaaaagacagcgttggcagcgacgaacgcgattaccgcgggcaagaaaaggacgtgttgcgcgcgcaatacgctcggcgcgtaactggagaacagcgttttcggtcataagagagcgtcgaaaaaacgccattgtcgcagaggagaaaacggggcacaagatgcgccccggtaagattaaagagattcgttcagccagctgtcgaacggcgctttcggtactgcgccattaagcatgtcgacaacctgaccgtttttgaaaatcatgatcgtcggtatactacgaattccaaagcgactgctcaattcacgttcagcttcggtattcactttcacaaagcgcactttaccgctacgctcttgcgcgacatcttcaaaaattggtgcgaaattacggcaggggccgcaccacggtgcccagaagtcgatcaccacaggtagatcatccttcagcaatttgtcgagtgtttcaccggtcgcattaatcacctctccgtcaaacaagtcgtgaccgcagcgtccgcattttgccgcatcttcgatccgatcgtcgggaatgcgattgatggcctgacaatgggtacaaacggtattcataactaacctcgggatgagtaaggagacttatcggcaacgacgccggtatgtttctaatatgttacatattatcggggacattgttccagacaacaatctgttttattcaataggtatgatagtcgcaggctttggtacgaaatcatggcgaaccgcgcggacttcgggtaatctgcgcgcttcgcgcagcgctggtggagaaaagcatgaacgatgaaatgaaaggtaaaagcggcaaggtcaaagtgatgtatgtccgcagtgatgatgattctgataaacgtacccacaacccgcgtaccgggaaagggggcgggcgtccaggaaaatctcgtgctgacggtggccgtcgccccgcccgcgatgacaaacagagtcagccccgtgaccgcaagtgggaagattcgccgtggcgcacggtttcccgcgcgccgggtgatgagacgccggaaaaggccgatcacggtggcatcagtggtaaaagttatattgatccagaagttttgcgtcgtcagcgtgcggaagaaacccgcgtctacggcgaaaatgcatgtcaggcactgttccagagccgtccggaagcgattgttcgcgcctggtttatccagagcgtaacgccacgttttaaagaagccttgcgctggatggcggcaaaccgcaaagcgtaccatgtggtggatgaagcggaattgacaaaagcgtcaggcacggaacatcacggcggcgtttgcttcttgatcaaaaagcgtaacggtacaaccgtgcagcagtgggtaagccaggcaggcgcgcaggattgtgtactggcgctggaaaacgaatctaacccgcataacctgggtggcatgatgcgcagctgcgcgcacttcggcgtgaaaggcgttgtggtgcaggatgcggcactgctggagtcgggggcggctatccgtaccgcagaaggcggcgcagagcacgttcagccgattactggcgacaacattgttaacgtgctggatgatttccgtcaggcaggttacaccgtagtgaccacttccagcgagcagggtaaaccgctgttcaaaaccagtctgccagcgaaaatggtactggtgctgggtcaggaatatgaagggttaccggatgccgcacgcgatccgaacgatctgcgcgtgaagattgacggtacgggcaacgttgccgggctgaatatctctgtcgcaaccggcgttttgcttggtgaatggtggcgtcagaataaagcctgataaatcagccgggtggcaactctgccatccggcatttccccgcaaatttactcactctctgccggtaatactggcatccagtcaatcggcgtctcgccacgttgttccagccactgatttgccagcacaaaatggttgcagccaaagaatccacgatgcgccgaaagcggcgacggatgcggtgctttcagtacatgatggcgttgcttatctataatcgcccctttcttttgcgcatgtgatccccacaacaaaaacaccacgccttcgcggtgctggttaatcaggctgatgactttatcagtaaacgtctcccaaccgaggctggcgtgggaatgcgcctgacctgcgcgaaccgtcaacacagtattgagcagcagaacgccctgacgcgcccagctttcgagatagccatgattagggcgggtgaagcccggaatagtattttccagctctttatacatattcagcagtgacggaggagtggcgattccggggcgaacggaaaatgccagcccatgcgcctgtcccggtccgtgataaggatcctggccgagaatcaccactttaacgtcacccaactcggtaaagcggaacgcgttaaagacatctttttgtggtggatagatagtgacgccggactgccgctcgctggcgacggtctgaagggtattaagaaaatagggttgctgcttctcttcagccagcacgtcatgccaggttaattcgttagccatctcgctctcctgcgaatcttcaatccgcctagcttaactgcttatttctacagaacaaaatcatgctcattttttagacttaaacgagtgcaaaaaaatgtaaattggtaaaatttcacacccgcataagttgatgtaaaacaataaaatccatttgcgaccacaatcgatgtgtggtttttattgatttaaatcaaggaatcaagggttgttgaggagtatatatacactcaagcaacaatggttttaccaattggccgcgacaggctgaataaatcaaataattttgccggggaggcatcacatgattacaggtatccagattactaaagccgctaacgacgatctgctgaactctttctggctgctggacagcgaaaaaggcgaagcgcgttgcatcgttgcaaaagcaggttatgcagaagatgaagtggttgcagtaagcaaactgggtgacattgaataccgtgaagttccagtagaagtgaaaccagaagttcgcgttgaaggtggtcaacacctgaacgttaacgttctgcgtcgtgaaactctggaagatgcagttaagcatccggaaaaatatccgcagctgaccatccgtgtatcaggttatgcagttcgctttaactctctgactccggaacagcagcgcgacgttatcgctcgtacctttactgaaagcctgtaaggcttaagtagcaagttactaagcggaagagggcgacctcttccgcttttttaattaatagaaaatgcgtaccgcgcaatagatcagcagcagcgcgagcacgatatttaactggcgaccatactggcgaaacaatcgctgaaacagatgccccgccagcgcccagcacacattaccaaacgtcccaatcatcgccagcaaaacgctgacgccaactacccagcttagcgcctgtgtttgcggcagaacaaacgtcgacagtgccgtaacaccgtacaaaatgattttgacgttcacaaactgcaaagcaaagctggcccaaaagctgattggttttgcctgaagtccgtcttcctttgttgggctggtggcgattttccacgccagccagacaatatatgccgcccccgcccaactcaaaaggtgtaccgctgccgggtcaatcactgccagtgaaaatgaaatgcccgcacacagtaatatcacaatcaaaaatcccagactcatccctgccagcacgcgggtactttgacgaaatccatgcgacgtagcagagctaagggcgagaatattgttcggtcctggcgtcatggcggtaatcagggtgtaagtccaaaaagcacttaaaagggtcggtgtcacttgttatctcctctgttttggtagacagtacccgacacggaacatttaaaaaaatgaatgtttttacattctaaattcgatattttcgataggtttggggttatggatctgcgccgttttattacacttaaaaccgtggtggaagagggttcctttttgcgagcttcgcaaaaattgtgctgtacacaatcgacggtgacttttcatattcagcagcttgagcaggagttctcggtacaattgtttgagaaaattggtcgacgaatgtgccttacccgcgaaggaaaaaagttgctgccgcacatctatgaacttacccgagtgatggatacgcttcgtgaggctgcgaaaaaagagtcggatccggacggggaactacgcgttgtttcaggcgaaacgttgctctcttaccgaatgccgcaggtgttgcagcgttttcggcaacgcgctccaaaagtgcgtttatcgttgcagtcgctgaactgttacgtgatccgtgatgcgctactgaatgatgaggccgatgtcggggttttttatcgcgtagggaatgatgatgttctgaaccgacgagagttgggtgaacaaccgctggtgctggtggcttcaccgcaaattgcagatatcgattttactgagccgggaagacataacgcctgtagctttattatcaacgaaccacaatgtgtcttccggcagatatttgagagcacgctgcgccagcggcggatcacggtggaaaacaccattgagcttataagtatcgaaagcatcaagcgttgtgtcgcggcaaatatcggggtcagttacctgccgcgctttgcagtgggaaatgaacttgcgagtggcgaattaatcgaattgccttttggcgaacagacgcagaccattacggcaatgtgcgctcaccatgccggaaaagcggttagtccggcgatgcacacttttattcagtgtgttgaagagtgttttgtggctggataaaaataatgccgggcttaaacccggcattgagattactcttctgtcgtttgcggtggcacgcccgttccgcttggtttacggcgcttaccaatatttttggtatcgcgatggcgttttttcactcgcggcttctctttctctttaacttttttcttctcggcgcgttttgccagtactttcttcgatggcttgccggtctgcttctcgcttggcgcacgcgttttcgggcgtaactcatcaataacgcgagctttaattggctcttcaatataacggccaactttgcccagcagcaaatggtcatgggcttccaccagcgaaatcgcggtgcctttacgaccggcgcgcgcggtacgtccgatacggtgcaaataagtatcgccactgcgcggcatatcgaagttaaagacgtggctgacgtcaggaatgtcgataccgcgcgcggcaacatcggttgcaaccagtacgtttacgcgaccttcggtcaaacgcttgatcgcttcgttacgcttgccttgtaccatctcaccttcgagatagcagttgttgatgcccgcttcgcgcagccagtttgccagctcatgcacacgttcacgcttacgcacaaacacaattgagcgggtcgcttcaggctgttttaacagatgcaccagcaacgcggttttatgctcaagatcatcggcgcggtaataccactgatgaatttttttgcgctcacgggtggacggattcgcagaaacttccaccggatcctccagcagacgctcggcaaagtcctgaatcgcatcgccttccagcgttgccgaaaagagcagggtctgtttacgccagcgagtttcgccagcaatatgttcgatatcctgagcaaagcccatatccagcatacggtctgcttcgtcgaggatcagcgtttcaaccgcgcggcaatcgaagttctcttcttttatgtattgcagcagacgtccggtcgtggcgaccacgatgtcctgattttcgctgaacacttccgcgtggttcatataggctacgccgccggtgatggtggcgatatccagatgcgtatgtttcgccagttcgcgggcatgatcggccacctgcatcgccagctcgcgagttggggtgaggatcaaaatacgcggcggaccggatttcttacgcgggaaatcgagcaggtgctgcaacgctggcagcagatacgccgccgttttaccggtgcctgtcggcgcagaaccgagtacatcacggccatcgagcgcaggcggaatggcggcagcctgaatggcggtcgggcgagtgaaacctttatcctggagggcttccagcaggctttcgtcgagttcaagttcggaaaaagtcgttacagtcatgttctacctctgtgtggggcgctgattatagacgttacggctgcaatcttcatctgtttgtatggatatcgcttctcgggtattgttctcacccggtgctatcgccgtttttcctgcaaggttttattttcatgtcacagtctacatccgtgcttcgtcgtaatggatttacttttaaacagttttttgttgctcacgatcgctgtgcgatgaaagtgggaacggatggcattttgctgggcgcatgggcaccggtggctggggtgaaacgttgccttgatatcggcgcgggtagcgggttgctggcattaatgctggcgcagcgaaccgatgacagcgtgataattgatgccgttgagctggaaagtgaagctgccgcgcaggcgcaggaaaatatcaaccagtccccgtgggcagagcggattaacgtccatacggcggatattcagcagtggatcacacagcagacagtacgcttcgatttaatcatcagtaacccaccttactatcagcagggagtagagtgcgcgacccctcaacgggaacaggctcgctataccactacgcttgatcacccatcgctgctgacctgtgcggcggagtgcattaccgaagagggatttttctgcgtagtgctgccagagcagattggtaatggttttacggagctggcattaagcatgggctggcatttacgtttgcggacggatgtggcggaaaacgaagcgcgactgccgcatcgggtgctgctggcattctccccgcaggcgggagaatgctttagcgatcgcttagtcattcgtgggccagaccagaactattccgaagcgtatacggcgctgacccaggctttttatctgtttatgtaatgattgccgggggaaaggatcgacggaccggaatgggtgagcagttccggataatccagcgtgaaatgcaggccacgactctccttgcgcatcatcgcacagcgaacaatcaattccgcaacctgcaccagattacgcagctccagcaaattatttgagacgcggaaatgggcgtaatattcgtctatttcttgttggagcatggttatccgccgcagggcgcgttccaggcgcttcgttgtgcgcacaatgccaacgtaatcccacataaacagccgtagctcgtgccagttatgctgaattactacccgttcgtcagggttctcaacgcggctttcatcccacggcggtaacgtactgacgccgtgggcataaggcatacgtctggtgatatcttctgccgccgaccagccatagaccagacactccagcaatgaattcgaggccatgcggttagcgccgtgtaagccggtataactcacctcgccaatggcatacaagccctcgacgtccgtacgcccatgatcatcaaccattacaccaccgcaggtatagtgtgcagcaggcacaatcggtatcggttcttgtgtgagatcaatccccagcccgagcaatttttcataaatcatcgggaaatgctggcgaataaaatcggcgggcttatggctgatgtcgaggaacatacaatctgcgccgaggcgtttcatttcatggtcaatggcgcgggcgacaatatcgcgcggggccagttcgccgcgctcatcaaaatcgggcataaaacgcgtgccatccgggcgcttgagataagcgccttcgccgcgcagtgcttccgttaacaggaaattgcgtgcctgtgggtgatacagtgcggtagggtggaactgattaaattcgagattggcaacccgacagcccgcgcgccacgccatagcaatgccatcgccagaagaaatatccggattggtggtgtactgatacaccttcgacgcaccgccggttgccagtaccactgcttttgcgtggcaggtttccaccgtttctttatttcggttccatacccacgcgcctacaacccgtcgcgtgcccggcaggccaattttgtcagagacaatcagatcaaccgcgttgctgcgctccagcacacgaatattcggatggttctgcgccttgctcaccagcgtggattgtacttctctaccggtggcgtcggcggcatgaagaatacgacggtgactatgtccaccttcacgggtcagatggtagctttcttcgccattcggttgaacgtgggtatcaaacaaaaccccttggtcaattaaccattgcacacaggatcgtgcattgctggcgacaaattcaactgcatggcgatcgcaaataccagccccggcaatcaatgtgtcttccacatgcgagtcaatgctgtcagtttcatcaaacacggcggcaataccgccctgggcataaaatgttgaaccttccgttaccgggcctttacttagaacgatgacctgatgctggtcagccaggcgtagcgccagtgaaagtccggctgcgccgctaccgataatcaacacgtcacatgaatgttctgggagagtattcattttctttgtttaatttactaaacaccgtttggtcagcatagcatcatgttgtgcgaataaacacctgctattttaatatttgttacagtggctaaacacgctgacgcagggcggcgagaaaaagagaagttactggctggtggaggattaggtggtgaaataaaaaggccgttgggttactcttcaggcagttaaatgggcatttctacacagataatgcgatgttcagattctgtagacttataatgatagataatgatccgtctacagcatgacaaacaaaaacagatgcgttacggaactttacaaaaacgagacactctaaccctttgcttgctcaaattgcagctaatggagtggcgtttcgatagcgcgtggaaatttggtttggggagactttacctcggatgagcgagcagttaacggaccaggtcctggttgaacgggtccagaagggagatcagaaagcctttaacctactggtagtgcgctatcagcataaagtggcgagtctggtttcccgctatgtgccgtcgggtgatgttcccgatgtggtacaagaagcttttattaaagcctatcgtgcgctggattcgttccggggagatagcgctttttatacatggctgtatcggattgctgtaaatacagcgaaaaattacctggttgctcaggggcgtcgtccaccttccagtgatgtggatgccattgaagctgaaaacttcgaaagtggcggcgcgttgaaagaaatttcgaaccctgagaacttaatgttgtcagaagaactgagacagatagttttccgaactattgagtccctcccggaagatttgcgcatggcaataaccttgcgggagctggatggcctgagctatgaagagatagccgctatcatggattgtccggtaggtacggtgcgttcacgtatcttccgagcgagggaagctattgataacaaagttcaaccgcttatcaggcgttgacgatagcgggatactggataagggtattaggcatgcagaaagaacaactttccgctttaatggatggcgaaacgctggatagtgagctgcttaacgaactggctcataacccagaaatgcagaaaacctgggaaagctatcacttaatccgtgactcaatgcggggtgatactcccgaggtgctccatttcgatatctcttcacgcgtgatggccgccattgaagaagagccagtacgtcaaccggcgacattgatcccggaagcccagcctgcgccgcatcaatggcagaaaatgccattctggcagaaagtacgtccgtgggcggcacagcttacccaaatgggcgtagcagcatgcgtatcgcttgcagttatcgttggcgtccagcactataatggacaatctgaaacgtcccagcagcccgaaacgccggtatttaatacactgccgatgatgggtaaagccagcccggtaagcctgggagtaccttctgaagcgaccgcaaacaatggtcaacagcagcaggtacaggagcagcgtcgtcgcattaatgcaatgttgcaggattacgaactgcaacgccgactccactctgaacagcttcagtttgagcaggcgcaaacccagcaagccgctgtacaggtgccaggaattcaaactttaggaacgcaatcgcagtaatgaagcaactttggtttgccatgtcattagtgacaggtagcctgttattctctgctaacgcctcggccactcccgcgtccggggcgttattacagcagatgaacctggccagtcagtcactgaattacgagctgtcattcatcagcatcaataaacagggtgttgagtctctgcgttatcgacatgcacgcctcgataaccgtcctcttgcacaattgttgcaaatggatggcccgcgccgggaagtggtacagcgcggcaatgaaatcagctattttgaaccgggacttgaaccgttcacgcttaatggcgattacattgttgattctctgccatcgcttatctataccgatttcaaacgcctttctccttactacgactttatctccgtcgggcgcacgcgtattgctgatcgtctttgcgaagtcattcgcgtggttgcccgagatggtacacgctacagctacatcgtgtggatggacaccgaatcgaaattaccgatgcgggttgatctccttgatcgcgatggtgaaacgctggaacaatttcgcgtgattgcttttaacgtcaatcaggatatcagcagcagtatgcagacgctggcgaaggcaaatttgccgccgttgctttctgttcctgtaggtgaaaaagctaaattcagctggacgccaacctggttgccacagggttttagcgaagtttccagtagtcgacgtccgctaccgacgatggacaacatgcctatcgaatcacgtctctattccgacggattattcagcttctcggtaaacgttaaccgcgctacgccatcgagcaccgatcagatgttgcgcaccggacgcagaaccgtcagtacaagcgtacgtgataacgccgaaatcaccattgtcggtgaactgccgccgcaaacggcgaaacgcattgccgagaatattaagttcggggcagcgcaatgatcaaagagtgggctaccgtcgtctcctggcaaaacgggcaggcgctggtcagttgtgatgttaaagcttcatgcagcagctgcgcttcacgcgccggttgcggtagccgcgtgttaaataaacttggcccgcaaaccacacataccattgtcgtaccctgtgatgagccgttagtgccggggcaaaaagtggaattggggatcgccgaaggcagcctgcttagctccgcattactggtttatatgtcgccgctggtgggattattcctcatcgcttcgctatttcagctactctttgcttctgacgtcgcagcattatgtggtgcggtcctcggcggtattggcgggttcctgattgcgcgcggctactcgcgtaagtttgctgcccgggcagaatggcaaccgatcatcttaagcgtggcattgccgcctggccttgtgcgatttgaaacatcttcggaagacgcgagccagtgatttcactggctttgttgcattttgcataacaaatgcgaggacgtttccagataccacaatccatacggtatgaacatttcctcgcctcaatgttgtagtgtagaatgcggcgtttctattaatacagacgttaagctcagaacagcgacttctaaaagcctggttaaccgggcattaaggcacaataatcatactttatgaagaatatacgtaacttttcgatcatagctcacattgaccacggtaaatcgacgctgtctgaccgtattatccagatctgcggtggcctgtctgaccgtgaaatggaggcgcaggttctcgattccatggatcttgagcgtgagcgtggcataaccatcaaagcgcaaagcgtgacgctggactacaaagcgtctgacggcgaaacctatcagctgaactttatcgacaccccgggccacgttgacttctcctatgaagtttcccgttcgctggctgcctgtgaaggtgcattgctggtggtcgacgccgggcagggcgtagaagcgcaaaccctggcaaactgctacaccgccatggaaatggatctcgaagtggtgccggtactgaacaagattgacctgccggcagccgatcctgaacgcgtggcggaagaaattgaagatatcgtcggcatcgacgccaccgacgcggtgcgctgttcagcgaaaaccggcgttggcgtgcaggacgttctcgaacgtctggtgcgcgacattccgccgccggaaggcgatccggaaggcccgttgcaggcactaattatcgactcatggttcgacaactacctgggcgttgtttcacttatccgtattaaaaacggcaccctgcgtaagggcgacaaagtgaaagtcatgagtaccgggcagacctataacgccgaccgtctgggcatcttcacgccgaaacaggttgaccgcactgaactgaaatgtggcgaagtaggctggctggtatgtgcgattaaagatatccacggcgctccagtcggcgataccttaacgctggcgcgtaatccggcagaaaaggcgctgcctggctttaagaaagtcaaaccgcaggtatacgccggtctgttcccggtaagttccgacgactatgaagccttccgtgacgcgctgggtaaactcagcctgaacgatgcttcactgttctatgagccggaaagctccagcgcgctgggctttggtttccgctgcggcttcctcggcctgctgcacatggagatcatccaggaacgtctggaacgtgaatacgatctggatctgatcaccactgcgccgaccgtagtgtatgaagttgaaaccacgtcaagagaagttatttacgtcgacagtccatccaagctgccagcggtaaataacatctacgaactgcgcgagccgattgccgaatgtcacatgctgctgccgcaggcatatctcggcaacgttattacgctgtgcgtagaaaaacgcggcgtgcagaccaatatggtttaccacggtaatcaggtggcgctgacgtacgagatcccgatggcggaagtggtgctcgacttcttcgatcgcctgaaatctacctcgcgtggttatgcgtctctggattacaacttcaaacgcttccaggcgtccgacatggtacgtgtagacgtattaatcaacggtgaacgtgttgatgcgttggcgctgatcacccaccgtgataattcgcaaaaccgcggtcgcgagttggtggagaagatgaaagatctgatcccacgccagcagtttgatatcgccattcaggcagcgattggtacgcacattattgcgcgatccaccgtgaaacagctgcgtaaaaacgtactggctaaatgttatggcggcgatatcagccgtaagaaaaagctgctgcagaagcagaaagaaggtaagaaacgcatgaagcagatcggtaacgtcgagctgccgcaggaagcgttcctcgccattctgcacgtcggcaaagacaacaaataacccttaggagttggcatggcgaatatgtttgccctgattctggtgattgccacactggtgacgggcattttatggtgcgtggataaattctttttcgcacctaaacggcgggaacgtcaggcagcggcgcaggcggctgccggtgactcactggataaagcaaccctgaaaaaggttgcgccgaagcctggctggctggaaaccggtgcttctgtttttccggtgctggctatcgtattgattgtacgttcgtttatttatgaaccgttccagatcccgtcaggttcgatgatgccgactctgttaatcggtgattttattctggtagagaagtttgcttatggcattaaagatcctatctaccagaaaacgctgatcgaaaccggtcatccgaaacgcggcgatatcgtggtctttaaatatccggaagatccaaagcttgattacatcaagcgcgcggtgggtttaccgggcgataaagtcacttacgatccggtctcaaaagagctgacgattcaaccgggatgcagttccggccaggcgtgtgaaaacgcgctaccggtcacctactccaacgtggaaccgagcgatttcgttcagaccttctcacgccgtaatggtggggaagcgaccagcggattctttgaagtgccgaaaaacgaaaccaaagaaaatggaattcgtctttccgagcgtaaagagacactgggtgatgtgacgcaccgaattctgacagtgccgattgcgcaggaccaggtggggatgtattaccagcagccagggcaacaactggcaacctggattgttccgccgggacaatacttcatgatgggcgacaaccgcgacaacagcgcggacagccgttactggggctttgtgcctgaagcgaatctggtcggtcgggccacggctatctggatgagcttcgataagcaagaaggcgaatggccgactggtgtgcgcttaagtcgcattggcggcatccattaatagccatcttcgttcacgttgtcgccgttatggcgacaacgtgaattatttatgagataaatctcccgtggctaacgacatcccccgtcgttgtgtatagaatattcccccgaagtttaaggttggcacctccaggttgccacggcacacgaaacagcgttggtccccatataccggtaaactgaaactgcagcgaagcagttagcagagccatgtatatcaggtctgtttcgtgtgctgaattgttgacgcatttatttattggtatcgcatgaaccccatcgtaattaatcggcttcaacggaagctgggctacacttttaatcatcaggaactgttgcagcaggcattaactcatcgtagtgccagcagtaaacataacgagcgtttagaatttttaggcgactctattctgagctacgttatcgccaatgcgctttatcaccgtttccctcgtgtggatgaaggcgatatgagccggatgcgcgccacgctggtccgtggcaatacgctggcggaactggcgcgcgaatttgagttaggcgagtgcttacgtttagggccaggtgaacttaaaagcggtggatttcgtcgtgagtcaattctcgccgacaccgtcgaagcattaattggtggcgtattcctcgacagtgatattcaaaccgtcgagaaattaatcctcaactggtatcaaactcgtttggacgaaattagcccaggcgataaacaaaaagatccgaaaacgcgcttgcaagaatatttgcagggtcgccatctgccgctgccgacttatctggtagtccaggtacgtggcgaagcgcacgatcaggaatttactatccactgccaggtcagcggcctgagtgaaccggtggttggcacaggttcaagccgtcgtaaggctgagcaggctgccgccgaacaggcgttgaaaaaactggagctggaatgagcatcgataaaagttactgcggatttattgccatcgtcggacgtccgaacgttggcaaatccacattgttgaacaaactgctggggcagaagatctccatcacctcccgcaaagcgcaaacaactcgtcaccgcattgtggggatccatactgaaggcgcgtatcaggcgatctacgttgatacccctggcctgcatatggaagaaaaacgcgctattaaccgcctgatgaacaaagcggcgagcagctctattggcgacgttgagctggtgatttttgtcgttgaaggcacccgctggacgccggacgacgaaatggtgctcaacaaactgcgcgatggcaaagcgccggtgatcctcgcggtgaacaaagtggataacgtgcaggaaaaagccgatctgctgccgcacttacagttcctggcaagtcagatgaacttcctcgatatcgtgccgatctctgctgaaaccgggctgaatgtcgacactatcgcagcaatcgtgcgtaagcacctccctgaagcgacccatcacttcccggaagattacatcaccgatcgctcacagcgttttatggcgtctgaaatcatccgcgaaaaactgatgcgtttcctcggcgctgaactgccgtactccgtgaccgtggagatcgaacgtttcgtctctaacgaacgcggtggttatgacatcaatggtttgattctcgttgagcgtgaagggcagaagaagatggttattggcaacaaaggggccaagatcaaaaccatcgggattgaagcgcgtaaagacatgcaggaaatgttcgaagcgcctgtccaccttgaactgtgggtaaaagtgaaatccggttgggccgacgacgaacgcgcactgcgcagtctcggttacgttgacgatctttaagagtcactccgatggaaggctggcagcgcgcatttgtcctgcatagtcgcccgtggagcgaaaccagcctgatgctggacgtcttcacggaggaatcgggtcgcgtgcgtctggttgccaaaggcgcacgctctaaacgctctactctgaaaggtgcattacagcctttcacccctctcttgctacgtttcggcgggcgtggcgaagtcaaaacgctgcgcagtgctgaagctgtctcgctggcgctgccattaagcggtatcacgctttacagcggtctgtacatcaacgaacttctctcccgcgtactggaatacgagacgcgcttctctgaactctttttcgattacttgcactgcattcagtctcttgcaggtgccactggtacgccagaacccgcgctgcgccgctttgaattggcactgctcgggcatctgggctatggcgtcaattttacccattgtgcgggtagcggcgagccggtagatgacaccatgacgtatcgttatcgcgaagaaaaagggtttatcgcaagcgtcgttatcgacaataaaacgttcaccggaaggcagttaaaagcgttaaacgcgcgggaatttcctgacgcagacacactacgcgccgcgaaacgctttacccgcatggcgcttaagccgtatcttggcggtaaaccattaaagagcagggaactgttccggcagtttatgcctaagcgaacggtgaaaacacattatgaatgatgaggattgtcatggctgaattactgttaggcgtcaacattgaccatattgcaacgctgcgtaacgcacgcggtactgcttacccggatccggtgcaggcggcgtttattgctgagcaggcgggagcggacggcattaccgtgcatttacgtgaagatcgccgccacattactgaccgtgatgtgcgcatcctgcgtcagacgctggatacccgcatgaatctggagatggcggtgaccgaagagatgctggcgatcgccgttgagacgaagccacatttttgctgtctggtaccggaaaagcgtcaggaagtaacaaccgaaggcggcctggacgtcgcagggcagcgtgacaaaatgcgcgatgcctgcaaacgtctggcagatgccgggatccaggtttctctctttatcgacgccgatgaagagcagatcaaagctgcggcagaggttggcgcaccgtttatcgagatccacaccggttgctatgctgatgccaaaactgacgccgaacaggcgcaagagctggcgcgtatcgccaaagccgcgacctttgccgctagtctcggtctgaaagttaacgctggtcacggtctgacctatcacaacgtgaaagctattgccgccatccctgagatgcatgaactgaatatcggtcatgccattattggtcgtgcagtgatgaccggactgaaagatgcggtggcagaaatgaagcgtctgatgctggaagcgcgtggctaatggcaatattaggtttaggcacggatatcgtagagatcgctcgcatagaagcagtgatcgcccgatccggtgagcgcctggcacgccgcgtattaagcgataacgaatgggcaatctggaaaacgcaccaccagccggtgcgttttctggcgaagcgttttgctgtgaaagaagccgcagcaaaagcgtttggcaccgggatccgcaatggtctggcgtttaatcaatttgaagtattcaatgatgagctcggcaaaccacggctacggctatggggtgaggcattaaaactggcggaaaagctcggcgttgtaaatatgcatgtaacgctggcagatgaacgccactatgcttgtgccacggtaattattgaaagttaaaataataccgttctctttaaaaagtaaaacccccgaactggtaaggaacgggggttttactttttaactttaattttgtgcagcatgcaccctcaacaacagcgattatggatcagtgtacttatcttttacaagcaacttgcaatctttagcataaaaactcgagcctttacgaagaaagcaatattgatggaaagattaacgtgaccgccaattcgtaagtacattaaaattggcttcgttattgaagattttgctgtgctttacaccatgccacagaattcccccattgaaacgagtggtgtcgtcaaagctctggtgtggagtgcagcatgcaccctcaataactcgcacgttcagttttggggagatgtaagggctaatctgaacggctgcattccttgtttaaggaaaaacgaatgactgattgccgatacctgattaaacgggtcatcaaaatcatcattgctgttttacagctgatccttctgttcttataacacaaggaaacgtacttaaggtgcgtccggtgaaccaatcggacgcgcctttaataactataaataagtgtcttggcagatactatataaattaacttagtgaatgattatgctaatgtcatcaattaaataaatataatggcgttaaggcttcccagtaatataattaatactctacttccagagtagaatattaaattttatccgcgtggtgcatcagcacaaatttatcccacaactgttcttctgtctcgacatgcgccggatctttcacaatagtattggggatcgggcacaccttctggcaggttggtgtctcgtagtgccctacgcattcggtacacttatcgctgttaatctcgtagatatgatctcccattgaaatcgcctcattcgggcattcgggttcacacatatcacaattgatgcattttttagtgattaacaacgccataaggaaactctcaaaacaacacaaaccgggcgggcattatacgcgcattctttactcagaccagttttttcaccagcgcttcactatgacgaatacgttctggtgccagttccagatcctgctgaatcagcgcaatgaacagcaaatccgttaacattccctgagcgtgacaagcagagattgaagcgctgtttgtcgcttgttcttcggcaatggtatacaggcaatgagaagcacgctgttgcagggcattcggagtaaagccggtaatcgccagcacttttccgcccactcgcagcatctcatctgccgccaggtttaactcgcgtcgtacaccggtgtaggaaatggctaataacagatcgtcaggggacgacgcctgtactgttgcgagtagcgcatgcatatcgcgcactgcggcagcattgaagccaatcttcatcagtttccaggcaaagttttgcgccaccagacccgaagcgccaataccggtcagaattatccgccgcgcagagcgcaacattgttacgcattcatgcagtttctcttcactattaacgtttagcgttgcgtacatagcggcagtattttctttaatcagtttttcgccgaccagccgtaacggatcatcaccgcggatttggttatgaatgggcacggagggcgattccggctggcttgccagcgcttcactcaacgccaacttaagcgccggaaaacctttatagccgagtttttgcgcgaacttcacgacgctggactgactgactccggcttcgttggccagttgctgagagcttaaatggcgcgccgtatcaggttgtagcagcagataatccgccagttttttatcactctgggcaagcccctggtaacgctgacggatacgaagtaagccgttcatatctttcctcgcgatgaaatagtggcgacaacaggcaatatgagagacacgcgagtgaattttatattccattgccgctaattgccatgaattaaaaattccagttagccatgatgcggtcgattgttgccggaaaagtgatgatctatctgttaggctatgtagtagcgaaaattaatcaggatgtttcagtccagaggagtatggtttggcaactcacgagcgtcgtgtggtgttttttgacttagatggaacattgcatcagcaggatatgttcggcagttttctgcgctatttactgcgtcgccaaccgctgaatgcgttacttgtcctgccgttgttaccgattatagccattgcgttattgataaaaggtcgtgcggcacgctggccgatgagtctgcttctgtgggggggcacttttggtcacagcgaagcacgtttacagacgttgcaggccgatttcgtgcgctggtttcgcgacaatgttaccgcctttccgctggttcaggagcgattaaccacctacctgttaagttccgatgctgatatctggttgattaccggctctccgcagccgctggttgaagcggtttatttcgatacgccctggctgccgcgggttaatcttatcgccagccaaattcagcgtggctatggtggttgggtattgacgatgcgttgtctgggacatgaaaaggtcgcacaactggagcgcaaaatcggcactccgctgcggctgtacagtggctatagcgacagtaatcaggacaatccgctgctttatttctgtcagcatcgttggcgagtaaccccgcgcggtgaactccagcaactggaatagagtaaagcatagcgtccgtgtataatgcgccgcgcttttataaccggagttttctttttgtctgaagtcgaatttagccacgaatactggatgcgtcacgcgctgacgctggcgaaacgtgcctgggatgagcgggaagtgccggtcggcgcggtattagtgcataacaatcgggtaatcggcgaaggctggaaccgcccgattggtcgccatgatcccaccgcacatgcagaaatcatggccctgcggcagggtggtctggtgatgcaaaattatcgtctgatcgacgccacgttgtatgtcacgcttgaaccatgtgtaatgtgtgccggagcgatgatccacagtcgcattggtcgcgtggtctttggtgcgcgtgacgcgaaaactggcgctgcgggatctttaatggatgtgctgcatcatccgggtatgaatcaccgagtggaaattacggaaggaatactggcggatgagtgcgcggcgttgctcagtgacttctttcgcatgcgccgccaggaaattaaagcgcagaaaaaagcgcaatcctcgacggattaattttgtttctcttcactccctttcctggaaaacagcagagagggagaatgggtcaaatagtttgatgacgactgggaaagaaacgagagaaaaggaaatttctctttgcccaactccgtaggcgataccgccggataatcctgcgccagttgcatcgccgcttctgtagcctgcttctctttctcttgcagataacccaccaggctaatctgatacttacgaatattttcgacataagcgtaggcttcatgtccacgagcgtagccgtaagtcagcttgctgtaatagggtttctggctaagtaaaggcagacgctgttttacgtcagcccaactgtcaggattccctttggtttttgccgtcagggcgcgggcatccagcatatgcgcatagcccatattgtacgcagcgagggcaaaccagatccgctcgttctccggcacactttccggcactttactcatcatatcctgcaaataacgcacgccaccgctgatgctctgttcggcatcggtacgatccgtaatgccgaggctttgcgcggtatttttggttaacatcatcatgccgcgcacacccgtcggtgaagtggcctgtgcatcccagtgcgattcctgataagcaatagcggccagcaaacgccagtcaatttcttcggcgtatttctcaaacaggggctttaactgcggcagtaccgcatcgacggcgcgtaaaaatgtgcgcgtatcgacgtaatcaaaatcatcgccatgccccaggtatttctcttcaatgcgtgccagcgtaccgtcttcattcatttcgttgaagaagtcgagcagggcggcggaaagggtattatcgccatctaacgggctaaaccaagtcaccggttgttcatcggtgatatcgagcgctacggcgagctccgggtgaacgcgctgaaacaggctgatggcgacagaatcagcaatggtgtaatcgagttttccttcgatgacatcttccattaattccgcagagccttttttgtcgtctaccttccagcttaattccgggaattttgtttctttcagggtctggagatcgttaaccaccacatgacccggtgcaacggtgagttgctccgccgtcaggttgcccagcgtacgtgggcgatactgacccactttataaaccagttgttgtgacacggaataataggtagggccaggctgataattttttacccgctcactgttatagaccagtcctgccgccagcaggtcggcgttaccattatcaaggtcgtcaaacagctggctgatattctgccgcacggtcactttcagttttacgccgaggtaatcggcaaactgtttcgccagttcgtaatccaggccaaaaggtttcccgttgatttcgttataagtcaggggagtatgaatggtgctcacacgcaactctccccgcgcttgaatggcggcgatacggttgtcggctttaccaaaccagggaatggatggccagagagcgaccgcgagcagcagtgccagaatgccgatgaacagataattaatctttaattttttcaattagttaattctctgtgtcgtgcgcgtcccagcttgaaaaaacgtaataatagtgaaaggtttactcataaatgagcggcattttgcgtaaacctgcgccagatggcaacttattacagccattggcggcacgcgttgctaattcacgatggtgattttatttccacgcaaacggtttcgtcagcgcatcagattctttataatgacgcccgtttcccccccttgggtacaccgaaagcttagaagacgagagacttatgatggaaattctgcgtggttcgcctgcactgtcggcattccgaatcaacaaactgctggcacgttttcaggctgccaggctcccggttcacaatatttacgccgagtatgtccattttgctgacctcaatgcgccgttaaacgatgatgagcacgcacaacttgaacgcctgctgaaatatggcccggcactcgccagccacgccccgcaaggcaaactcctgctggtgaccccgcgtcctggcaccatctctccctggtcttcgaaagcgaccgatattgcccataactgcgggctacaacaggtaaaccgccttgagcgcggcgttgcttactatatagaagccggtacgctgaccaatgaacaatggcagcaggttaccgctgaactgcacgaccgcatgatggaaacggtcttttttgctttagatgatgcagagcagctgtttgcacaccatcaaccgactccggtcaccagcgttgatttgctggggcagggccgtcaggcgctaatcgacgctaacctgcgtcttggcctggcactggcggaagatgaaattgactatctgcaggatgctttcacaaagcttggtcgtaacccgaacgacatcgagctgtatatgttcgcccaggcgaactccgagcactgccgccacaagatttttaacgccgattgggttatcgacggtgagcaacagccgaaatcgctgtttaagatgatcaaaaacaccttcgaaaccacgccagattacgttctctctgcttataaagataacgccgccgtaatggaaggttctgaagtgggccgctactttgctgaccacgaaacgggccgctacgatttccatcaggaaccggcgcatattctgatgaaagtcgaaactcacaaccacccgacggcgatttctccgtggccgggcgcggcgaccggttccggcggtgaaatccgcgatgaaggtgccaccgggcgcggcgcgaagccgaaagcgggtttggttggtttctccgtttccaacctgcgaattcctggcttcgaacagccgtgggaagaagatttcggtaagcctgagcgcattgtcaccgcgctggacatcatgaccgaaggcccgctgggcggcgcggcgtttaacaacgaatttggtcgtccggcactgaatggctacttccgtacttatgaagaaaaagtgaacagccacaacggcgaagagctgcgcggttatcacaaaccgatcatgctggcgggcgggatcggcaacattcgcgccgatcacgtacaaaaaggcgagatcaacgtcggtgcgaagctggtcgttctcggcggcccggcaatgaacatcggtcttggcggcggagcggcgtcttccatggcgtcaggtcagtctgatgccgacctcgactttgcttccgtacagcgcgacaacccggagatggagcgtcgctgccaggaagtgatcgaccgttgctggcagcttggtgatgctaacccaattctgtttatccacgacgtcggtgcgggcggtctttctaacgcgatgccggagctggtgagcgacggcggacgcggcggtaaatttgaactgcgcgatattctaagcgacgaaccgggcatgagcccgctggaaatctggtgtaacgaatcccaggaacgctacgtgctggcggttgctgccgatcaattaccgctgtttgacgaactgtgtaagcgtgaacgcgcaccctacgcggtgattggtgaagcgaccgaagaactgcatctttctctgcacgatcgtcattttgataatcagccgatcgatctgccgctggacgtcctgcttggtaaaacgccgaagatgacccgcgatgtacaaacgctgaaagcgaaaggcgacgcgctggcccgtgaagggatcaccattgcagatgcggtgaaacgtgtgctgcatctgccgactgtggcggaaaaaaccttcctggtgaccattggcgaccgcagcgtaaccggcatggtagcgcgcgatcagatggtggggccgtggcaggtgccggtcgctaactgcgcggtcactaccgccagcctcgacagctactacggtgaagcgatggcgattggcgagcgtgcgccggttgcgctgctggatttcgccgcctctgcccgtctggcggtcggtgaagcgttaaccaatattgccgcaacacagattggtgatatcaaacgcattaaactttccgccaactggatggcggcggcaggccaccctggtgaagatgcgggcctgtatgaagccgttaaagccgtgggtgaagagctttgtccggcgctgggtcttacgatcccggtgggtaaagactctatgtcgatgaaaacccgctggcaggaaggtaacgaagagcgcgaaatgacgtcgccgctgtcgctggtgatttccgcatttgcccgcgtggaagatgtacgtcacaccatcacgccacagctttctaccgaagataacgcactgctgctgattgatttgggcaaaggcaataacgcgctgggcgcaacggcgctggcgcaggtttatcgtcagcttggcgacaaaccggcagatgtacgcgacgtcgcgcaactgaaaggcttctatgacgcgattcaggcgctggttgcacagcgtaagctgctcgcataccacgaccgctctgatggcggcctgctggtaacgctggcggaaatggcctttgctggtcattgcggcattaacgcggatattgcctctctgggcgacgatcgcctggcggcgttgtttaacgaagaactgggtgcggtgattcaggttcgtgccgctgaccgtgaagcggtcgagtccgtactggcacagcatgggcttgctgattgtgtccattatgtagggcaggcggtttccggtgaccgttttgtgattaccgccaacgggcagactgtattcagcgaaagccgcaccacgttgcgtgtctggtgggcagaaactacctggcagatgcagcgcctgcgtgacaacccggagtgtgccgatcaggagcatcaggcgaaatctaacgacgccgatccgggcctgaatgtaaaactgtcgttcgatatcaacgaagatgtggcagcaccgtatattgccactggcgcacgtccgaaagttgccgtactgcgtgagcagggcgtgaactcgcatgttgaaatggcggcagctttccaccgtgcaggctttgatgctatcgacgtgcatatgagcgacctgctggctggacgcacgggcctggaagatttccacgccctggtcgcgtgcggtggtttctcctacggtgatgtgctgggtgccggtgaaggatgggcgaagtcaatcctgttcaatgaccgtgtacgcgatgagtttgcaaccttcttccaccgtccgcaaacgctggcgctgggggtatgtaacggttgccagatgatgtctaacctgcgcgaactgatcccaggtagtgagttgtggccacgttttgtgcgcaatacctccgatcgctttgaagcgcgtttcagcctggttgaagtaacccaaagcccgtctctgctgttgcaggggatggtgggctcgcaaatgccgattgctgtctctcatggtgaagggcgcgtggaagtgcgtgatgcggcgcatctggcggcactggaaagcaaagtgctggtggcactgcgctatgtcgataacttcggcaaagtcactgaaacctacccggctaacccgaacggttcaccgaacggtattacggcagtcacgactgaaagtggtcgagtcaccattatgatgccgcacccggaacgtgttttccgtactgtcagcaactcctggcatccggaaaactggggcgaggatggcccatggatgcgcattttccgcaatgcgcgtaagcagttggggtaattcatcagttcattggttttgcagcccggatgcggcattaagcaccaaccactatcataagctcccaactccgggagcttttttgtgtctgtaaatcacgacaatgggtggtttaccgtgtcgctttctggcgacacttaaatgattgattttattgtaatctaataagtttatcttaagttgtctctttttagcgacacagtggctgatttacattcaaatagcgaagaagccataaatccctcaaagcaacgtataatcagtacgttaccaaactattttctttattggcacagttactgcataatagtaagcagtggctcattcaccgacttatgtcagccccttcgggacgtgctacataaaattcgaatgacgcacaacaaggtgcctgccgtccaacttctgatatcagcgtagctatatcaaccatcgggcgaaacgtcgagttaggcaccgccttattccataacaaagccgggtaattcccggctttgttgtatctgaacttcccctcggttagcatcaggctattcgcgtctgacgagagtaacaccttgaaacgctggcccgtttttccccgctcattacgacaactggtaatgctggcatttttgctaattctgctgcccttgttggtgctggcatggcaagcctggcaaagcctgaatgcgcttagcgatcaggcggcgctggttaaccgcaccacgcttattgacgcccggcgcagtgaagcgatgaccaacgcggcgctggagatggagcgtagctaccgtcagtattgcgtgctggacgaccctacgcttgcgaaggtttatcaaagccagcgcaagcgttacagcgaaatgctcgatgcccacgcaggcgtactgccagacgataaactttaccaggcattgcgtcaggatttgaacaatctggcccaacttcagtgtaacaacagtggtcccgatgctgccgccgccgcgcgtcttgaagcctttgccagtgccaataccgaaatggtgcaggccacgcgcacagtggtgttctctcgtgggcagcaacttcagcgtgaaatcgccgaacgtgggcaatattttggttggcaatcgctggtgctatttctggtgagtctggtgatggtgctacttttcacgcggatgattatcgggccggtgaaaaatatcgagcgcatgatcaaccgtctgggggaagggcgttctctgggcaatagcgtttcgttcagtggaccgagcgagttacgctcggttgggcaacgtattctttggttaagtgagcgcctgtcatggctggaatcccaacgccatcaatttttaagacatttatctcatgaattaaaaacgccactggcgagtatgcgcgagggcactgaattactggctgaccaggttgtcgggccgcttacgccagagcaaaaagaggtggtgagcattcttgatagcagcagccgcaatttgcaaaaactgatcgaacaactgcttgattacaaccgtaaacaggcggacagtgcggtggaactggagaatgttgagttagcaccgctggtggagacagtagtttctgctcatagcctgcccgcacgggctaaaatgatgcataccgacgtcgatctcaaagcaacagcttgcctggcggagccaatgctgctgatgagcgtactggataatctttactccaatgcggtgcactacggggctgaatccggtaacatttgccttcgcagcagcttacatggtgcacgggtttatattgatgtcatcaatacaggcacacccattccgcaagaggaacgcgccatgatcttcgaacccttttttcaaggaagccaccagcgaaaaggggcggtgaagggcagcggtctgggattaagcattgccagggattgtattcgccgtatgcaaggggaactgtatctggtcgacgagagcgggcaagacgtttgtttccgcattgaattgccgtcgtcgaaaaacacgaaataatgctaacagcctatcccatcaggctattttatttgccagttcggccccgggcagtgctcgaaatcctcacgtacgacgtgtacgctccggtttctccgcgctgtccatgtccaaactgcctgcaataattacgcccactgggataggcattaagtctggtgaatatgcgacacatttttcaacgattaatgccccgacggctgtggctggcagggctgccatgtctggcattgctgggttgcgtgcagagtcacaataagccagccattgatacgccagcagaagaaaaaattccggtttatcaactggctgactatctttctactgaatgtagcgacatctgggcgctgcaaggtaaatcaaccgaaaccaatccgctttactggctgcgggcgatggattgtgctgatcgtttaatgcctgcgcagtcacgtcagcaagctcgccaatatgacgacggcagctggcaaaatacctttaaacaagggattttgctcgccgacgccaaaattacgccgtatgagcgccgccagctggtcgcgcgcattgatgcgctaagtaccgagatcccggcacaggttcgccctctgtatcaactctggcgcgacggtcaggcgctgcaactgcaactggcggaagagcgccaacgctacggcaagctccagcaggccagcgacagcgagctggatacattgcgccagcaacatcacgttctacagcagcaactggaactcaccacccgcaagctggaaaacctgactgatattgaacgccagctctcgacccgcaaaccggctggaaatttctcgccggatacgccgcacgagggtgaaaagcccgcgccatccacccatgaggtcactcctgatgagccataaacctgcgcatttattattggtcgatgacgatccgggattgctgaaactgcttggcctgcgcctgaccagcgaaggctacagcgtggtcacggcggaaagtggcgctgaaggattacgggtactgaatcgcgaaaaagtagatttagtcatcagcgacctgcggatggatgaaatggacggtatgcagctgtttgctgaaattcagaaagtgcagccgggaatgccagtaattattcttaccgcgcatggttctattcccgatgccgttgctgcaacacagcagggcgtgttcagtttcctcaccaagcctgtcgataaagatgcgctatatcaggcaattgacgatgcgctggaacaatccgcgccagccaccgatgaacgctggcgcgaggcgattgtcacccgcagcccgctgatgctgcgtttgctggaacaggcgcggctggtggcgcaatcagacgttagcgttttgattaacggccagagcggcaccgggaaagagattttcgcccaggctatccacaacgccagcccgcgcaatagcaaaccatttattgctattaactgtggcgcattgcccgagcaattgctggagtcggagctgtttggtcatgcgcgtggcgcgtttactggcgctgtcagcaatcgcgaaggtttattccaggcggcggaaggcggtacgctatttctcgatgagattggcgatatgcccgcaccattgcaggtcaaactgctgcgcgtgttgcaggagcgtaaagtgcgcccgctgggcagcaaccgcgatattgatatcgacgtgcggattatttccgccactcaccgcgacctgccaaaagcgatggcgcgcggggaattccgtgaagatctctattaccgcctcaacgttgtcagcctgaaaattccggctctggcagagcgcacagaagacattccgcttctggcaaatcacctgttgcgccaggcggcagagcgacataaaccgtttgtccgcgcgttctccactgatgcgatgaaacgcctgatgaccgcgagctggccgggtaatgtgcgccagttggtcaacgtgattgaacagtgcgtggcgctgacctcatctccggttattagcgatgcattagtagagcaggcgctggagggtgaaaacacggcgctgccaacctttgttgaggcacgtaatcagtttgaactcaactatttgcgtaagctgctgcaaattaccaaaggcaacgtcacccacgcggcgagaatggcggggcgcaaccggacagaattttataaactgctttcccgacacgagctggatgcaaacgatttcaaggaatgaattggcgttatgtgttacgtttagcagatcaaaagacaggcgaccttttcaaggaatagcatgaaaaagattgatgcgattataaaacccttcaagctggacgatgtccgcgaagcactggccgaagtcggtattaccggcatgacggtgaccgaagtgaaaggctttggtcgccagaaaggccataccgagctgtaccgcggcgcggagtatatggtggattttctgccgaaagtgaaaattgagattgtcgtaccggacgacattgtcgatacctgtgtcgataccattattcgcacggcgcaaaccggcaaaatcggtgacggtaaaatcttcgtctttgacgtggcacgggtcattcgcatccgtaccggtgaagaggacgacgcggcaatttaaaccgcgtcaagggttgccggatgtttccatccggcaacatcaaattacagcaccttatgcgggccaaagcattcgtaatgaatgttttcctgcttcacgcccagatccactaactgtttcgcggtaaactgcatgaagccaaccgggccgcagagatagaactgcattgtcggatcgctgaacgcaccttccagtttgctcaaatccatcagaccttcgctatcaaactgacctttagcgcgatcggcttcgctcggctgacgataccaggtgtgcgcggtaaagcgcggcagtgactgccccagttccttaacttcatcggcaaaggcgtgaacatcgccattttctgccgcatggaaccagttcacttgtgctgtgtggcctgcttttgccagcgtgtcgagcattgccagcattggcgtttgaccaacaccggcagagattaacgtcactggtgtgtcatctgcgacagccataaagaaatcacctgccggagcaaccagtttcacgacatcgccaacattggcgtgattgtgcaaccagttggatacctgcccaccctcttcgcgtttcaccgcaatacgatagcctttgccatccggtttgcgagtcaaagagtactgacgaatttcctgatgcgggaaaccttccggcttcagccagacgccgagatattgccccggacggtattctgccactgcgccaccgtcgaccggctccagttcgaagctggtgataagcgcgctgcgcggtgttttagccacaatgcggaaatcgcgagtaccttcccaaccaccggctttgctggcgttttcgttatagatttccgcctcgcgattgataaatacattagccagtacaccataggctttaccccacgcgtccagcacttcctgccccgggctgaacatttcgtccagcgttgccaacaggtgttcaccgacgatgttgtactgttccggtttgatctggaagctggtgtgcttctgcgcgattttttctaccgctggcagcagcgcaggcaggttttcaatattactggcgtaggcggcaatagcgttaaacagggcttcacgttgatcgccattacgctggttactcatgttaaaaatttctttgagttctgggttatgagtaaacatacggtcgtagaaatgggcggttaactttggccccgtttccaccagtaaagggatggtggcttttactgtagcgatggtttgagcgtcaagcatatggtcttcctttttttgcatcttaattgatgtatctcaaatgcatcttataaaaaatagccctgcaatgtaaatggttctttggtgtttttcagaaagaatgtgatgaagtgaaaaatttgcatcacaaacctgaaaagaaatccgtttccggttgcaagctctttattctccaaagccttgcgtagcctgaaggtaatcgtttgcgtaaattcctttgtcaagacctgttatcgcacaatgattcggttatactgttcgccgttgtccaacaggaccgcctataaaggccaaaaattttattgttagctgagtcaggagatgcggatgttaaagcgtgaaatgaacattgccgattatgatgccgaactgtggcaggctatggagcaggaaaaagtacgtcaggaagagcacatcgaactgatcgcctccgaaaactacaccagcccgcgcgtaatgcaggcgcagggttctcagctgaccaacaaatatgctgaaggttatccgggcaaacgctactacggcggttgcgagtatgttgatatcgttgaacaactggcgatcgatcgtgcgaaagaactgttcggcgctgactacgctaacgtccagccgcactccggctcccaggctaactttgcggtctacaccgcgctgctggaaccaggtgataccgttctgggtatgaacctggcgcatggcggtcacctgactcacggttctccggttaacttctccggtaaactgtacaacatcgttccttacggtatcgatgctaccggtcatatcgactacgccgatctggaaaaacaagccaaagaacacaagccgaaaatgattatcggtggtttctctgcatattccggcgtggtggactgggcgaaaatgcgtgaaatcgctgacagcatcggtgcttacctgttcgttgatatggcgcacgttgcgggcctggttgctgctggcgtctacccgaacccggttcctcatgctcacgttgttactaccaccactcacaaaaccctggcgggtccgcgcggcggcctgatcctggcgaaaggtggtagcgaagagctgtacaaaaaactgaactctgccgttttccctggtggtcagggcggtccgttgatgcacgtaatcgccggtaaagcggttgctctgaaagaagcgatggagcctgagttcaaaacttaccagcagcaggtcgctaaaaacgctaaagcgatggtagaagtgttcctcgagcgcggctacaaagtggtttccggcggcactgataaccacctgttcctggttgatctggttgataaaaacctgaccggtaaagaagcagacgccgctctgggccgtgctaacatcaccgtcaacaaaaacagcgtaccgaacgatccgaagagcccgtttgtgacctccggtattcgcgtgggtactccggcaattacgcgtcgcggcttcaaagaagcagaagcgaaagaactggctggctggatgtgtgacgtgctggacagcatcaatgatgaagccgttatcgagcgcatcaaaggtaaagttctcgacatctgcgcacgttacccggtttacgcataagcgaaacggttaatctgttgaaaaaaggcttccttcgggaagcctttctacgttattgcgccatcaaatctgtcgtaactgcgcctcaacatacaaatagccaatccccaacacctgttgtgcgcggcttaattgcccaaagccaatttgcgtcgctttcacgctcggtccttcgtcgcggtcgaacgggttaaatcctgtctggcgaataatagtattaagccagttctcaccaaaggcacaactgcgaccgtacaaccaaatctgattaatattgaggatgttgaggaagttatacagactcaaaccaatggcattggcagagcgatcaacccagctggtgatccacggttctccactctgccaggcagcgattaactgcgcggttgtcagtttttcaggatcaagctgagtattaaccggttgtgattttagccatacccgcgcctgttttttcaatgcacttaacgaggcgacggtttccaggcagccgtaacgtccacagtcgcagacgacgccatccggattaacgatggtgtgaccaatctgtccgctaccatacaaactgccgcgataaatttgctcgttaatcacgaacgacgagccaatgccgtaatcaacgttgatcacgcagaaatcccgtttctgcgaattattttgccatttctccgccagcgccagcatcacgcagtcattatcgaccatcacccgaatgccgagcttctcttccagcagatacttcacctcaaccggcgttgtccacggcgcttgcggcatggtttgcgacacgccggtcaccggatcaacctgaccgtggattgccagcgccagattgatggtgcggtccggccacaatttacggtggcgatgccagcatttttcgatttcggacagcagcgcctgcggcgtcggtgcatcaatctgtaaatactcaaattcacctttcggacttaaacaagcattagcaacctgacactcaatactggtgggcgtcacgttcaggcacagcgtccagtcaccttccggcgcaatcagccatgtaccgctactatgcccgcgcgtctggctttcatcgtcaatattcaccacccgtttttcgctttccagttcctgcaaaatattactgactgccggaatcgaaatttgcgccagccgggccagcgttgatttattggcgcgcttttgccggtacagcagttccagaatcacgcatttgttatggtggcgaatctgttggttgttaatgcaggctctcatcttcactaaaccttgtttagttaattgcgtgattattccgcgaaaacattgccagattgttcaatacactgccacaaatcttttaattcagtatgtcttgttaatattgagggcaccatgactccagtaaaagtgtggcaagagcgcgttgagatcccgacctatgaaaccgggccgcaggatatacatcccatgttcctggaaaatcgcgtttatcagggatcgtccggcgcggtttatccctacggcgtgaccgatacgctgagcgagcagaaaaccctgaaatcctggcaggcggtgtggctggaaaacgactacatcaaagtgatgatcctgccggaactgggcggtcgggtgcatcgcgcatgggataaagtgaaacagcgcgattttgtctatcacaatgaagtcattaaacctgcgctggtggggctgctgggaccgtggatctccggtgggattgagtttaactggccgcaacaccatcgcccgaccacctttatgcccgttgatttcaccctcgaagcccatgaagacggtgcacagacggtgtgggtcggcgaaacggagccgatgcatggtttacaggtgatgacaggtttcaccctgcgccctgaccgggcggcgctggaaatcgccagccgcgtctataacggcaacgccacgccgcgtcatttcttatggtgggccaacccggcagtgaaagggggggaagggcatcagagcgtcttcccgccggatgtaacggcggtgtttgatcacggcaaacgagccgtctccgctttccccatcgccaccggcacttactacaaagtggactactccgctggagtggacatttctcgctataaaaatgtgcccgttccaacctcatatatggctgaaaaatcacagtacgattttgttggcgcgtggtgtcacgatgaagatggcggtttgctgcacgttgccaaccaccatatcgcgccaggtaaaaaacagtggagttggggacacagtgaatttggccaggcgtgggataagagtctgaccgacaataacggcccgtatatcgaactgatgaccggtatttttgccgataaccagcccgattttacctggcttgatgcttacgaagagaagcgttttgagcagtatttcctgccttatcattctttgggcatggtgcaaaatgcctcccgcgatgcggtgataaaactccaacgtagtgagcgggggattgagtgggggctgtatgccatctctccgttgaacggataccgcctggcgatccgcgaaatcggcaaatgcaacgcgttacttgatgatgccgtggcactgatgcctgcgaccgccatccagggcgtgttgcacggtatcaatcctgaaaggctgaccattgagctctccgatgccgacggcaatattgtactgagttatcaggaacatcagccgcaagagttgccgttgccggacgtcgccaaagcgccactgtcagcacaagacattaccagtacagatgaagcctggtttatcggtcagcatctggagcaatatcatcacgccagccgttcaccgttcgattactacctgcgcggcgtggcgctggatccgctggattatcgctgtaacctggcgctggcgatgctggaatataaccgcgccgatttcccgcaagcggtggcgtatgccactcaggctctgaaacgcgcacatgcgctgaacaaaaatccgcagtgcggacaggccagtttgattcgcgccagtgcttacgaacgtcagggacaatatcaacaagccgaagaggatttctggcgtgcggtctggagcggcaacagcaaagccggtggctattatggcctggcacgactggcggcgcgtaatggtaacttcgacgctggtctggatttttgccaacaaagtcttcgtgcctgcccaaccaatcaggaagtgctttgcctgcataatctgctgctggtgttaagtggtcgtcaggacaacgcgcgtttgcagcgcgcgaaactgctgcgtgattatccgctgaacgccactctgtggtggctgaactggttcgatggtcgtagcgaatcagccctcgcgcagtggcgcggtctgtgtcagggacgcgacgttaacgctctgatgaccgccgggcaactgattaactggggaatgcccaccctggcggcagagatgctgaacgcactggactgccagcgcacgctgccgctttacctgcaggcgagtttattgccgaaagccgaacgcggcgaactggtcgcaaaagccattgatgtcttcccgcagtttgtccgtttcccgaatacgctggaagaagtggcggcgctggagagtattgaagagtgctggtttgcccgtcatttactggcctgcttctactacaacaagcgtagctacaacaaagccattaccttatggcaacgttgcgtagagatgtcgccggagtttgccgacggctggcgcgggttagcgatccatgcgtggaataagcaacacgattatgagctggccgcgcgttatcttgataatgcttatcagcttgcgccgcaggatgcacgtctgcttttcgaacgggatttgcttgataagttaagcggagccacaccggagaaacgactggcgcgtctggaaaataatctggaaattgcgctgaaacgcgacgacatgacagcagagttgctcaatttgtggcatctcacgggtcaggcagacaaagcggcggacattctcgccacgcgcaaattccacccgtgggaaggcggggaagggaaggtcaccagtcagtttatcctcaaccagttattacgcgcctggcagcaccttgatgccagacagccgcagcaggccagcgaactgcttcatgccgcgctgcattatccggagaatttaagcgaaggccgtttaccggggcaaactgataacgacatctggttctggcaggcgatatgcgccaacgcgcagggcgatgaaactgaagcgatgcgttgtttacgtctggcggcgaccggcgatcgcaccattaacatccacagttattacaacgatcagccggttgattatctcttctggcaaggaatggcgctgcgactgctgggcgaacaacacaccgcacagcaactgtttagtgaaatgaaacagtgggcgcaagagatggcgaaaaccagtattgaggcggatttctttgctgtttcacaacctgatctgttgtcgctgtatggcgatttacaacagcagcataaagaaaaatgcctgatggtggcgatgctggcgtccgcgggactcggggaggttgcgcaatatgagtctgctcgcgctgaattgacggcgattaatccggcctggccgaaagcggcattattcaccactgtgatgccttttatttttaactacgttcactaaaccctattaactgtaatatttgagcggcacgcgctgccgctcatcacaaaataattagaataagccgttgttaataaaaaccctacaggaggctctatgcctaaaaaaatgagaacaacccgtaatctattattaatggctacgctattaggtagcgctttatttgccagggctgcggaaaaagaaatgaccattggcgcaatataccttgatactcagggatattacgctggagtgcgtcaaggcgttcaggatgcggcaaaagattcttcagtacaggtacagttaattgaaactaacgcccagggtgatatttcgaaagaaagtacctttgttgataccctcgtggcgcgtaatgtcgatgccattattttatcggcagtgtctgaaaatggcagtagccgtaccgttcgtcgcgccagtgaagcgggtattccggtgatttgctacaacacctgtattaatcaaaagggtgtcgataaatatgtctcggcgtatctggtcggcgatccactggaatttggtaaaaaactgggtaacgctgccgccgattattttattgccaataaaattgaccagccgaaaattgccgtcatcaattgcgaagcctttgaagtttgtgtgcagcgacgtaaaggatttgaagaagtattaaaatcccgcgttcccggcgcgcaaattgtcgctaatcaggaagggactgttttagataaagcgatttccgttggtgaaaaactgattatctccacgccggatctcaacgccattatgggggagtcgggcggtgcgacactcggcgcggtaaaagcggtacgtaatcaaaatcaggccggaaaaattgctgttttcggttcggatatgacaaccgaaattgctcaggagctggaaaacaatcaggtgctgaaagcggtagtggatatttccggtaagaaaatgggcaatgctgttttcgcgcaaacattgaaggttatcaataaacaagccgacggtgaaaaagtgattcaggtgcctatcgatctctataccaaaacggaagacggtaaacagtggctggcaacgcacgttgatggtctgccctaatcgctgattcgcagaggtccctatgttcacggcaacagaggcagtcccggtagcaaaagtggtggcaggaaataagcgttatcccggcgtcgttgcgttggataacgttaacttcacgctcaataaaggcgaagttcgtgcgctgttaggcaaaaacggcgcgggcaaatcgaccctcattcgaatgcttaccggtagcgaacgtccggatagcggtgatatctggattggcgagacgcgactggaaggcgacgaagctacgctgactcgccgtgccgctgaactgggggtacgcgcggtttatcaggagttaagtctggtggaagggctgacggtggcggaaaacctctgcctcggtcagtggccccgccgcaacggcatgattgattacctgcaaatggcgcaggatgcccaacgttgcttacaggcgctgggcgttgacgttagtcctgaacaacttgtttcaacactaagcccggcgcaaaagcagctggtggaaattgcgcgggtgatgaagggcgagccgcgcgtggtcattcttgatgaacctaccagttcgcttgccagtgcggaagttgaactggtgatcagcgcggtgaaaaagatgtcggcactgggcgtggcggtaatttatgtcagccaccggatggaagaaattcgccgcattgcctcctgtgccaccgttatgcgcgatggtcaggtggcgggcgatgtgatgctcgaaaacacctccacgcatcatattgtgtcgctgatgctcgggcgcgatcacgttgatattgcgccggttgcccctcaggaaattgtggatcaggccgtactggaagtccgtgcgttacgccataagcccaagctggaggatatcagttttacgctacgtcgtggcgaagtgctcggcattgctggtctgctgggggcagggcgcagtgaattgctgaaggcgattgttgggctggaggagtatgaacagggcgaaattgttatcaacggcgagaaaatcacgcgccccgattacggcgacatgctgaaacgcggcattggctatacgccagaaaaccgcaaagaagcggggatcattccctggttgggcgttgacgaaaatacagtgctgaccaatcggcaaaaaatcagcgccaacggagtgctgcaatggtccaccatccgccgcctgaccgaagaagtgatgcagcggatgacggtcaaggccgccagtagcgaaacgcccatcggcacgctttctggcggcaatcagcaaaaagtagtgatcggtcgttgggtctatgccgccagccagattttgttgctcgacgagccaacgcgcggcgtcgatatcgaagccaaacagcagatttaccgtattgtccgtgagctggctgccgaaggaaaaagcgtggtgtttatctccagtgaagtggaggagttgccgctggtgtgtgaccgcatcctgttattacagcacggcacgttctcgcaggagtttcactcgccggtcaatgtggatgagctgatgtccgccattctgtctgtgcactgatgaattttaccgaggaacctgaagatgtctgcttcgtcattaccattgccgcagggcaagagcgtctcgctcaaacaatttgtcagtcgccatattaatgagatcggtttgctggtggtgattgccattctttatctggtcttctccctgaacgcgcctggctttatctcattgaataaccagatgaacgtgctgcgcgatgccgccaccattgggattgccgcctgggcgatgacgctgattattatctccggtgagattgatgtcagcgttgggccgatggtggcttttgtctcggtgtgcctggcatttttgctgcaatttgaagttccgttggcgattgcttgtctgctggtgttgctgttaggcgcgctgatgggaacgctcgccggggtgctgcgcggcgtgtttaacgtaccaagtttcgttgccacactggggctgtggagcgccctgcgcggaatggggctgtttatgacgaacgcactgccagtgtcgattgacgaaaacgaggtgctggactggctgggcggacaatttctcggtgtgccggtatccgcgctgatcatgattgtgttgtttgcgctgtttgtgttcatcagccgcaaaaccgccttcgggcgctcggtttttgccgttggcggtaatgctacggcggcgcagttgtgcggcatcaacgttcgtcgggtgcgcattcttatctttaccctttcgggattattagcggcggtgaccggcattttgttggcggcgcgcctcggttctggtaacgcaggtgccgcaaacggtctggagtttgacgtcatcgccgcggtcgtggtcggcggtacggcactttccggcggtcgcggttccctgttcggtacattgcttggtgtgctggtgattacgctaatcggtaacggtctggtgctgctcggtattaactcctttttccagcaggtggtacgcggcgtcatcatcgtggtggcggtgctggcgaatatcttgctgacccagcgaagcagtaaagcgaaacgctaaaccttaacgcccctggcgcgggtgcggcagggatgaaaattaatcgtattgttaatgagggatttatgaaaacgatgctggcagcttatttaccaggaaattcgaccgtcgatctacgggaagttgcggtgccgacaccagggattaaccaggtactgatcaaaatgaaatcttccggaatttgcggaagcgatgtccactatatctaccaccagcaccgcgctacggcagcggcacccgacaaaccgttataccagggatttatcaacggtcatgaaccgtgcgggcagattgtggcgatggggcaaggctgccgccattttaaagagggcgaccgcgtgctggtgtatcacatttctggctgtggtttttgcccgaactgccgccgcggctttcctatctcttgtactggcaaaggaaaagcggcttacggctggcagcgtgacggcggtcatgccgaatatctgctggcggaagaaaaagatctgatcctcctgccggatgcgctgagctacgaagatggtgcgtttatcagttgcggcgttggcacggcctatgaagggattttgcgcggcgaagtttccggcagcgataacgtgctggtggtcggtctggggccggtcggcatgatggcgatgatgctggcgaaaggtcgcggtgcaaaacggatcatcggcgttgatatgctgccggaacgtctggcgatggcaaaacagttaggggtgatggatcacggctatttagcaaccaccgaaggtctgccgcagattatcgccgaactcacccacggtggcgcggatgttgcgctcgattgttccggtaatgccgcaggtcgcttgctggcactgcaatccaccgctgactggggacgggtggtttacattggtgaaaccggaaaagtggaattcgaggtcagcgccgatctgatgcaccatcaacggcggattatcggctcctgggtgaccagtctgttccatatggaaaaatgcgcccatgatctgacggactggaagctgtggccgcgtaacgccattacccatcgcttctcgctggaacaggcaggtgatgcctatgcgctgatggcgagcggcaaatgcgggaaagttgtgattaacttcccggattaaggagttagcggatgaccatctataccttatcccacgggtcgctaaagctggacgtttctgaccagggcggcgtaatcgaaggcttctggcgcgatacgacgccgctcttacgtcctggtaaaaaaagcggtgtggcaaccgatgcctcatgttttccgctggtgccatttgcaaaccgggtgagcggcaatcgttttgtctggcaggggcgtgagtatcaactgcaaccgaatgttgagtgggatgcgcactatctacacggcgatggctggctgggcgagtggcaatgtgtctcgcacagcgatgatagtttgtgtctggtgtatgaacatcgcagcggtgtctatcactatcgggtaagtcaggcgtttcatttaacggcggatacgctgacggtgacgctctctgtcaccaatcaaggggcagagacgctgccatttggtaccggctggcatccttattttccgttgtcgccgcaaacgcggattcaggcacaggcgagcggttactggctggagcgggagcagtggctggcgggtgagttttgcgagcagctaccgcaggaactggattttaaccagcccgcgccgttgccgcgccagtgggtgaacaatggttttgccggatggaatggtcaggcccgcatcgagcagccgcaggaaggttatgccatcatcatggaaacgacgccacctgcaccgtgttatttcatctttgtttccgaccctgcgtttgataaaggatatgcgtttgatttcttctgtctggaaccgatgagccatgcgccggatgatcatcatcgcccggaagggggtgatctcattgcgcttgcaccaggtgaatcaacaacttcagagatgtcgttgcgggttgcgttgctgtaatttataaaatgccggataaggcgttcatgccgcatccggcatctttcctaacgccgatcgagagaaatcgcccccggtccggtaattgccaacagcaggaatgcgccagcgatactgacattcttccagaaattaatcatatttggcccaaccgcatcgccggtcatatcccagtaatggtgaccaatcaccgccgtacccagcgtgtagaaaataaacagcaccgccagcggacgggtgaaaaagccaagcacgattaatatcgcggcgggcacttccataactaccgcaataatcgctgccagcatcggcatcggcgcgcccaacgaggccatatattggaccgtaccgtcaaagcccatcattttgggaaaaccaaaaataatgaaaattaagaccacggcgatacgggcaattaataacaaaacggggcgggcagctccaaaatcaaaataacgtagtgtgttcataaccaatccctttgcaagataatgtgatttaaacgtaatacacactcttgcacctcgccacgccccaggcattgagatattcgctaattatcctggttacagtgatttaagcgcgatgttctcatctatcagcagtttcgcatcaaacgttttgccgctctggatccatttgcgaattgggcgaatctcacgcccctgattcagcgtgaccgcaccgataagcacgccgttttgcagattaaaccaaatcgccttctgagtttccgggttgccacgacaaagccagtcatcgccacgcatatcgccaataaactgtaagttatcactgtactgatcgctccagaaccacggcggcggcagtagcggtagcggtagccctaacattgcggcagcggcaatttgcgcctggttattggcgttttcccagctttcgcagcggtgtagtgcaccattatcaagacgagtgattgccacatcgccaccggcaaagatcgcgggatcgcaggtgcggcaagcctcatcaatgacaatgccattggcagtatcaaggttggcctcgcgagccagttgctcgttggcgctgataccaataccgtaaatcaccacatcagcctgaagcgtttccccactttgcagcgtcagttctactttttcaccatcgaccacatgttcaatggcattattgagcagaatgcgcacaccagcctgctggtggcgctgtaaaagatagcgttgcacgggcggtggtgcattacggcccatgacggttgccgccagttcaatcactgtcaccttacatctgcgctgcgtggcgctggcagccagttccagaccaatagttccggcaccgacaatcacgactgaccgttcgggctgcagaacttctcgcagtctggcggcatcaccggcatggcgtagggtaaagcagcgttctcccagtgcatcaagcaacggcagcggtcgagctgccgcgccggttgctataaaaagctgatcccagtgccagctttcgccgttggttaacactaactctcgtgtgtcgcgacccagcgttttgatggttacaccggaatgcagatgaacattgttttcctgccaccagttagcgggtaacacctgctgtaactgcggggaatcttccagcaacatggatttcgagagtggaggtcgttcataaggaagatgtcgctcatcggaaaacagatgcagctcaccggtgaacccttgctggcgtagcgaggccgcagccattgccgccgcttgcccgccaccgacaataatgatggttttttctttcatcgtgcttccttaaagatccagcccagccgctacgtggcgaatgccgcgaatcgctaaacccgcatcagcgttgatcatcacaccgcttaatgcgcgattattgcgccgcgatgccaacatcacatacggacccgtaaaatccgccggttgcgggaaaaattgcagcggtaaaatggcggcaattttctccggcgtcagagactgcattatcgaggtttcactttgcccgagcgcctgtgggccgcgcaggtcgctggccataccacacgggccgacgccattcacccgcactttcggtgccagttcataagccagttggcgaataagtccggttgcggcatgtttactggcggtgtacagcgggccaccgccgccaggataccaggcggcatttgacagtgtgaaaatcatgctgccttcactggcgattaacgccggagcgcaggcttttgcgcccagcaggtaaccgagtacgttgacgttaaacagctcgtggaagccggtttcgagcgtctctgcgggagtattaaccagtgaggcattgtgatcccagatgcctgcattgccgataaaacaatccagcttgccggaacgagtcaggatctgatcgaccgcgcgttgataatcggcataacaggtcacgttaccttccaccgccagaatatgttcgccaaatcgctgacgcagactggcgacttttgccgccgacagttccagcgtggcaacctgcgcgccttcttcgataaatcgctcgaccagcgccagccctaatcccgatccgccgccggtaataaaaatggactcgttatgcagatcgctcatggctgcgcctccggtaagtcgatgaaaatgtcaccaccttcaacgtgtactggataagtggtgagcggatcggtggcgggcaggcataacgctttccccgttttcaggcaaaaactggcggcgtgtagcgggcactccaccgtggcgtcatcttccagatccccttctgacatcgacgcattaccatggctgcaacgatcgttaatggcataaaactcgccgccaacgttgaacagggcgatgacgggcgaggtatcgatccggagagcctcaccctccggcacatccgcaacgggacacgcataaattcgattcatcagaacagtacactcaggttatgggaagtgattaccgcttgatccaggacgatatcccgttccagcaagcgccagttgtcatcttccagacggcgaactttgtcgaaacgcgttccaacatagaatgtttcatcgcgctctttttgtgcccgataaagcagataatttacccgcacagcaaatacgtttgggatgtcggtttcgcttatctggcagttgctgattaagtgacgggtgcgtgacggcggctcttctgcccaggccatgcccgtttccagacgggcgattcgccgctccagctggtctttggtgtcattaaaaatccaggttgtcggtggctggacgcctttgcggcggtcgcgtgtttgcgcgttaactgtggtgcgcatggtgtaacgaatctcttcgtcgagctgcgccagccagtcacgaaatttccagtcgtccagtaagctggcttcgtgaaagagaaactggctaatgcggtgatgtaactctagtgaaacttgcgcactcatttcatcacctcctgctggtaagcggcggttttatcgagcacttcctgccagctttcgctactcagaagatcggcccagcgttggtacattccacgagcggcagtttctgaaaagatatagttagtaatgccaggaatgccgtcgtcgcggcgcttttcctgaccaagccccatttccagacacagtttgctgttgcgggcgcggtggcctttaagcaatttctggatttcacaccagttctccgagtcatcctgctcgagaaaaccagcaggaccaaaagcacgagtggcgctgttttcaaaagcggctttaacttcatcggaggcggctttgtcagtaatacagaacgcccacacttcaacttgatcagggccgcgcggatgccagacgcggagtgtggcagtgccgtttagccatgaaagcgtggggaaaatattgttatgacccgccaggcgcagggcgcgaacttcacctaaacgttgttctgcttcggcataggtttcgcggtaatagcttgaaactgcgccatcgacccagacattagcatccggtttttcagtaaagaagaaaccgctaccgtgaccgtcctgaccaaattgcagcgcatctttggcggtttcccacaccgggcgggcggtttgtccatcaccgaggcgcttatcgctgccatcatctttcgcccctaatacctgaacggcagaagcatggctgaacagagcatgatactggtcactggcgaactgctctgccgggaatttccagttacagttgatcacccacttttgtacgccgccgacaatttcggtgccgccttcgcgacgatccagcatgccatccagataccaggcaatgtcacccaggtaatcacgcaggcccggtgcgctggtatcccagttgccaaaaatcagccctttataactctccacacaaggaacttcgtttagtccccagtgggatttacacaacccttgtgggtaggcgcgaggttccagcggtacatcgatcaactcgccgttaatgccataagaccagccgtgatacgggcaggtaaaggcgcgagtgttgccgcaatctgcataactcacacgcatggcccggtggcggcattggttgagaaacgccttgatgctgccgtctttctgacgcactacgacaaccgcatcttcccccatgtaggtgttaaagaaatcaccaggttttgggatctggctttcgtgggcgagaaatagccagcaacggccgaaaatacgttcaagctccagttggtaaatatctgggtcggtataaatacgcggagtgacccgaccattttgggtatcaatcagttggtaaatgttcaaatctgagggtgtggtcatattttttaatcctgaaagataagatgtattgaccttctatttttgtgccataaggatgttgctggttggttgctaatatgtgaaatagttaatttctaccagctgagacgttttttcgataacaaggggaaggtgatggaactacggcatttacgctatttcgtcgcagtggcgcaggcactgaactttacccgtgcggcggaaaaactgcatacctcacagccttcgttaagcagccagatccgcgatcttgaaaactgtgtcggtgttccgttactggtgagggataagcgcaaagtcgcgttgacggcggcgggagaatgttttctccaggacgcgctggcaatcctcgaacaagcggaaaatgccaaattacgggcgcggaaaattgttcaggaagacagacaattaaccattggctttgtgccatcggcggaagtgaatttactgccaaaagtattaccgatgttccgtctcagacagccagacaccttgattgagctggtgagtttaatcaccacgcaacaggaggaaaaaattcgccgtggtgaactcgacgtcggcttaatgcgccatcctgtttatagcccggagattgattatctggagctttttgacgaaccattagtggttgtgttaccggttgatcaccctttagcacatgaaaaagagatcaccgccgcgcaactggatggcgtgaatttcgtcagtaccgatccggcgtattccggttcgcttgcgccgatcgttaaagcgtggtttgcgcaagaaaacagccagccaaatatcgtccaggtggcaacgaatattctggtgaccatgaatctggtgggcatggggctgggcgtcactttgatacccggttatatgaataattttaataccggacaggttgtttttcgtcccattgccggaaatgtgccttccattgctttactgatggcgtggaagaaaggggagatgaagccggcattacgcgatttcatcgccattgtgcaggaacgtttggcaaacgtaacggcataattacgcattatttttgcaacatgcgtcgcggatcgcagttttttagtgcttgtgaactggcgttacagacatcgggaagcaggctcgaatattcttatttttcaacttgcaccaacattcgattaaccccagactaacgcctcctgacgggagggactcatggttttgcaatccacgcgctggttggcgctcggctatttcacatacttttttagttacggcatttttctacctttctggagcgtctggcttaaagggattggtttaacgccagaaaccatcggcctgttattgggggcaggtctggttgcccgttttctcgggagtttgctcatcgcgccccgcgtcagcgatccttcccgcctgatttccgccttgcgcgtgctggcactgctgacacttctctttgctgtcgccttctgggcgggggcgcacgtagcgtggctgatgctggtgatgattggctttaacctctttttctcaccgctggtaccgttgaccgatgcactggcgaatacgtggcaaaagcagttcccgcttgattacggcaaagtgcgactgtggggctcggtggcgtttgtcattggctcggcgctgacgggcaaactggtcactatgtttgattatcgggtgatcctcgcgctgttgacgttgggcgtggcatccatgctgctcggctttctcatccgtccgacgattcagccacaaggggcaagccgccagcaggagagcaccggttggtcagcgtggttggcgctggttcgccagaactggcgctttctggcctgcgtttgtttattgcagggggcacatgcggcctattacggttttagcgccatttactggcaggcagctggctactcggcctcggcggtggggtatttgtggtcgctgggcgtggtggcggaagtcattatctttgcgctgagtaataaacttttccgccgttgtagtgcacgcgatatgctgttgatctcggcgatttgcggcgtagtgcgctggggcattatgggagcaactacggcgttgccgtggttgatagtggtgcaaattctgcattgcggcaccttcacggtctgccacctggccgccatgcgttatattgctgctcgccagggtagcgaagtcatccgtttacaggcggtttactctgccgtcgcgatgggcggcagtatcgctatcatgaccgttttcgccggtttcctgtatcaatatctgggccacggcgtgttctgggtaatggcgctggtggcgcttccggcaatgtttttgcgcccgaaagttgttccctcatgctgattcgagcattttgcggatctgctcctgttgatgtgttgtcagcgtcaggtccgtatagatcagcggtggtgaaaagagcggtaatggcatggtataaggcgcaataatcagtgccgcgccacgcggagcgcctgtctgcaaaaatgcctttaccgacatatgcttaatgttgagcggcagtaacgttagttcgcgtaactgctgctcaatctgcgcttctcgctcgctatcattcccggtaagaagaataatctgtttttcatgcagatcgttttcctgcattagccaggcaccgaaaatcaccgcgaccagaccactttcctcatcagaaagatggacgccgtattcactttcaaatccggccagcgccgcgcgggtggtgcgcaccaggcgtgggtacagtctggcgaactcttccggcagggtattatcaataccgatggcaaacaaactgcgatttaacgcctgggcgaggtgggtataaagctgatcacataacccctgttcatcataaaaacgaacatttcccagctcacgaaaatggtttaccagacgtttgatagactgacgcaattgtctgtctcgctgatgcgcatcccgcagtggatcgggaacccgcaacatggaaaaaagtagtgccataaacagtggctcatcaggtggtacaggctggagcgcccgacgctgccagtggcgtccaatttcctgcgctacctgaaattcaaggcaggattccgcccagcgacgttggagcggattaaactgaggcgtaattccagcgtggtgttgcagcaaacaatattgcagatacagacacaggaaatgaatatcgcgcgtttcaaagcgtttttgcagccgtcgggagcagagattcactaacgcttgtagattggtatcgtcgtaaaagttacgcgcaattccgcgccgcttcagttcactcttcagggcgggggtgaaatggctggtaataaatgatggacacagacggaaaccacgtcgtagccagtgaaataaacacaaacgttggttaagcactgtaccttcaacccggtagctaccgtcataaccagccgtcagtgtgagttgatgatagcgcaggatctcctgtcctgtttcgctgatatcaagactggcaatatcatcatccacaccattaagctcgctgaaagttgccgtggtggcggtcaaccccggctgaaagagcgtcagcaagatctggcagcggcgctggggagccgaaaggacagatggtggagcaagcgtaggcatcatctgtagatctcccataagcataattgataagaatagctaaagtttgctcagggaaatgacgaagggaatgctaatcatcagaaatgttggcaagcgtcacagaatttttctcatcttaaactgttctgaccagtggattagcatgtcttaaggtggttttgtgaatgattatcgtgctagcgatcatgggttagttctgcggattcaacgcgctaaggataaagtccaccatctgttcgcgataaacatcgccgtggcgatcggaaaaagcatcaatgtgttcgccatccgggattaggatcaaccgttttggctcttttgccaggctatacaacttttcgctgtgctgccatgggataacgtgatcagctttaccgtgaatgagtaaaagcgggatcgggctgacgctggcgatataattttcgccgctgtaactctcatcaagtaagtagccactgccggggatcatctggttggcgatggttgcataagaggcaaatgtggagtcgaggatcaccgcacgtatgccttcacgatcaccccgaccaataacatccagaatattcgccccgccaatactctgcccgaacagcaccagacgttgtgggtttacatcactgcgatggcgcaccacattgatggcactttgcgtatcgtccagcaatccggcttgggacggcgtgccttttgatttaccaaacccgcgataatcaaacataaaaacgttgaaattacgctcaggtaaccaactgaccagcggccagtgggcggacatatttccggcattgccgtgagcatgaatgatggttgcgatggcgttgtcagcagggcccgtcgaagaaggaataaaccagccttgcagacgagtaccgtccttagccgtaaattcgacggattccgccgaccaggggtcgggaccgtaaattttatcgtcaggataatagaagaagttgatggcaacgcgcggcactaaataaacgcagaaggcaacaacaaagagaataaacagaattttgggaacgcgtttgttcactggcagtgccataacctttccttgcgacttctttatcatccattaatcggggaaagatggtgggagagtgacgaaagaaagtaaagcggtgaggaagtatttcagaatagcgcctgaaaggcgagggcgggtgagtgacatcacccgcctgagtcattaacgcttcagagcgtcgcttaactcgtcacgcatgttcgccagcatggctttcacaacacgtgggttaccagcaacgatgttaccggtcagcatatagttatgaccaccggtgaagtcgctgacgatgccgcccgcttcacgaaccagcagctcgcctgccgcgaaatcccacggacgcagaccgatttcaaagaaaccgtcaacacgacccgcagcgacgtaagccagatccagcgccgcagaaccggtacgacggaagtctgcacattcgttgaacagtttgccgacgatgttgatgtaggtagtggcgtactgttttgctttgaacgggaagccggtcgccagaatggtaccgtcgagatcgcgagcggtgctaccgcgcagacggtagccgttcagctgtgcgccctgaccgcgagtggcggtgaacagttcgttacgcataggatcgtataccacagcaacttcggtgcggcctttgatacgaacggcgatagataccgcgaagtgcggcagacgtttgataaagttggtagtaccatccagtggatcgataacccattgaacatcctgatcagtaccttcaagttcaccgctttcttcggtgatgatggtgtgctgtgggtaagatttacgaatcgtgtcgataatcaccgcttcggcagctttatctacgttggtcacgaaatcgttactgcctttctggctcgcttctacagcgtccggggtttcatagtttttggcaattaaattacccgccttgcgcgctgcgcgcacggcgatgttcagcatcggatgcatcggtctctctcactggatgttaaagaacgggaaaacggcgcagagtatagcagcgagatcggcatctgtcttcgttttatgataagatgcgtgaataatctttagatgaagaaagacaatgctgcaaaatattcgaattgtgctggtggagacgtcacacaccggcaatatgggttctgttgcccgtgccatgaaaacaatgggattaaccaatctgtggctggttaatccactggtgaaacccgactcccaggcgattgccctggcagcaggggccagcgatgtgattggtaatgctcacatcgtcgatacgctcgacgaagcgttagccggttgtagcctggtggtgggcaccagcgcacgctcccgcacgctgccgtggccgatgctcgacccgcgcgaatgcggtctgaaaagcgtcgctgaagcggcaaatacccctgtggcgctggtgtttggtcgtgagcgcgtcggcttgaccaatgaagagttgcagaaatgccattatcatgtcgcgattgcggctaacccggaatacagctcgctgaacctggcgatggcggttcaggttattgcctatgaagtgcgcatggcctggctggcaactcaggaaaacggcgagcaggtcgagcatgaagagacgccgtatccgctggtcgatgatctggagcgtttttatggtcatctggaacaaacgctgctggcaaccggttttatccgtgaaaaccatccggggcaggtgatgaataaattgcgccgtctgtttacccgtgcgcgcccggaaagccaggaattgaatatcctgcgcgggattctggcttctattgagcagcagaataaaggtaataaggcctgagggctaagccagataaatgcacggacggtcccctcgccccttcggggagagggttagggtgaggggaagaggccagcgctaatgcgaataattgccctcaacccgcccatggtctggaaggacaacaggtacaaacgccacgataaaaaaatggcactgaaggttaaatacccgactaaatcagtcaagtaaatagttgaccaatttactcgggaatgtcagacttgaccctgctatgcaatacccccacttttacaataaaaaaccccgggcaggggcgagtttgaggtgaagtaagacatgagactgacatctaaagggcgctatgccgtgaccgcaatgcttgacgttgcgctcaactctgaagcgggcccggtaccgttggctgatatttccgaacgtcagggaatttccctttcttatctggaacaactgttttcccgtctgcgtaaaaatggtctggtttccagcgtacgtggaccaggcggtggttatctgttaggcaaagatgccagcagcatcgccgttggcgaagtaattagcgccgttgacgaatctgtagatgccacccgttgtcagggtaaaggcggctgccagggcggcgataaatgcctgacccacgcgctgtggcgtgatttgagcgaccgtctcaccggttttctcaacaacattactttaggcgaactggttaataaccaggaagtgctggatgtgtctggtcgtcagcatactcacgacgcgccacgcacccgcacacaagacgcgatcgacgttaagttacgcgcttaataaaaagaattcagaatcaggccggagtgctaaatactccgtaaacacggtcgtacatccagccggtagcctgattccttgcattgagtgatgtacggagtttatagagcaatgaaattaccgatttatctcgactactccgcaaccacgccggtggacccgcgtgttgccgagaaaatgatgcagtttatgacgatggacggaacctttggtaacccggcctcccgttctcaccgtttcggctggcaggctgaagaagcggtagatatcgcccgtaatcagattgccgatctggtcggcgctgatccgcgtgaaatcgtctttacctctggtgcaaccgaatctgacaacctggcgatcaaaggtgcagccaacttttatcagaaaaaaggcaagcacatcatcaccagcaaaaccgaacacaaagcggtactggatacctgccgtcagctggagcgcgaaggttttgaagtcacctacctggcaccgcagcgtaacggcattatcgacctgaaagaacttgaagcagcgatgcgtgacgacaccatcctcgtgtccatcatgcacgtaaataacgaaatcggcgtggtgcaggatatcgcggctatcggcgaaatgtgccgtgctcgtggcattatctatcacgttgatgcaacccagagcgtgggtaaactgcctatcgacctgagccagttgaaagttgacctgatgtctttctccggtcacaaaatctatggcccgaaaggtatcggtgcgctgtatgtgcgtcgtaaaccgcgcgtacgcatcgaagcgcaaatgcacggcggcggtcacgaacgcggtatgcgttccggcactctgcctgttcaccagatcgtcggcatgggcgaagcctatcgcatcgcaaaagaagagatggcgaccgagatggaacgtctgcgcggcctgcgtaaccgtctatggaacggcatcaaagatatcgaagaagtttacctgaacggtgacctggaacacggtgcgccgaacattctcaacgtcagcttcaactacgttgaaggtgagtcgctgattatggcgctgaaagacctcgcagtttcttcaggttccgcctgtacgtcagcaagcctcgaaccgtcctacgtgctgcgcgcgctggggctgaacgacgagctggcacatagctctatccgtttctctttaggtcgttttactactgaagaagagatcgactacaccatcgagttagttcgtaaatccatcggtcgtctgcgtgacctttctccgctgtgggaaatgtacaagcagggcgtggatctgaacagcatcgaatgggctcatcattaatcggtatcggaatcaggagaatttataatggcttacagcgaaaaagttatcgaccattacgagaatccgcgtaacgtgggttcctttgacaacaacgacgagaacgtcggcagcggcatggtgggggcaccggcctgtggcgacgtgatgaagttgcagattaaagtcaacgatgaaggtatcattgaagacgcgcgttttaaaacttacggctgcggttctgctatcgcttccagctccctggtcaccgaatgggtgaaagggaagtctctcgacgaagcgcaggcgatcaaaaacaccgatattgctgaagaacttgaactgccgccggtgaaaattcactgttctattctggcagaagacgcgatcaaagccgccattgcggactataaaagcaaacgtgaagcaaaataagagttgaggtttggttatgtcgattacactgagcgacagtgcagcagcgcgagtaaatacctttctggctaaccgcggcaaagggtttggcctgcgtctgggcgtgagaacctccggatgttcaggtatggcttatgtactggaatttgttgacgaaccgacgccggaagacatcgtgtttgaagacaaaggcgtgaaagtcgtggtcgatggcaaaagcctgcaatttctggacggtacgcagctggacttcgtaaaagaaggcctgaatgaagggtttaaattcaccaacccgaacgttaaagatgagtgtggttgcggcgaaagcttccacgtttgatgcgcataccgataaccccaccgtggtcgcctgcgcgtggggtttgttttacctgattcgccgttatcgcggcggatcgcagccctgagaatgttatggattacttcaccctctttggcttgcctgcccgttatcaactcgatacccaggcgctgagcctgcgttttcaggatctacaacgtcagtatcatcctgataaattcgccagcggaagccaggcggaacaactcgccgccgtacagcaatctgcaaccattaaccaggcctggcaaacgctgcgtcatccgttaatgcgcgcggaatatttgctttctttacacggttttgatctcgccagcgagcagcatactgtgcgcgacaccgcgttcctgatggaacagttggagctgcgcgaagagctggacgagatcgaacaggcgaaagatgaagcgcggctggaaagctttatcaaacgtgtgaaaaagatgtttgatacccgccatcagttgatggttgaacagttagacaacgaggcgtgggacgcggcggcggataccgtgcgtaagctgcgttttctcgataaactgcggagcagtgccgaacaactcgaagaaaaactgctcgatttttaatttctggaagctaaacatggccttattacaaattagtgaacctggtttgagtgctgcgccgcatcagcgtcgtctggcggctggtattgacctgggcacaaccaactcgctggtggcgacagtgcgcagcggtcaggccgaaacgttagccgaccatgaaggccgtcacctgctgccatctgttgttcactatcaacagcaagggcattcggtgggttatgacgcgcgtactaacgcagcgcttgataccgccaacaccattagttctgttaaacgcctgatgggacgctcgctggctgatatccagcaacgctatccgcatttgccttatcaattccaggccagcgaaaacggcctgccgatgattgaaacggcggcggggctgctgaacccggtgcgcgtttctgcggacatcctcaaagcactggcggcgcgggcaactgaagccctggcaggcgagctggatggtgtagttatcaccgttccggcgtactttgacgatgcccagcgtcagggcaccaaagacgcggcgcgtctggcggggttgcatgttctgcgcttacttaacgaaccgaccgctgcggctatcgcctacgggctggattccggtcaggaaggcgtgatcgctgtttatgacctcggcggcgggacgtttgatatttccattctgcgcttaagtcgcggtgtgtttgaagtgctggcgaccggcggtgattccgcgctcggtggtgatgatttcgaccatctgctggcggattacattcgcgagcaggcgggcattcctgatcgtagcgataaccgcgttcagcgtgaactgctggatgccgccattgcagccaaaatcgcgctgagcgatgcggactccgtgaccgttaacgttgcgggctggcagggcgaaatcagccgtgaacaattcaatgaactgatcgcgccactggtaaaacgaaccttactggcttgtcgtcgcgcgcttaaagacgcgggtgtagaagctgacgaagtgctggaagtggtgatggtgggcggttctactcgcgtgccgctggtacgtgaacgggtaggcgaatttttcggtcgtccaccgctgacttccatcgacccggataaagtcgtcgctattggcgcggcgattcaggcggatattctggtgggtaacaagccagacagcgaaatgctgttgcttgatgtgatcccactgtcgctgggcctcgaaacgatgggcggcctggtggagaaagtgattccgcgtaataccacgattccggtggcccgcgctcaggatttcaccacctttaaagatggtcagacggcgatgtctatccatgtaatgcagggtgagcgcgaactggtgcaggactgccgctcactggcgcgttttgcgctgcgtggtattccggcgctaccggctggcggtgcgcatattcgcgtgacgttccaggtcgatgccgacggtcttttgagcgtgacggcgatggagaaatccaccggcgttgaggcgtctattcaggtcaaaccgtcttacggtctgaccgatagcgaaatcgcttcgatgatcaaagactcaatgagctatgccgagcaggacgtaaaagcccgaatgctggcagaacaaaaagtagaagcggcgcgtgtgctggaaagtctgcacggcgcgctggctgctgatgccgcgctgttaagcgccgcagaacgtcaggtcattgacgatgctgccgctcacctgagtgaagtggcgcagggcgatgatgttgacgccatcgaacaagcgattaaaaacgtagacaaacaaacccaggatttcgccgctcgccgcatggaccagtcggttcgtcgtgcgctgaaaggccattccgtggacgaggtttaatatgccaaagattgttattttgcctcatcaggagctctgccctgatggcgctgttctggaagctaatagcggtgaaaccattctcgacgcagctctgcgtaacggtatcgagattgaacacgcctgtgaaaaatcctgtgcttgcaccacctgccactgcatcgttcgtgaaggttttgactcactgccggaaagctcagagcaggaagacgacatgctggacaaagcctggggactggagccggaaagccgtttaagctgccaggcgcgcgtcaccgacgaagatttagtggtcgaaatcccgcgttacactatcaaccatgcgcgtgagcattaacagaggttagtatgggacttaaatggaccgatagccgcgaaattggcgaagcactgtacgatgcgtatcccgatcttgatccgaaaacggttcgattcaccgatatgcatcagtggatttgcgatctggaagatttcgacgacgacccgcaggcatccaacgagaaaatcctcgaagcgattttgttagtctggctggacgaggccgaataatttccgcgtcatgcttcacgccgcagatgcgttggctgcgctcgttcaccccagtcacatagttatctatgctcctggggcttcactcacttgccgccttcctgcaacgcgaatcatttagcggaaaaatcctggggctgccaactggcggcccttttacaaagaaggataactaaaatgacagaagcgatgaagattaccctctctacccaacctgccgacgcgcgctggggagaaaaagcaacttacagcattaataatgacggcattaccctgcatttgaacggggcagacgatctggggctgatccagcgtgcggcgcgcaagattgacggtctgggcatcaagcatgttcagttaagcggtgaaggctgggatgcggatcgctgctgggcattctggcaaggttacaaagccccgaaaggcacgcgtaaagtggagtggccggatctggacgatgcccagcgccaggaactggataaccgcctgatgatcatcgactgggtgcgtgacaccatcaacgcaccggcagaagaattgggaccatcgcaactggcacagcgtgctgttgatctgatcagcaacgtcgcgggcgatcgtgtgacttatcggatcaccaaaggcgaagatctgcgtgagcaaggttatatggggctgcacacagtcggacgcggttcagaacgttctccggtattgctggcgctggattacaacccaactggcgataaagaagcgccagtgtacgcgtgcctggtaggtaaaggtatcacttttgactccggcggctacagcatcaaacagactgcgtttatggactcgatgaagtcggacatgggcggcgcggcaacggttaccggggcgctggcatttgccattacgcgcggactgaacaagcgcgtgaagctgttcctctgctgtgcggataacctgattagcggcaatgcgttcaagctgggcgatatcatcacctatcgcaacggtaaaaaagttgaagtgatgaacactgatgccgaagggcgtctggtgctggccgatggtctgattgatgccagtgcgcagaaaccggaactgatcattgatgcggcgaccctcaccggggcggcgaaaactgcgctgggtaatgattatcacgcgctgttcagttttgacgatgcgcttgccggtcgtttgctggcgagtgcctcacaagagaacgaaccattctggcgtctgccgctggcggaattccaccgcagccagctgccgtctaactttgccgaactgaacaataccggaagcgcggcgtatccggcaggcgcgagcacggcggcgggcttcctgtcgcactttgttgagaactatcagcaaggctggctgcatatcgactgctcggcgacttaccgtaaagcgccggttgaacagtggtctgcgggcgctacgggacttggtgtgcgcacgatagctaatctgttaacggcgtaaactaatatgccggatgcggcgtaaacgccttatccggcctacaaattctgcaaattcaacaaattgcgaatcccttgtaggcctgataagcgtagcgcatcaggcatttgcgccccgaacgttgaatgaattgtggttcatatgtccgaaacaaaaaacgaacttgaagacctgctggaaaaagcagcaaccgaaccggcgcaccgcccggcctttttccgtactctactggaatccaccgtctgggtgcctggtacggcggcgcagggcgaggctgtggttgaagatagtgcgcttgatttacagcactgggaaaaagaagacggcaccagcgtcattccttttttcacctcgttagaatcgcttcaacaggcggttgaagacgaacaggcatttgtcgtaatgcccgttcgcacattgtttgagatgacccttggcgaaacgctcttccttaatgccaaactgccgaccggtaaagaatttatgccgcgtgaaatcagtttgttgattggtgaagagggaaatccgctgagcagccaggaaatcctggaaggcggtgaatcgctgatattatcggaagtcgcagagccgccagcacaaatgattgattcactcaccaccttatttaaaaccattaagtcggtgaagcgtgcttttatttgttcaattaaagagaacgaagaggcacagcctaatttacttattggcattgaagccgatggtgatatcgaagaaattattcaggcgacgggaagtgtagcgaccgatacattacctggcgatgaaccaatcgatatttgtcaggtgaaaaaaggggaaaaaggaattagccactttattaccgaacatattgtgccattctatgaacgtcgctggggtggttttttgcgtgactttaaacaaaaccggataatctaaaatatgccgccctaaagggcggcattcgggcttacttgctgctctgaaggttgttaaccaccagtaaattgtcgccggagagactccggttattatttacttgggaaaacagcgcaccagaaacaataagtacgatacagaagcaccgtatcttcattgtgcggtccatgcgaagtccgcatcacgacagcaccactggcgatattgccgcgatagcaagcgctgagacgcgcttgctctaacggtcgcggaacatcctttccttaagccagcgcccgcttgcgagacggcggaaagggccgcagtggataatacactaacagaacaataataactctcttttgcttgacaaaaagagagttactggcgagtattgtctccgctgagacgcgcttgcattactacggtaatacaacctgctggaaaggccgcgaaccagaccagcaataaaaaaccgccaaattcggcggttttttattgcctgtaaaatacttatttcactggctcaaccggtaaatctgcccgcgcgccccattcactccatgcgccgtcgtacagtttcacgtttggcacatccagcgtcgcgagtgctaacaaaaccacggctgccgttacaccagagccgcagctgacgataattggtttgtcgtagctgacgccgcgaccaaaaaatatcgcatccagttcatcggtcgtttttagttcgccttcgcgcaccagttccgtccacggaacattcagtgctccgggaatatgtccgcgacgtaaacctgggcgaggttcatcaacttctgcgttaaaacgtgcagccgggcgggcatcaataatttgcgccgtattttcatggcttgccaataatacatcggttactttcaccacggcttcaggattaaacgcggcgttaaactctccttccggcagctctactgcaccttcttctaacagcagatcatcgcgctgccagcctgcaagtccaccccccagaatcgacactttctctacaccaaaggtgcgcagcatccaccatgctcgtggggctgagaaaagattaccttcgtcatagacaatcaggtgcttatcctggttaacgcctaattcacgcatcgccacggcgaacgtttccgggcgcggcagcatgtgcggaagcggggaagtgtgatcagaaagcgcttcgatatcaaaaaacactgcgccgggaatatgtccattcagatactcctgagcaacgttacgatcttcctgtccaggcgacgccatgcgggcatcgataatctgaatttccgggtcatcaatatgttcggcgagccagtcggctcctacaaaccatgtcgtggacataggcatctccatttttgccggggttaggctaaattgtcggatgtttagtgaaaagcgacaagcgaaagaggctgatttggctgtctgagccacaattctcactaaaattcggattgtatgggcgtgatactgaattacataacgtaaattctcacgcataataattattcgacgttgctaacgggccattgtggcagggatgaaaaatgaaaaagttacgcgtagccgcctgcatgctaatgctggcgctggcagggtgcgacaacaacgataacgcgccaacagcggtgaaaaaagatgcgccttctgaagttactaaagcggcctcttcagaaaacgcgagttcagcaaaactctccgtgccggagagacaaaaactggcccaacagagtgccggtaaggtgctgacattgctggatctctctgaagtccaacttgatggtgcagccacgctggtgctgacgttctccatccctctcgacccggatcaggatttctcacgcgttattcatgtcgtcgataaaaaaagcggcaaagtggatggtgcctgggagctgtcagataatcttaaagagctgcgtttacgccacctcgaaccgaaacgtgatttgatcgttactattggcaaggaggtcaaagcactcaacaacgcaaccttcagtaaagattacgaaaaaactataactacccgcgacatccaacccagcgtcggttttgccagccgtggttcgctgctgcctggtaaagtcgttgaagggctgccggtaatggcgctcaacgttaataatgtcgatgttaacttcttccgcgttaagccagaatctctgccagcattcattagccaatgggaataccgcaattcgctggcgaactggcagtcagacaaactgctgcagatggcggatctggtctacaccggacggtttgatctcaatcctgcgcgtaacacccgtgaaaaattattgctgccgctgggcgatatcaaaccgcttcagcaggcgggcgtgtatctggctgtgatgaatcaggctggacgttacgattacagtaatcccgcgacgctgtttacgttaagtgatatcggcgtttcagctcaccgttatcacaatcgtctggatatctttacccaaagtctggaaaacggcgcggcccagcaaggaattgaagtctctttattaaatgagaaagggcagactctgactcaggcaaccagtgacgctcaggggcatgtgcagctggaaaatgataaaaacgcggcattactgttggcgcgtaaagacggtcagacaacgctactcgatttaaaacttccggcgctggacttagcagaatttaacattgctggcgcgccaggctatagcaaacagtttttcatgtttggcccacgcgatctttatcgcccgggtgaaacggtaatcctcaatggtttgctgcgtgatgcagacggtaaagcgttgcccaatcaacccatcaagttagacgtgattaaacccgatgggcaggtactcaggagcgtcgttagtcagccggaaaatggcctctaccactttacctggccactcgatagcaatgcggcaaccggtatgtggcatattcgcgctaacacgggcgataaccagtatcggatgtgggatttccacgtcgaagattttatgccagagcgcatggcgctgaatctgaccggtgagaaaaccccgctaacgccgaaagatgaagtgaaattctccgtggtggggtactacctgtatggtgcacctgctaatggtaatactttgcaagggcaacttttcctgcgcccactgcgtgaagctgtgtcagccttacctggttttgaattcggcgatatagctgccgaaaatctttcccgcacgctggatgaagttcagttgacgctggatgataaagggcgcggcgaagtttctacagaaagccagtggaaggaaacgcattccccattacaggttattttccagggtagtttgctggaatcgggcggtcgcccggtgacgcgccgcgctgagcaggctatctggcctgccgatgcattgccggggatccgtccgcagttcgcctcgaaatcggtttacgattatcgcactgacagcacggtgaaacagcccattgttgatgaaggcagtaacgccggttttgacatcgtttatagcgatgcgcaaggcgtgaaaaaagccgtgtcgggcttgcaggtgcgcctgattcgcgaacgccgcgattactactggaactggtcagaagatgaaggctggcagtcacagtttgatcaaaaagatctgatcgaaaatgaacaaactctggatcttcaggcggatgaaaccggtaaggtcagtttcccggtagagtggggcgcttatcgtctggaagtcaaagcgccgaatgaagcggtcagtagcgtgcgtttctgggctggctatagctggcaggacaacagcgacgggagcggtgccgtgcgacccgaccgtgtcacgctgaaactggataaagccagttatcgccctggcgataccattaagttgcatattgccgcgccaacggcgggtaaaggttatgcgatggtcgagtccagtgaagggccgttgtggtggcaagagattgatgttccggctcaagggctggatctgacgattccggtcgataaaacctggaatcgtcatgatctgtatttaagtacgctggtagtacgtcctggcgataaatctcgctccgcgacgccaaaacgcgcagttggggtgttgcatctgccgcttggcgatgaaaaccgtcgcctcgatctggcgctggaaacaccagcaaaaatgcggccgaatcaaccattaaccgtgaaaattaaagccagcactaaaaatggcgagaagcctaaacaggtgaatgtgctggtgtctgccgttgatagtggtgtgctgaatattactgactacgtcacgccagatccgtggcaggcgttctttggtcagaaacgctatggcgcagacatttacgatatttacggtcaggttattgaaggtcaggggcgtctggcagctctgcgtttcggtggcgatggtgatgagctgaaacgtggtggtaaaccgccggtcaatcacgtcaatattgtcgcgcagcaggcgctgccggtaacgctcaacgaacagggcgaaggctcggttacactgccgattggcgattttaacggtgaattacgcgtcatggcgcaagcctggacggcagatgacttcggtagcaacgaaagcaaagtgatagttgccgcaccggtgattgctgaactgaacatgccgcgctttatggcgagtggcgatacctcgcgtctgacgctggatatcactaatcttaccgataaaccgcaaaaactgaacgttgccctgaccgccagtggtttgcttgaactggtcagcgattcacccgcagccgttgaattagcgccaggtgtgcgtactacgctgtttatcccggtgcgagcattgccgggttatggcgatggagaaattcaggccaccattagcgggttagcgttaccgggtgaaaccgttgccgatcagcataagcagtggaaaatcggcgtccgtccggcgttcccggcacaaacggttaattacggtacggcgttacagcctggtgagacatgggcgattccggcggatggattgcaaaacttctcgcctgttacgctggaagggcaattgttgttgagcggcaaaccaccgctgaacattgcacgttatatcaaagagttaaaagcgtatccgtacggctgtcttgagcaaaccgccagcggcctgttcccgtcactttataccaacgcagcccaactgcaggcgttgggcatcaaaggcgacagtgatgagaaacgccgtgcatcggtcgatatcggcatttcccgtttgctgcaaatgcaacgtgataacggcggctttgcgctgtgggataaaaacggtgacgaagagtactggctgacggcttacgtgatggatttcctggtccgcgcaggcgaacagggttacagcgtgccgacagacgccattaaccggggtaatgagcgtctgctgcgctatttacaagatccgggcatgatgtcgatcccgtacgcggataatctcaaagccagtaaattcgccgtacagtcttacgctgcgctggtgttggcccgtcaacaaaaggctccgctgggtgcgctgcgtgaaatctgggagcatcgtgcagatgccgcttctggtttaccgctgctgcaacttggcgttgcgctgaaaaccatgggtgatgcaacgcgtggtgaagaagcgattgtgctggcgctgaaaacgccgagaaatagtgatgagcggatatggctgggtgattacggtagtccactgcgcgacaacgcgttaatgctctccttgctggaagaaaataaactgctacccgatgagcagtacactttgctgaacacactttcgcagcaggcgtttggtgaacgctggctatcgacgcaggaaagtaacgcgttgttcctggctgcccgtacgattcaggatttaccgggtaaatggcaggcgcaaacctctttctcagctgagccgctgacaggcgagaaaacgctaaacagcaatctgaatagcgatcaacttgccaccttgcaggtgagaaacagtggcgatcagccgttatggttgcgtatggatgccagcggttatccgcaatccgcacctttaccggcgaacaatgtgctgcaaatcgagcgtcatattcttggtactgatggtaagagcaaatcgctggactcgttacgtagcggcgatctggtgctggtctggttgcaggtaaaagccagtaacagcgtgccggatgcgttagtcgtggatctgctgcctgcgggtctggaactggaaaatcagaatctggcgaacggtagcgccagcctggagcaaagtggtggcgaagtgcaaaacttactgaaccagatgcagcaggcgagcattaagcacattgagttccgtgacgatcgctttgtggcggcggttgccgttgatgaataccaaccggtaacgctggtgtatctggcgcgggcggtgacgccgggaacgtatcaggtaccgcaaccgatggtggaatcaatgtatgttccccaatggcgggcgaccggcgcggctgaagatctgctgattgtccgaccgtaaatgcctcgcttgttaaccaaacgcggctgctggataacgctggcagctgcgccatttctcctttttcttgcagcgtgggaagcagataaactctggcctctaccgctgcatgaagtcaatcccgcacgagtggtcgtggcgcaggatggtacgccgctatggcgcttcgccgatgctgacggcatctggcgttatccggtaacaatcgaagatgtttcttcacgttaccttgaagcgctgatcaattatgaagatcgctggttctggaagcatccgggggtgaatccattctcggtggcgcgcgcagcatggcaagatctcacttcgggacgggttatttccggtggcagcacgctcactatgcaggttgctcgtctgcttgatcctcaccccaaaacatttggcggcaaaattcgccagctctggcgcgcgttgcaactggaatggcatctgtctaagcgtgaaattctgaccttgtatcttaaccgcgctccgtttggcggtacgttgcaggggatcggtgcggcaagttgggcttatctcggaaagtcgcctgcgaatttaagctattccgaggcggcaatgctggcggttttgccgcaagcgcccagccgtcttcgcccggatcgttggccggagcgtgccgaagccgcgcgtaataaagtgctcgaacggatggccgtgcaaggtgtgtggtcccgtgagcaggtaaaagagtcaagggaagaacccatctggctggcaccccgacaaatgccgcaactggcaccgctgttttcgcgcatgatgctcggtaaaagcaaaagcgacaaaatcgttactacgctggatgccggtcttcaacgacgtctggaagaactggcgcaaaactggaaagggcggttgccaccgcgcagctcactggcgatgatcgtggttgatcataccgatatgcgtgttcgcggctgggtgggatcggttgatctcaacgatgattcacgctttggtcatgttgatatggtcaatgcgatccgatcgccaggatcggtgctcaaaccgtttgtttatggtctggcgctggatgaaggcttgatccacccggcatcactgctgcaagacgtcccccggcgcaccggtgattatcgaccaggtaactttgatagcggttttcatggcccgatcagcatgagcgaggcgctggtgcgctcgctgaacttacctgctgtgcaggtgctggaagcctatggaccgaaacggtttgcggcaaagttacgcaatgttggattgccgttatatttgcccaacggtgctgcgccgaatctttcactcattctcggcggcgctggtgcaaaactggaagatatggcggcagcgtataccgcgtttgctcgccacggcaaggcaggcaaattgcgcttacagcctgacgatccgctgcttgaacggcctttaatgtcgtcgggggcggcgtggatcattcgccggattatggctgatgaagcgaaacccttgccggatagtgccttgccgcgcgtcgccccactggcatggaaaacgggcaccagctatggctatcgtgacgcctgggcgattggggttaacgctcgctatgtcattgggatctggactggcagaccggacggcacgcccgttgttggtcagtttggctttgccagtgccgtaccattgttgaatcaggtcaataatatcttactgtcgcgcagtgcgaatctgccggaagacccgcgcccgaactcagtcactcgtggcgttatctgctggccgggcggacagtctttgccggaaggtgacggtaactgtcgccgccgcctggcaacctggctgctggacgggagtcagccgccaactctattactgccggagcaggaaggcattaatggcattcgtttccccatctggctggatgaaaatggcaaacgtgttgccgctgattgcccgcaagcgcgacaagaaatcataaatgtctggccgctaccgctggaaccctggctgcccgcatcagaacgtcgcgctgtgcgcttaccaccggcctcgacaatttgcccgccatacggtcacgatgccaagctccctctgcagctgacaggcgttcgcgatggcgcgattattaaacgtttaccgggcgcagcggaagcgactttgccgttgcaatcaagtggaggggcaggtgaacgctggtggtttctgaatggcgaaccgttaactgaacgcgggcgcaacgtgaccctgcatttgacggataaaggtgattatcaattgctggtgatggatgatgtggggcaaatcgcgacagtgaaatttgtcatgcaatagtctgttttgcccctgattgttgctaaaactcattttattttaaaaaaatgttaccttcatcaatagtcaacggccctgttgctcattataatccgcgccatctcgtacgctggtacagacaacaacagaacaatttacagaggtaaaaatggctattgaacgtactttttccatcatcaaaccgaacgcggtagcaaaaaacgtcattggtaatatctttgcgcgctttgaagctgcagggttcaaaattgtcggcaccaaaatgctgcacctgaccgttgaacaggcacgtggcttttatgctgaacacgatggaaaaccgttctttgatggtctggttgaattcatgacctctggcccgatcgtggtttccgtgctggaaggtgaaaacgccgttcagcgtcaccgcgatctgctgggcgcgaccaatccggcaaacgcactggctggtactctgcgcgctgattacgctgacagcctgaccgaaaacggtacccacggttctgattccgtcgaatctgccgctcgcgaaatcgcttatttctttggcgaaggcgaagtgtgcccgcgcacccgttaataatttcgtaaatgccgcgtgcaaacgtggcatccgtgcgccagaatttgtacaatgcagcgcccccggacgagcagccgctcaccggggcgtttcttttttcaaccctccaggggccataacgtgtaataacgaggccggaatagcatatgtctgaacaattagtcacacctgaaaacgtcaccacgaaagatggaaaaatcaacctgctggatctcaaccgtcagcagatgcgggagttttttaaagatttaggtgaaaaacccttccgcgccgatcaggtgatgaagtggatgtatcactattgctgcgacaactttgatgagatgaccgacatcaacaaagtgttgcgcggcaaactgaaagaggtggcggaaatccgcgcaccggaagtggttgaagaacagcgttcatccgacggcaccattaaatgggcgatcgccgttggcgatcagcgcgtcgaaacggtgtatatcccggaagacgaccgtgccacgctctgcgtctcttcgcaggtggggtgtgcgctggagtgtaaattctgttccaccgcccagcagggctttaaccgcaacctgcgggtgtcggaaattatcggccaggtgtggcgtgcggcgaaaatcgtcggcgcagcaaaagtcaccggtcagcgcccaatcactaacgtagtgatgatgggcatgggcgagccgctgctcaacctgaacaacgtcgttccggcgatggaaatcatgcttgatgatttcggttttggcctgtctaaacgtcgcgtcacgctttctacttccggtgtagttccggcgctggataaactgggcgatatgatcgacgttgcactggcaatttccctgcacgcgccgaacgacgaaattcgtgacgaaattgtgccgatcaacaaaaagtacaatatcgaaacgttccttgctgcggtgcgccgttatctggagaaatccaacgccaatcagggccgagtcactattgaatacgtgatgcttgaccacgttaacgacggcactgaacacgcgcaccaactggcggagctgctgaaagatacgccgtgtaagatcaacctgatcccgtggaacccgttcccgggcgcgccgtatggacgcagttcgaacagccgtatcgaccgtttctcaaaagtgctgatgagctacggtttcaccactattgtgcgtaaaactcgtggtgatgatatcgatgctgcctgtggtcagttggcgggcgatgttatcgaccgtacgaaacgtaccctgcgtaaacggatgcagggtgaagccatcgacattaaagcggtctgatagccattacgccacggttactttatgtaccgtggcgtaatcttttatgaatgaagtattaagttgcaattgtctggtcaatattaacggtgcgtttttgctgactttaaggcagtatgtaacgatgcaacagtaagttagccttagtgaatgtgggctttgtcacgagcacacagacggtcttatactgtatgataacggttaacttaacggatgtttcgcggtgtgggtgagcatgatggttcaccggcatctcaattctcatttaaacgtacctgcagcgaatgaatactgaagccacgcacgaccaaaatgaagcacttactaccggcgctcgcctgcgtaatgctcgcgaacaactaggacttagtcagcaggccgttgccgagcgactttgcctgaaggtttccacggtacgcgacattgaagaagataaggcacccgccgatcttgcttcaacattcctgcgcggatatatccgctcttatgcgcgtctggtacatattccagaagaagaactgctgccagggctggaaaagcaggctccactacgggctgcgaaagttgcgccgatgcagagtttttccctcggtaaacgccgcaaaaaacgtgacggctggctgatgaccttcacctggctggtgttgtttgtggttatcggcctgagcggtgcctggtggtggcaagaccacaaagctcagcaggaagagatcaccactatggccgatcaatcttcggcggaactgagcagtaatagcgagcaggggcagagtgttccgttaaatacgtcgacaactacagacccggctacaacgtccacgccgccagcgtctgtggatactaccgcaaccaacacgcaaacacctgccgtaactgcgccagcaccagctgttgatccgcaacagaatgcggttgtttcgccttcgcaggcaaatgttgataccgccgcgaccccggcaccaacggcagcaacaacgccagatggtgctgcgccgttgccaaccgatcaggctggcgtgaccacgccggtggctgatccgaatgcgctggtgatgaactttactgccgattgctggctggaggtcactgatgctaccggtaaaaaattgtttagcggtatgcagcgtaaagacggtaatttgaacttaaccggccaggcaccatacaaactgaaaattggtgcgccagccgcagtacagatccagtatcaagggaaacctgtcgatctgagtcgttttatcagaactaaccaggttgcgcgtctgaccctcaatgccgaacaatcaccggcgcagtaacagacgggtaacgcgggagatttttcatgcataaccaggctccaattcaacgtagaaaatcaacacgtatttacgttgggaatgtgccgattggcgatggtgctcccatcgccgtacagtccatgaccaatacgcgtacgacagacgtcgaagcaacggtcaatcaaatcaaggcgctggaacgcgttggcgctgatatcgtccgtgtctccgtaccgacgatggacgcggcagaagcgttcaaactcatcaaacagcaggttaacgtgccgctggtggctgacatccacttcgactatcgcattgcactgaaagtagcggaatacggcgtcgattgtctgcgtattaaccctggcaatatcggtaatgaagagcgtattcgcatggtggttgactgtgcgcgcgataaaaacattccgatccgtattggcgttaacgccggatcgctggaaaaagatctgcaagaaaagtatggcgaaccgacgccgcaggcgttgctggaatccgccatgcgccatgttgatcatctcgatcgcctgaacttcgatcagttcaaagtcagcgtgaaagcgtctgacgtcttcctcgctgttgagtcttatcgtttgctggcaaaacagatcgatcagccgctgcatctggggatcaccgaagccggtggtgcacgcagcggggcagtaaaatccgccattggtttaggtctgctgctgtctgaaggcatcggcgacacgctgcgcgtatcgctggcggccgatccggtcgaagagatcaaagtcggtttcgatattttgaaatcgctgcgtatccgttcgcgagggatcaacttcatcgcctgcccgacctgttcgcgtcaggaatttgatgttatcggtacagttaacgcactggagcaacgcctggaagatatcatcactccgatggacgtttcgattatcggctgcgtggtgaatggcccaggtgaggcgctggtttctacacttggtgtcaccggcggcaacaagaaaagcggcctctatgaagatggcgtgcgcaaagaccgtctggacaacaacgatatgatcgaccagctggaagcacgcattcgtgcgaaagccagtcagctggacgaagcgcgtcggattgacgttcagcaggttgaaaaataataacgtgatgggaagcgcctcgcttcccgtgtatgattgaacccgcatagctcccgaaacattgagggaagcgttgagggttcatttttatattcagaaagagaataaacgtggcaaaaaacattcaagccattcgcggcatgaacgattacctgcctggcgaaacggccatctggcagcgcattgaaggcacactgaaaaacgtgctcggcagctacggttacagtgaaatccgcttgccgattgtagagcagaccccgctattcaaacgtgcgattggtgaagtcaccgacgtggttgaaaaagagatgtacacctttgaggatcgcaatggcgacagcctgactctgcgccctgaagggacggcgggctgtgtacgcgccggcatcgagcatggtcttctgtacaatcaggaacagcgtctgtggtatatcgggccgatgttccgtcacgagcgtccgcagaaagggcgttatcgtcagttccatcagttgggctgcgaagttttcggtctgcaaggtccggatatcgacgctgaactgattatgctcaccgcccgctggtggcgtgcgctgggtatctccgaacacgtaactcttgagctgaattctatcggttcgctggaagcacgcgccaattaccgcgatgcgctggtggcattccttgagcagcataaagaaaagctggacgaagactgcaaacgccgcatgtacactaacccgctgcgcgtgctggattccaaaaatccggaagtgcaggcgcttctcaacgatgctccggcattaggcgattatctggacgaggagtctcgtgagcactttgccggtctgtgcaaactgcttgagagcgcggggatcgcttacaccgtaaaccagcgtctggtgcgtggtctggattactataaccgtaccgttttcgagtgggtgactaacagtctcggctcccagggcaccgtgtgtgcaggcggtcgttatgacggtcttgtggaacaactgggcggtcgtgcaacaccggctgtcggttttgcgatgggcctcgaacgtcttgtattgttagtacaggccgttaatccggaatttaaagccgatcctgttgtcgatatatacctggtggcttcaggtgctgatacacaatctgcggctatggcattagctgagcgtctgcgtgatgaattaccgggcgtgaaattgatgaccaaccacggcggcggcaactttaagaaacagtttgcccgtgctgataaatggggtgcccgcgttgctgtggtgctgggtgagtctgaagtggctaacggcacagcagtagtgaaggatttgcgctctggtgagcaaacggcagttgcgcaggatagcgtagccgcgcatttgcgcacgttactgggttaaggaaggagaaggacagcgtggaaatttacgagaacgaaaacgaccaggtagaagcggttaaacgcttttttgctgaaaatggcaaagcactggctgttggggtgattttgggcgttggcgcactgattggctggcgctactggaacagccatcaggttgattctgcacgctccgcttctcttgcctatcaaaatgcggttaccgcagtgagcgaaggcaaaccggatagcatcccggcggcggaaaaatttgctgctgaaaataaaaatacttatggtgcgctggcttctttggaacttgcgcagcaatttgttgacaaaaatgaactagagaaagctgccgcccagttacaacaggggctggcagacacgagcgatgaaaatctcaaagccgtgataaatctgcgtcttgctcgcgttcaggtacagctcaagcaggctgatgccgcgctgaaaacccttgataccatcaaaggtgaagggtgggctgccattgttgccgacctgcgtggtgaagcattgctgagcaaaggtgataagcaaggtgcgcgtagtgcatgggaagcaggcgtgaaaagcgatgttactccggcactgagcgaaatgatgcagatgaaaattaataatttgtccatctgagagggacccgatgcaattgcgtaaattactgctgccaggactgctttccgttacccttttaagcggctgttcgctgtttaacagcgaagaagatgtggtaaagatgtccccattgccaaccgttgaaaaccagtttacgccgaccacggcgtggagcacttccgttggtagcggcattggcaacttctattccaatcttcatccggcactggcggacaacgttgtctatgcagcggaccgcgctggtttagtaaaagcgctgaatgcggatgatggcaaagaaatctggtctgtcagcctggctgagaaagatggctggttctctaaagagcctgcattactttctggcggtgtgaccgtgtctggtgggcatgtctacattggcagcgaaaaggcgcaggtttacgcgctgaataccagcgatggtactgtggcatggcaaactaaagtcgcgggtgaagcactttcgcgcccggtggtcagcgacggtctggtgttaatccacaccagtaacggtcagttacaagcgctgaacgaagctgacggcgctgtcaaatggacagttaacctcgatatgccttcgctctctttgcgtggcgagtctgcgccagcaacggcttttggtgcggccgtcgtggggggcgataatggtcgcgtcagcgcagtgctgatggaacagggccagatgatttggcagcagcgtatttcccaggcgaccggttctaccgaaattgaccgtctgagcgatgttgacacgactcccgtcgttgttaacggcgttgttttcgcgctggcctataatggtaacctgacggcgcttgatctgcgcagtggtcagattatgtggaaacgcgaactgggttcggtgaatgatttcatcgtcgacggcaatcgcatctatctggtcgatcaaaatgaccgggtgatggcgttgaccattgatggcggcgttacgctgtggacacaaagcgatctgctgcatcgcctgctgacttctccggtgctgtataatggcaacctggtggtcggtgacagtgaaggttatttgcactggattaacgtcgaagatggtcgtttcgttgcccagcaaaaagttgatagttccggtttccagactgaaccggttgccgctgacggcaaactgctgatccaggcaaaagacggaaccgtgtactctattacacgttaatcgtctctgtcgttcactttgaaaacggctcctggacaggggccgttttcctgtttttaacaacgacgcgaatatagcgtgcgttgtctgatgatttataaaaatgaggctttaaacatggtacctgtggtcgcgcttgtcgggcgccctaacgtaggaaaatccacgttatttaaccgtctaactcgcacccgagatgcgctggttgcggatttcccgggtctgactcgtgaccgtaagtacggtcgtgcggaaattgaaggccgtgagtttatctgtattgataccggcgggattgatggcacagaagacggtgtagaaacccgcatggcggaacagtcgctgctggcgattgaagaagcggacgtcgtactgtttatggtggatgcgcgcgcgggcctgatgccggcagatgaagcgattgccaaacatctgcgctcccgtgaaaaaccgaccttcctggtggcaaacaaaactgacggtctggatcccgatcaggcagtggttgatttctactcgcttggtttaggtgaaatctacccgatcgccgcgtctcacggtcgtggcgtattaagtctgctggagcatgtcctgctgccgtggatggaagatctcgcaccgcaagaggaagtcgacgaagacgctgaatactgggcacaatttgaagcggaagagaacggcgaagaagaagaggaagacgacttcgacccgcaaagtctgccgatcaaactggcgattgtgggtcgtccgaacgtaggtaagtctacactcactaaccgtattcttggtgaagagcgcgttgttgtttatgacatgcctggtacgacgcgtgacagtatctacattccaatggaacgcgacggacgtgagtatgtgctcattgacaccgctggcgtacgtaaacgcggcaaaatcaccgatgctgtagagaaattctccgtaatcaaaacgttgcaggccattgaagatgccaacgtggtgatgttggtgattgatgcgcgcgaaggtatttccgatcaggatctctcgctgctgggctttattctcaatagtgggcgctcacttgtcattgtggtgaataagtgggatggcctgagtcaggaagtgaaagagcaggtgaaagaaacgctggacttccgtctgggctttatcgattttgctcgtgtgcactttatctctgccttgcacggcagtggtgttggtaacttgtttgaatcagtacgtgaagcgtatgacagctccacccgtcgtgtggggacctctatgctgacgcgcatcatgacgatggctgttgaagatcaccaaccgccgctggtacgcggtcgtcgtgtgaagctgaaatatgcccacgccggtggttataacccgccgattgtggtgattcacggtaatcaggtgaaagacctgcctgattcctacaagcgctacttgatgaactacttccgcaaatcgctggacgtaatgggatcgccgattcgtattcagttcaaagaaggggaaaacccgtatgcgaataagcgtaacaccctgacgccaacccagatgcgtaaacgtaagcgtctgatgaagcacatcaagaaaaataaataattatccgtaagtattttatctgccattccctctatgaatgtagagggatggctaccggaggaattcatatggaactgcattgtccacaatgtcagcatgtgcttgatcaggataacggccatgcgcgttgcccatcctgcggggaaattattgaaatgaaagctctttgtccagactgccatcaaccgttgcaggtgttaaaagcctgcggtgcagtagattacttctgtcagcacgggcatggcttgatatcgaaaaaacgcgttgaattcgtgctggcttaatgcacctttttacgcgatttttttactggctggatgtttttaacttcactttctatccagccgtcttccagacgtgtggttagcatttcacccgctttaacttgcttcacttttttcagtacattgccgtcagtagcagtagtaacgctgtatccacgcgccagcgttgacagtgggcttacggcttcgaggtgcgttactgcattaccgaaacgttcacgcgtggcgctaagctgtacgcgcagggtttctgctaatcgatattccagttgctgaatgcgcgtttgcgcgcgatgaatcttcggctgtggattttgctgattcagccgctgtgttaaccgctgctgctgttgcccggtacgcttaagttgattttccagcgcaaagctcatccgcttttgcaggcgctcaagcatggtttgctggcgtgccagccggagctgcggatgctgttgctgtaatcggtgatggatctgcgtaaagcgacgcgtgcggttggcgagataataatccatcgccatctccagccgttgacgggtcgattgcacctggcgcagtaactcttgctgattacggctcactacttcagcggcggcagacggcgttggcgcacgcagatcggcaacaaaatcggcaatggtcacatccgtctcatgcccgacggcgctgacgaccggaatgcggctggcaaaaatcgcccgcgctacgcgttcgtcattaaaactccataaatcttccagcgaaccgccgccgcgcccaacgatcaacacgtcgcactcattgcgctgattcgccagttcaatggcgcgaacaatttgccccggtgcgtcatcgccctgaacggcggtggggtagatgatcaccggtagagaaggatcgcgacgttttaacacatgcaaaatatcatgtagcgcagcaccggtttttgaggtgatcacaccaacgcaatgcgcaggggagggaagtggttttttgtattgctgatcgaacaaaccttcagcctgcaacttcgctttgagctgttcgtacttctgttgcagcagcccttcaccggccggctgcatactctcaacgattatctggtagtcaccgcgcggctcgtagagcgtaatattggcgcgaactaaaacttgttgtccatgctgtggacggaaggtcacccggcggttgctgttgcggaacatcgcgcagcgtacctgggcggtgtcgtctttgagtgtaaagtaccagtgaccggaagccggttgtgtgaaattagagatttcgccgctgatccaaacctgtcccatctcatgctcaagcagcagacgaaccgtttgattcaggcgactaacggtaaaaattgcaggggattgagaaggtaacatgtgagcgagatcaaattctaaatcagcaggttattcagtcgatagtaacccgcccttcggggatagcaagcattttttgcaaaaaggggtagatgcaatcggttacgctctgtataatgccgcggcaatatttattaaccactctggtcgagatattgcccatgctacgtatcgctaaagaagctctgacgtttgacgacgttctcctcgttcctgctcattctaccgttctgccgaatactgctgacctcagcacccagctgacgaaaactattcgtctgaatatccctatgctttccgcagcaatggataccgtaacggaagcgcgcctggctattgctctggctcaggaaggcggtatcggctttatccacaaaaacatgtccattgaacgccaggcagaagaagttcgccgtgtgaaaaaacacgaatctggtgtggtgactgatccgcagactgttctgccaaccacgacgctgcgcgaagtgaaagaactgaccgagcgtaacggttttgcgggctatccggtcgttaccgaagaaaacgaactggtgggtattatcaccggtcgtgacgtgcgttttgttaccgacctgaaccagccggttagcgtttacatgacgccgaaagagcgtctggtcaccgtgcgtgaaggtgaagcccgtgaagtggtgctggcaaaaatgcacgaaaaacgcgttgaaaaagcgctggtggttgatgacgaattccacctgatcggcatgatcaccgtgaaagacttccagaaagcggaacgtaaaccgaacgcctgtaaagacgagcaaggccgtctgcgtgttggtgctgcagttggcgcaggtgcgggtaacgaagagcgtgttgacgcgctggttgccgctggcgttgacgttctgctgatcgactcctcccacggtcactcagaaggcgttttgcagcgtatccgtgaaacccgtgctaaatatccggatctgcaaatcatcggcggcaacgtggcaacagctgcaggtgcacgcgctttggcagaagctggttgcagcgcggttaaagtcggtatcggccctggttctatctgtacgactcgtatcgttactggcgtaggtgttccgcagatcactgccgttgctgacgcagttgaagccctggaaggcaccggtattccggttatcgcagatggtggtattcgcttctccggcgacatcgccaaagctatcgccgctggcgcaagcgcggtaatggtgggttccatgctggcgggtactgaagaatctccgggtgaaatcgaactctaccagggccgttcttacaaatcttaccgtggtatgggttccctgggcgcgatgtccaaaggttcctctgaccgttatttccagagcgataacgctgccgacaaactggtgccggaaggtatcgaaggtcgcgtagcttataaaggtcgcctgaaagagatcattcaccagcagatgggcggcctgcgctcctgtatgggtctgaccggctgtggtactatcgacgaactgcgtactaaagcggagtttgtacgtatcagcggtgcgggcattcaggaaagccacgttcacgacgtgaccattactaaagagtccccgaactaccgtctgggctcctgattctcttcgcccgacttcatgtcgggcgatttatattatctgtttcacttgcctcggaataagcgtcaatgacggaaaacattcataagcatcgcatcctcattctggacttcggttctcagtacactcaactggttgcgcgccgcgtgcgtgagctgggtgtttactgcgaactgtgggcgtgggatgtgacagaagcacaaattcgtgacttcaatccaagcggcattattctttccggcggcccggaaagcaccaccgaagaaaacagcccgcgtgcgccgcagtatgtctttgaagcaggcgtaccggtattcggcgtttgctatggcatgcagaccatggcaatgcagttgggcggtcacgttgaagcctctaacgaacgtgaatttggctacgcgcaggttgaagtcgtaaacgacagcgcactggttcgcggtatcgaagatgcgctgaccgcagacggtaaaccgctgctcgatgtctggatgagccacggcgataaagttaccgctatcccgtccgacttcgtcaccgtagccagcaccgaaagctgcccgtttgccattatggctaacgaagaaaaacgcttctatggcgtacagttccacccggaagtgactcacacccgccagggtatgcgcatgctggagcgttttgtgcgtgatatctgccagtgtgaagccctgtggacgccagcgaaaattatcgacgatgctgtagctcgcatccgcgagcaggtaggcgacgataaagtcatcctcggcctctctggtggtgtggattcctccgtaaccgcaatgctgctgcaccgcgctatcggtaaaaacctgacttgcgtattcgtcgacaacggcctgctgcgtctcagcgaagcagagcaggttctggatatgtttggcgatcactttggtcttaacattgttcacgtaccggcagaagatcgcttcctgtcagcgctggctggcgaaaacgatccggaagcaaaacgtaaaatcatcgggcgcgttttcgttgaagtattcgatgaagaagcgctgaaactggaagacgtgaagtggctggcgcagggcaccatctaccctgacgttatcgaatctgcggcttctgcaaccggtaaagcacacgtcatcaaatctcaccacaacgtgggcggcctgccgaaagagatgaagatgggcctggttgaaccgctgaaagagctgttcaaagacgaagtgcgtaagattggtctggagctgggcctgccgtacgacatgctgtaccgtcacccgttcccgggaccaggccttggcgttcgtgtgctgggtgaagtgaagaaagagtactgtgacctgctgcgccgtgctgacgccatcttcattgaagaactgcgtaaagcggacctgtacgacaaagtcagccaggcgttcactgtgttcctgccggtacgttccgttggcgtaatgggcgatggtcgtaagtatgactgggttgtctctctgcgtgctgtcgaaaccatcgactttatgaccgcacactgggcgcatctgccgtacgatttcctcggtcgcgtttccaaccgcattatcaatgaagtgaacggtatttcccgcgtggtgtatgacatcagcggcaagccgccagctaccattgagtgggaatgattttaatccctgcactatgaatgaacaaaaccctctgttactacagagggttttttatcttcaagaatcataggcttgaagttactaacatcgattaattaaaccagctgtccgatttgttctcttctgctttgcccacgcttttcatcagatcgcgaccgccttcagtcatatttctgttggcgtcagcttcagattgcaccacatcggtttgcgcagctttgtgcttcagttcctgatcgataaattcgttttctcgcttaacgcgggcttcttcttttgccagcgccagtttttgtttctgaatctctaagctgcgtagctcatcttcataactttgatcgcgttttttgtccgcagaggcttcggcgtccagtttatcctgacgagctttcttatttgccgctgccgttgccgctcttttgttagcggcggcctgggcatttgcgcgacgttgcttctcttgctggatttccctgttgcgctccgcgacccattcgtcatgctgcctttgctcttcatttttaccttgctgttcagcttctgctacagcagagagttgatcctgcaatgatgaggcgatagccggatagcttaaggaggccaagatggcgcaaagaaaaactttcttcatgactcctcctgattattagctcttttcaggacatttagtatttggctgaatacgcgtttcgttatacgttgtggtaataacaacggctaaacctgtcgtaaactggcactctttacccacctgggtagaggtatacactttggtgccttccttatatgttaaagaaacaccttccactaaggttttatcattcaccatagaacccactgccgcgcctacagctccgccgccaactgcccctgccgtcgttccggaattgctgccagaaccgacgttgtggccgataacaccgccagcgactgcgccaataagcgcgccgaaggcttgtgcgttccgtttattttgggagttgtctacggcaacttttgcgggaagaatggaaataatattaacggttttagtttcttgtttggtattcagttgatcggtttgataaacatcggcggcatgatcgtcagcatttgactggcatcctgccagagtgaatgacgctaacattgccacaggcagaagacattttttaaatttcatcactattccttgttatacacattacgaaaaataagacatttaagatcatcaaaagaggaaagtaaatgtattgcgtataaagggatagattaaatttattaaaattcacgcagggaataatttataaaaatatatcattacaatatatatattaattttatatttatttcgcagccaaacaggataaacatcagtcaggacaaagacgtaaaatttaagatgaaagaatatctgccgctttgataattccaaagagcaaaagcatccgacagcgaagtgccgttaggttctgtgaaagtggagaaggtaaccgctaacgttgtaccggtgattcgacggagagtgtggattgctgagcttcttttttgctctgatggtgctgccaggcaccgacggacgagtagataaaacggccaaagaagaagataaagctgatgagcagtacgatacgggtcatgcgactgttaaatcggtgtcgttttcgcatactggttgcctgactcacaaaaggttccttgaagtatgtcccacgctgtggacggtacttacattaaggcacaacaggacaaaatggtcaattcttcgttatgtaaaaaagcgtcagtggatacatattttaatgttatggaagttaatttaattatttacaatgatgatgtaataatgatgaattaacatgataaacgtaataattcattaatcagggttattttgtttgatatatatcaattggaactttcatatgacacttagaatcaatgctctctatagtgatgaataatcatcattcgaagtcaggtgggatgcctgtctgaatacacctccttcaggatgtgggggattctgctgagcatctatgaaactgaatgcaacttatataaaaatacgtgataaatggtgggggcttccgctgttcctgccttctttaatcttgcccattttcgcccacattaatactttcgcgcatatttcttccggtgaggtttttctcttttatctgcctttggcactgatgatcagcatgatgatgtttttcagctgggcggcattgccagggatcaccttagggatttttgtccgcaaatatgcagagctgggtttttacgaaacgctctcattaacggctaattttattatcattatcattctctgttggggcggttacagggtctttactccccggcgtaacaacgtttcacatggtgatacccgtttaatttcccagcgtatattctggcagatagtgtttcctgcaacgctgtttctgatacttttccagtttgctgcatttgtaggattgctggcgagcagagaaaatctggtcggtgtcatgccttttaacctcgggactttaatcaattatcaggccttactggtgggtaatctgatcggtgtcccgctgtgctacttcatcattcgggtagtgcgaaatccattttatttacgtagctattattcgcaattaaaacagcaggttgatgccaaagtcaccaaaaaagagttcgcgctctggctactggcattaggtgctttattgttgctgttatgcatgccgttaaatgaaaaaagcacaatttttagcaccaattataccttgtcattattgctgcccctgatgatgtggggagcgatgcgctatggttataagctgatttcgctgctctgggcggtcgtgttgatgatcagcatccacagctatcaaaattacattcccatttatcctggctataccacgcagctgaccataacctcctccagttatctggtattctcttttattgtcaattatatggctgtactggcaactcgtcagcgagcggtagtcagacgcattcagcggcttgcgtatgtggacccggtggttcatctgccaaatgttcgcgccctgaatcgcgcgttgcgtgatgccccctggtctgcgctttgttatttacgcatccctggcatggaaatgctggttaagaactatggcatcatgctgcggattcaatacaagcaaaaactttctcactggctgtcacccttgctggaaccgggtgaagatgtttatcagctttcgggtaacgatctcgcgctgcggctgaatacagaatcgcaccaggagcgcattaccgcactggatagccatctcaagcaatttcgtttcttttgggatggcatgccgatgcaaccgcagattggcgtcagttactgctatgtgcgctcgccagtgaatcatatctacctgctgctgggagagctaaatacggtcgccgaactttccatcgtgaccaacgccccggaaaatatgcagcgtcgcggggcaatgtatttgcaacgcgaattgaaagataaagtcgcgatgatgaatcgactacagcaggcgctggaacacaaccattttttcctgatggcccagccgattaccggtatgcgtggtgatgtttaccatgaaattcttctgcgcatgaaaggtgagaatgatgaactgatcggccccgatagcttcttgccggtcgcgcacgaatttggtttatcgtcgagtatcgacatgtgggtcattgagcatacgctgcaatttatggctgaaaacagagcgaagatgcccgctcaccgttttgctattaatctgtctccaacctcggtatgtcaggctcgttttcctgttgaagtcagtcagttgctggataaatatcagattgaagcgtggcaacttatttttgaagtcaccgaaagtaatgctctgaccaatgttaagcaggcgcaaatcaccttgcagcatcttcaggaattaggctgccagattgcgattgatgatttcggcaccggctacgccagctatgcgcggcttaaaaatgtgaatgccgatctgcttaaaattgacggcagttttatccgcaatattgtgtcaaatagtctggattatcagatagtggcatcgatttgccacctggcgcgaatgaagaaaatgcgggtagtggcagagtacgttgaaaacgaagagatccgcgaggcggtgctctctttggggatcgattatatgcagggttatcttattggtaagccgcaaccgttaattgatacgctgaatgaaatcgaacccattcgcgaaagtgcctgaataatgcgggccgacatttctcgtcggcccgcaaagcattaagcggcgatttcaggtgtactttcttcttcaattttcaaccgccagccagccacgccttcccagtattcttgctccttttccagatcaagcagtaccagcgcattctgactaaaccagtcatgcgggaaacgcagtgtccagtgactgtcatcagtaatcagtgtcaatgttggcggtgtggtggttgcctgacgttgattgtttagtaatacgccaaggcgcaatagctgtatcagtggcaggaactgtttcttcttaaacaaggtaaagcgcggcagatcgtcgagtttaatcgctttacggtgatagcgcaccagtgtcgccatcatcagctgctgttcctgattaaaacccggcaagtcactgttttgtagaatataagcggagtggcgatgcaaaccgctgtggttgatattcaacccgacctcatgcagcatggcggcccatcgcagtagcgcctccagctgcggatgcgccagcttcggttgctgttcccgccactgttcgtacatttgcatagtggtatccagcactcgtcgggcctgttcgctgtcgatgtgatactggttggcgaggctgctggcggtacgactacgcacatcctgatgacggaaacgtccttccatttcatacagtacgccttcacgtaaagccccgtcagaaaggcgcagttcacggatggctaaagcatcaaacacaccgcataaaatcgccagtccaggaacgaagactgttttccgctcttcggaaagacccggtaaactcagcgatgcgaaattacggtgacgtaaaacttcttttaccagtttttccagacgttccggggtaattatcccgtctttctcgcccatttccattaatacttcatgggcggcttttatggtaccggaagcgcccattgccacgttccagccctgaatacggaattgccaggttaaagtttccagtttttgtgctgccgccatgcgagcgcgctggaaattctctttattgatgaccccgccagggaaataaagctgggcaaagctgacacaacccatccggcggctttcaacgagaataggttcgaaattttcaccaatcaccagttccgtagatccgccgccaatatcaataaccagtttgcgacctttttccggttgggtatgttccactcccataaaaatcagacgggcttcttcattaccggaaataatttcaatcgggtagggaatgaccttttccgcgcgtttcagaaagtcagtggcgttcagcgcctgacgcagcgtatgggtaccaactatacagacgctggcaggagaaaacccttgtagccgttcggcaaaaagcgacagacagttcaaaccgcgcgtcattgcctcttcactcaacatattatctggccccaggccgtccgccagatgcacccgctgtttcaggcggccaataatctgcatggcaccatctaccacacgggctatgaccatgtgaaaactgtttgaaccaagatcgaccgcagcaaactcctgcggacgaggggatttatcgtgtattggcatagggttattcaggttgttcgagtgatttgatgtagtcataaatcgccaactgcgcccgtactttgcggcgattgccgcggggaacgtagcgattactgagttctttatcgatataacgagctttgaccgtatcgctgaacaatatgtcgatgatgtccagcacccgctgcttcaggcgcggatcgagcagcggcgtcgccacttcaatacgataatcaatattgcgcgtcatccagtcggcggaagaaaggtagacctttttatcgccgccattttcaaaaatataaacccggtcatgttcaaggtaacggtcaacaatactgatggcacgaatgttgtcgctaatgccttccagattggggatcagcgaacacattccgcgaaccagcagattaaccggtacgccggagctggaggccgcatacagacgatcaaccaggcctttatcgacaaggttatttagcttcagggtgataccgctgggcagcccttgctgcgcgttggcgatttcgcggtctaccatttcatataacagacggcgagagttttgcggtgacaccattaaataatcaaatgtcaccgggcggtatgggttttcaataaagttaaatacccgccgtacttcgttggtgatacgcgcatcggcggtcagcaatgaatagtcagtataaagacgcgcggttttttcgttaaagttcccggtcccgatgtgtgcgtaacgcaccacttcaccgttttcttttcgtgaaatcaggaacagtttggcgtgaattttcagccccggcgcagagaagataacgtgcacgcctgcttcggtcaggcgcttcgcccagtgaatgttagcttcttcgtcgaaacgcgcctgtaactcaaccaccacggtgactttcttaccgttatgtgcggcgtggatcatcgagtcgatgatgcgtgaatctttcgccacgcggtaaatattaattttaatcgccagtacgctcgggtcgaacgaagcctgacgcagcagttccagcacatgctcaaaggtgtgataaggataatagagcaacacatcgcgttcgcgaatggcatcaaaaccattgcggaactgggctttatcaaaccaaatatggcgtaaacgcggcagtggtttgttcaccagattggctttgccgacattggggaaattaataaagtctttaaaattatgataacgaccgccggggacgatggagtcgtagcgggaaatagtcagtttttcgcgtaacacttcaaccagcgcattgggcatatcgcgctgataaacaaaacgcaccggctcagcagttaaacgctgcttgagactggaagacatcaactccatcaggctggcttccatctcatgcactaaatcgtattcggcatcgcgggtcatcttcattgaataggcattcagcgcgtcataatcaaagaagcctttgaaaatatcatcaaggcagtaacgcagaatgttatccagaagaatcatcggcttgcgtcgacgcggcgcttctggcggtaaattcacaaagcgcggcactttatctgatgggatctccagcagcgcgtaacggatggtatcgccacggataatttccaccgccagataggtgtaatcatctttcaggaactgcactaagtcagtgtcaggattgattaaaatcggcgtaatgtgctgacgcagatactgcttaaaataatgacgcagccagttttgttgattgacggagagctggcgttcattaatcaggaagatctggttacgcgccatctccagcagcagctcgttgtagaggccgtcgaattcctgatcggctttcagcacccgggactgaattttgcccagtaaatggcgggaatgagagttggagccttgttcttcgctaataatgatgcgtcgcttcagttcagcgaagcggactttatagaactcatcaaggttattggaatagatccctaggaaacgcatcctttcaatcagcgggttagatttgtccgccgcttcctgaagcacgcgttcattgaacgataaccaactgagctctttttcgatgtatagcttttcctgacccattaccacttttactccgttttattcacgggacactgcctggatattatggcgagcaatattggcagatgtccaactatgccagaaaagggggaaaaaaactgctggagcttgcgatttacaggtgaattgaaaaacgccagcggcagagctggcgctttaactacggggcattactcgtcggcagcgtagccctgcggcggcagacgttgaccatccagccacgcggcgttttcgtgcattttcagacgaccatcggcaaaccagctaatcaccagtggataaatagcgtgttcctgggtttgcacgcgggcggtgatgtcatcttccgtatcaccagcaaataccgggactttcgcctgtaaaataaccgggccaccgtccagttcatcggtgacgaaatgcaccgatgtaccgtgctcttcatcaccattttccagcgcctgacgatgggtgtgtaatccgggatatttcggcagcagagaagggtgaatgttcagcaaacgcccggcatagtgggagacaaacgccgggctgagaatgcgcataaaaccagccagcacgaccacatcgggtgcgtacatgtcgatttcatgaatcaactcccggtcataggcttcacgactgtcaaacgcgctggcgatgagcgtatgcgttgcaatacccgcctggcgggcgcgttcaaggccgaacgcgtcggccttattgctgaaaactgcccgtacggtgcctttaattttgttagttttacaggcgtcaataattgcctgtaaattacttccgttgccggaaataagcaccacaatattcattattcgataaccacgcgttgttcggaatcagaggctttgatgataccgattttccacgcgttttcaccgttggagtttagcagggcgagggctttgtccacttccggagcaggcagggcgataatcatcccgacgccgcagttgaaggtgcgatacatttcatggcgctcaacgttacctgccgtttgcagccagttgaacacttccggccactgccaggaagattcatcaatcactgcctgagtattatctgacaatacgcgtggaatgttttcccagaagccgccgccggtcaggtgcgcaatggcatgcacatcgaccttttcaatcaactccagcactgacttcacgtaaatgcgggtcggtgccagcagatgatcggctaatggcttaccatcaagttcggtggtttgcggatcacaaccgctgacttcaagaattttgcgcaccagcgaatagccgttcgagtgcggaccgctggaaccgagtgcaatcagcacatcgccgtcgctgactttagagccgtcgatgatttctgatttttctaccacgccaacgcagaaacccgcgacatcgtaatcctcaccgtgatacatccccggcatttctgccgtttcgccacccaccagtgaacagcccgattgcagacatccttccgcgataccgctgatcaccgctgaagcggtatcaacatccagttttccggttgcgtaatagtcgaggaaaaacagcggctctgcaccttgcaccaccaggtcattaacgcacatggcgaccagatcaataccaatggtgtcgtgacgttttaagtccatcgccagacgcagcttggtacctacgccgtcagtaccggaaaccagcacaggttcacgatatttttgcggcaatgcacacagcgcaccgaagccgcccagaccgcccatcacttccggacgacgcgttttcttcactacgcctttgattcttccaaccagagcattacccgcgtcaatatcaacaccggcatctttgtagctaagagaggttttatcggtcactgcttgggtccccacgcgttacttgcggtagaaaaataaaattcggcgcaattctaacagggaaagcaaacgtttgcgagactgctttacacaacctttttgcacgtcttttgcccaggcacgcggcgaaagaagacttgtgccagggtaaaggttagttttcggatggaataatcttctttcataaccatttgaatataaaataactttatctcaaaccgttatcattttgactaaagtcaacgaaaagaatattgccgccttgaagaaaggaggtataatccgtcgattttttttgtggctgcccctcaaaggagaaagagtatgaagatcgtggaagtcaaacacccactcgtcaaacacaagctgggactgatgcgtgagcaagatatcagcaccaagcgctttcgcgaactcgcttccgaagtgggtagcctgctgacttacgaagcgaccgccgacctcgaaacggaaaaagtaactatcgaaggctggaacggcccggtagaaatcgaccagatcaaaggtaagaaaattaccgttgtgccaattctgcgtgcgggtcttggtatgatggacggtgtgctggaaaacgttccgagcgcgcgcatcagcgttgtcggtatgtaccgtaatgaagaaacgctggagccggtaccgtacttccagaaactggtttctaacatcgatgagcgtatggcgctgatcgttgacccaatgctggcaaccggtggttccgttatcgcgaccatcgacctgctgaaaaaagcgggctgcagcagcatcaaagttctggtgctggtcgctgcgccagaaggtatcgctgcgctggaaaaagcgcacccggacgtcgaactgtataccgcatcgattgatcagggactgaacgagcacggatacattattccgggcctcggcgatgccggtgacaaaatctttggtacgaaataaagaataaaaataattaaagccgactttaagagtcggcttttttttgagtaaagcgcctataacacataatacagaggataatactatgacgcgccgtgctatcggggtgagtgaaagaccgccacttttacagacaatcccgcttagtttgcaacatttgttcgccatgtttggtgcaaccgtcctggtgcccgtcttatttcatattaacccggcgactgtactgttatttaacggtattggaacgctgctgtatctcttcatctgtaaagggaaaattccggcttatcttggttccagctttgcctttatttcaccggtattgttactgttgccgttagggtatgaagtcgcgctgggcggctttattatgtgcggcgtgctgttctgcctggtttcttttatcgtgaagaaagcggggaccggctggctggacgtgctgtttccacctgcggcaatgggcgcaatcgttgccgtcatcggtctggagctggcgggcgtagctgccggtatggcgggtttactcccggctgaagggcaaacgccagactccaaaaccatcatcatctctattaccaccctggcggtcacggttttaggttccgtgctgttccgtggtttcctggcaattatcccgattttaattggcgtgctggtggggtacgcgctctctttcgcaatgggaattgtcgataccacgccgattattaatgctcactggtttgcgctgccaaccctctatacgccgcgcttcgagtggtttgccattctgactattctgccagcggcattagtggttattgccgaacacgtagggcacctggtagtaacggctaatatcgtcaaaaaagatctgctgcgcgatccaggtctgcaccgttcgatgtttgctaacggcctgtcgaccgtgatctccggcttctttggctctacgccaaataccacttacggagaaaacattggcgtgatggcgatcacccgtgtttacagtacctgggttatcggcggggcggcgattttcgctatcctgctttcctgcgtcggtaaactggctgccgctatccagatgatcccattgccggtgatgggcggcgtttcgctgctgctttatggtgtcatcggtgcttccggtattcgtgttttgatcgaatcgaaagtggattacaacaaagcacagaacctgatcctgacttccgtgattttgatcatcggcgtcagtggcgcgaaggtaaacatcggcgcggcggagttaaaaggtatggcgctggcgaccatcgtcggtatcggcttaagtttgatcttcaaactgatcagtgtgctgcgccctgaagaagtggtgctggacgcagaagacgcggatataacagacaaataatgtaccgaccgggcagtgttgctgcccggttcaaacatcatgggattctgtggtaaacttctcgcgattttgtgaaatcctggttgaggtatctctgaacacaccggcacagctctctttgccactttatcttcctgacgacgaaacctttgcaagtttctggccgggggataactcctctttactggctgcgctgcaaaacgtgctgcgtcaggaacatagcggttacatctatctctgggcacgcgaaggcgcggggcgcagccatctgctgcacgcggcttgcgcggaattgtcgcagcgtggcgatgcggtgggctatgtcccgctggataaacgcacctggtttgttccggaagtgctcgacggtatggagcatttgtcgctggtctgtatcgacaacattgagtgtattgcaggcgatgagttgtgggagatggcgattttcgatctctacaatcgaattctggaatcgggcaaaacacgattgttgatcaccggcgatcgtccaccgcggcagttgaatctgggattaccggatctcgcgtcgcgactcgactgggggcagatctacaaattgcagccactttctgatgaagataagttgcaggcgctacagttacgcgcgcgtttgcgtggttttgaactgccggaagatgtggggcgtttcttgctgaagcggctcgacagagaaatgcgcacactatttatgacgttggatcagttggatcgtgcgtcgattaccgcgcaacgtaagctgaccattccgtttgtgaaagaaattctgaagttgtagataaggtgtttattgtcggatgcggcgcgaacgccttatccgaactacgcgaagttaatccatagtattcgtaggccggataagacgtggcaagcgtcgcatccggcaatgtgcttcaactagcgatggagcacatcttaacccacgatttccagtacctgctccggtggacgaccaatccgcgctttgccattcgcgaccacaatcgggcgctccattagcttcggattatccaccattgcctgaatcagcgcctcttcgctaagcgaactgtcagccaggttcagttctttataaagatcctctttctggcgcatcaattcacgggcgctattcatccccagcattttcagcaaatcgcgcagcgttgccgcatcggcgggtgtctcaaggtagagtaccacttctggctccacgccgttttctttcagcaggttcagcgtttcccggctctttgaacagcgtgggttatggtagatttttacctgtttggtcattgttcttcctttaatgcgaattacatcttggtataaggcttaaagcgttcctgcagctggcgcaactggtcgatgcgcgcatcgtaacgcgcttgttgcaggctgcctaatttcacctgcgaactggcgctactcaacagcgaaatggcctgatcgagtcgtccggcgagcgcataaccttctgctcgcgcagccagctcctgatcgcggttatttagcgcggcttccgcctgtgccagtaaatcccagccgttgctgtcatctttattattaaaggtgtagcgattcagaatattggccgcttcttgtggttgaccgccttgtagataagcgttcgccaggttgagctgcaacaccggattggtgcgcaaatcacgggcatttttcaggcgattgattgcctcattggctttgttttgcccaagatcgatatcggtagccagatcgagataccatgcgttgccaggttctgccgccagtaacggttgcagcgttttacgcgcctcgtcgtatttattggcttccatcgcctgtaaagcacgaccatattgcgccgctcgttgctgacgaacgtttcctttcgcccattcatccagcaaatcactggtgagctggttacgtccggaattatacatccccagtgtgcgcgctttcgccagatagaaatcttccgacgactgcaccaccatcggtcgcatctgattagcacggttgcgggcatctgccagacgactttccggcaacgggtgagtcaataaaatttccggcgggcgcgaggagtaacgcgcctgatcgagtaatttttcgaggaaggttggcatcgcctgcggatcgaatcccgagcgttgcagcacctgaataccaatgcggtccgcttcctgttcattttgctgggtgaaactgatcattccctgacgtgttcccgccagtgtaccggtcagcgccgccatccccgcctgcggactggccatcgccagtaaaatagaacctaacgcgccgacccaggtcagcggcgcgctgcgttgttgatcttccatcgctcgcgccaggtgacgttgggtgacgtgggagatttcgtgcgccataactgaagccagttgactttcgttatcggaataacggaacagggcagagtgcagcaccacgttgccgccaaagaaagcaaaggcgttaatttcgtcgttgttgatcagaaaaaaatgaaacggtgtcttaaccgaattggcatgcgaaaccagacgcatccccagcgaattaatatattgcgttaacagcgggtcattaattaacggcgcgctgccgcgtagctggcggacataatagtcgcccatctgcatttcctgaccaatggaaagcgtgcttcctgcggaggttcccatatccggcaaggtgtctgcgctgtcggcaaacgccggggctacctgaccaatggtcatagcagcaatgagggttgcaaccaggttttttttcaactgcctgaacataacctctatcctgtatttctgaagatagtcatttgaccgatactgttaaatatcgttcccaccgcgccgcctttgagtgtaacggcgaagattagcccactcaaatgacttttcagtttcctgaatccgtcataaaaagcgaagtcttttttgtgacatttcgatacaattgcggatcgcaatcccgctcttgaggttcagggaaggtttttatgctcgaaatgttgatgcaatggtatcgccgccgttttagcgacccggaagcgattgccttgctggttattttagttgccggatttggcattatctttttctttagtggcctgcttgctccgttgctggtggctattgtgctggcctatttgttggaatggccaaccgtgcgcctgcaatctattggctgctcccgccgctgggcgacgtcgattgtattggtggttttcgtcggtatattgctattgatggcgttcgtggtactgcctatcgcctggcagcagggcatctacttaattcgcgatatgccggggatgctcaataagctttctgactttgccgccacgttgccgcgccgctatccggcgttgatggatgcgggcattattgatgcaatggccgaaaatatgcgcagtcggatgctgaccatgggcgattcggtggtgaaaatttccctcgcctcgctggtcggtttgctgaccattgccgtctatctggtgctggtaccattgatggtcttcttcctgctgaaagacaaagagcagatgctgaacgccgttcgccgggtgctgccgcgtaaccgtggactggcaggacaggtgtggaaggagatgaatcaacaaatcaccaactatatccgcggcaaagtgctggagatgatcgtggtggggattgccacctggctgggattcttactcttcgggctgaactattcgctgctgctggcggtgctggtcggcttctcggtacttattccgtacattggcgcatttgtggtgaccattccggtggttggcgtggcgctattccagtttggtgcaggcacggaattctggagctgcttcgcggtgtatctgattattcaggcgctggacggcaacctgttagtaccggtgttgttctccgaagcggttaacctgcatccgctggtgattattttatcggtggtgatcttcggtggtttgtggggattctggggcgtattcttcgccattccgttggcgacgctgatcaaagccgtgatccacgcctggcccgatgggcaaatcgcgcaagaataatcttcagcccgacgaactgtttcgccgggctgatttttcagggttcctgacgtaaataaatagcccgataacaaatactcaccagcactgcaccgccgataatattacccagcatcaccgggagcagattggcggtaataaaatggctgaccgtcagtgccggaaaattgtctgcgctactgtgcgccagttgccagaaggaggtaggggcgaaatggcgaatggcaatggcgaacggaatcacaaacaaattggcgatacagtgctcaaagccactggcgacaaacagggtgatgggcaaaatcatggcgacgattttgtcgcataacgaacgcccgcaataactcatccacagcgccaggcaaaccatcagattgcacataatgccgaggctgacagattcagtaaatgtatgatgcattttgccctcggcgcagtgtaaaaccgcgactccccacatcgcgttttcactcatcaccagcccggaaaaccagattaacaaactgaaacaggcaatacctgccagattaccgcaggccaccagaagtgcgttaatcagccaagttcgccaactaataacgccccgactttttgccattaccgtcattaccgacgaggtgaacaggttggtgccgcaaaccgccagcaaaataaagccaagtgtaaagcaaaggccgcccaccagatgggttaatgcctgtgaagacggggcatcggcgataactgaaaggtaaaaagtaaatctgatcgccataaacacgccagcggacatcgccattaaaaagaccgacactttactgcgggcaattttatgggcggcaatccgttcagcgattgccgcttttctggcgctcaactgcaagtcgaaagagagtttgtttctcatgcatactcctgcaaaagcagattacaacacctcgcgaaccgagattcccagacgctgcattcgtgacagcagcgtggtgcgcttcatccctaatcgtgtcgccgctccacggggcccggcaacaatgccattggtttctcgcaatacctgaacaatgcgctgacgttcttcttcgtcattctctggcgtcgtcgggtgcagcaactgcgccattgaactgcgaagcgctgaatcttcatttagcgtcggcagtaaacggctttgtcggacattaagatgtaaattcagactgttaccgcgagtcagcagtaccgctcgctcaatcacgttttccagctcgcgcacgttgcccggccagtcccacgacatcaactggcgtagcgcctcggtcgggatggcgtcaattgcgcgattcatatggcgcgccattttttgcgtgaaatgttttgctaaaagagggatatcttccggacggtctcgtagcggcggcaattccagtgggaagacattcaggcgataaaagagatcgctgcgaaactggcgctcttcaaccatttgccacaaatcacggttggtggcggcaatgactctgacattcaccgggatcgttctactcccgccgagacgctcaatctcccgctcctgcaatacgcgcagcagtttaggctgaagttctaacggcagatcgccaatttcatcgagaaacaacgtgccgccatcggcaatttcaaaacgaccacgatgtgtattaatcgcaccagtaaacgcccctttgtcatgaccgaataactcactttccagaagactggcggggatggcagcgcagttgattttgaccagcggcttgtcgcgtcgcgggctaagttgatggatcgctctggcgatcacctctttgccggttccggtttcaccgcaaatcaacaccgtactgtcgctcttcgccacaatatctacctgctggagcaggtcttccattgcctggctttgatagataatgtcaccgacgcccagattcgaaaggagctgctcgctaagctggtggttttcttgctgcaaactttcctgcaaatcggtcatgctgcgccaggcatcggcattgccaacggcaatagcgatgcgatcggttatgtgttgtagtagctggcagttttcctcactaaagagagtggaagaggtatgcgccagcaacaatgcacccggtgtatggttgccaaaggtaagcggtataaggagcacagattcgcagccgttagatgcaagtaagagtaataacgggtcgcgttgccagagaaacagatcgtctgcacggtgcgtcaaggtcggttgtcgggtttgtagcgtttgtgtcagcaatacactgtcgccaggcatattgcgtggcagacacgcacaatgtgaggcagaaagatcgctgcaccacaggctaaacttctcgttctttcgatgatcgcccagtaccatactgactgaagccagaccgaaaaaatgatggatctcacgagcgacgtcagcgatcagatcgtcgagatcaagatgtgacagcactgcattagtaatatcaaccagtacccgatgatgatcgcgatctttctccagcaaacgcagcgccacctgctgttcttcatcattgagccatgattgcagaaccggggtgattatccgcgccagccagttaaacagtgtgcaatcctggggagtaaaacggctgccgtgggtgcgaataaagcgtagctccgccattccactactgccgagaaggacggcgtgacgcgaataatcgaccatctcgccctgatactctgttgttgccgtcacatcgctgccatcatcatggtagcggtaatagaagttgcttttgagaacatgcagttcaataagttgtaccgggctgaacggcggcggcatcgggatgaaggcgcgtaataaagacgccttaccgtgtttctgtgctaaccgctccgcgagcattccgtttaccgcttcaattgttattccttgtggcggggcaaacatcgcctcgtctgacatagccatcaacagtccttattaatgagaaatccttctcacgcaatttttctggccatcagatagatggccggttcctgcacaatttcatccaacagatgaatgaattgaatgctacgcgcctgccacacagacgtcgcgtcatccgccagtggcgcgaatgcccgggtcaacagggcggtgtggctggcgtcaataacaatctcaccaaaagtcatcacccccagcatcttacgtcgggcttgctcctcttcgacctgggcaagccaatcttcgtattccgtcagtgggcaggggaaggcgacattcagacaatcaatcacgccaacgtgatgaccgatagccagcgagtaatacattacctgagagctgtgttccggcatctcgtcgctactggcgacaaacttttttcgcagcgtccagaaaacaatttccccgcactcttcagtcatgtaacccccggagtacgcgaaagagttgctgaacgatactattgagacgtggatcgtcggcatcgcgcaaccaggtgttaacccgatttcctgtaggatcgtcgcttaaatggcgcaggagccgatcgcaaatttctcgcccctgacgatagcccgccagccgccgcgcttctcgctcaatggcgatacgctgtgatggcgggatctgtggctacaacggttgcatagtcaccccggtgggatcgcgataatccacagcgtgaatcttctgttgcagcaaaccgagcgccacggcgaaaccgtgaatggtggcggccggtgttggcgggcagccggggatccaaacatcaatggggacaatggtgtcgctgccgccccagacgctgtagagatcgtggaaaataccgccgccgacaccgcacgcgccgtaggaaacacagattttatgatcgggggcagactcatacgcccgaagtgcaggcatacgcatcgcccgggtgactgcgccagtaaataacaaaatatcggcgtgacgcggtgatgaaacaaccttaatgccaaaacgttctgcgtcgaatactggtgtgatggcagcaaaaatttcgatttcacaggcgttgcagccgccgcaatcgacgcgataaacgtaagccgagcgacggatatcctgtagcaaatgctgcttcatcttttgcgtttgctcgtccagcgtgatgggctggctgacatattgcgtaagcactggactcatagctgctccttagccaccagcggtacatctgtatcgtcgttgatcagcgtcgcgcgttgtttgcactccgggcagacgctcgcttgcgcccgcaacatttcgcggttttgtggcgcattttgttgctgtgccaacaattcagcagccagtgcgacggttttttgcggggcaaacgggcgttcgcaacggctgcaacgttgtagatggaacgtcgcgcgggtatagagatcggctttattggtgacggtcagttcaaagttattggtaagctggatggctctggtcggacacacttcttcacaacgtccgcagtaaatacaacgccccagatagagctgccaggtgcgcgaattttgctggtcgtcggtctggatagtcagcgcatttgccggacaagcacaggcgcaggcaccgcaggcaatacattggctgggcatcaggtccggtttcccgcgaaagcctgggctgacctccagtggcgcgaagggatatttcaccgtcgcggttccggcgcgcataatagttttcagtaacttcagcatcttctgtccttacttcagcggcgaacggttacgatcaatgccgtagcgttcgatctctttatacggcacggtttttgactggcgcttgcgcacatctaccagcgtcacacggtcggtacaggagtagcagggatcaaggctaccgataatcagcggtgcgtcagaaacggtattgccgcgcagcatgtaacgcaacaccggccagttggcgtaggtggcggcacgacagcgccagcggaacaatttttggttatcaccgagcatgctccagtgcacgtcttcaccgcgtggcgcttcaacaaagcccagcgcgaatgcgtgaggtttatagctaaagccttcggtcagcagcggggtatccggcatgttgtcgagggcaaattccagcattgccagcgaatcaaacgtctctttgacacggaccatcacgcgggagaaaacatcgccgccggtgaaggtaaacagtgtttttggaatattgccgtagtcggcgtaggggtgatcaaagcgcaaatcacgggcaaaaccactgccgcggatcagcggccctacagggctataatcacgggcgatttgtcggtcgagaatgccaatgccctgagtgcgttgttccatattcggcatagcaagcagcatctctaccagctccgacacgtcggcgcgcatctcgcgcaccagtttcagcgtttgcagacgttgctctttgagaatatcgcggcgaacaccaccaatcagattcagaccgtaggttttacgcgacccggtcagcaattccgccatcgtcatcgacttttcccgcacgcggaaaaattgcataaagccggtatcaaaaccaacaaaatggcaggagaggccaaggttgagcaaatgactgtgtagccgttcgacttccagcagaatcgagcgaatggtatgcgctcgttgcggcacctcaatccccagtgcattttcaaccgagttggtataggccacactgtgggcaaaaccgcaaatcccacacacgcggtccgataagaaggtcacttcgttgtagcccatccgcgtttctgccagtttctccatgccgcgatggacataaaacaggcggtaatcagcatcgacaatttgctcgccatccacaaacaagcggaagtgacccggttcatcggaggtgatatgcagcgggccgacagggatcacccgcgcaccgctgttgccctcattgataaacgcatacgtttcggaatctgtcgtcggttcagggcgcagtcgataatccatcgcatctttgcgcagcggatgcatatcttccggccagtcatcgggcaacaccaggcgacgctgatccggcaggccaaccggaatcagcccgtacatatcgcgaatttctcgctcgccccagaccgcggcagggacgcgcggtgtgactgacggaaactcccgactgtcggcatcgaccagtgccttcaccacgatccagcatttttcggccccttccattgaaagggcataataaaccgcgtaatgaccgttaagtgtccgctcgtcgttgccaaacaggactggaagccagccatcatgttgataataaagataatgtacaacgtcaggcagcagattgattttcaccgtaatggtgacctgttcaggcgtttgtcgctcttcatccagcaccgcgccggggaactgcgttttcagggcggcgagaatcgcttcgccacgatttgacgatgaattaacgttcactgtgtttctccgaaacagatgcggtgcctgaaggcaaaaaatcatgccaggtgctacgttgtgcaggcaggtcgtgcgtccctgagaggactatagtggaagcgcccgccaggatcctgatgacaggttgtggaatatgcgttcccatcgccagcatcatgaccagcagaatcaccattggcgaggtggtcaaccagccgagatcaccccggttaacggcctgcggcggtttcgccattaacacccgcgctgccatccgtaccaggcccgccagcaccagcgttaacagcaataacagcaggacgataatcagcaggtgattacgtgccagtccggcggtaatggtcataaattcgctaagaaaaatgttgaagggcggcatccctgccagcgccagcgccagcgcaccgccgccaaacagcacggcggtaaatggcatgattttgagcatcccacagacgacgttgagatcgcgcgtgccgtacttgagcagtacattgccggaaccgcagaacagcagcgtttttgccagactgtggtttaaggtgtgcagcagcgcggcaaaaattcccagtggcctgccaatgcctagcgccaccgcgaccagtcccatgttctccacgctggagtacgccagcagacgcttaatgtcccgctgtaccagaatgaaaaatgccgccacggcaaccgacaacatgccgaagatgagcaacaaccggttggggaaatcgctgccgatggcctggcagataatgatgtaatagcgaattagcaccaacagcgcgcagttcagcaatacggcggagagcagggcgctgaccggactcggtgcttcactgtgagcatccggcagccaggcgtgcatgggaaatagcccggttttggtgccaaagccaattagcacaaacacaaaggccaacagcattaatgttgggtcaagcaaggacgattgcttaagaacctcgctccagaatatcgccatttctgcctgcggcataacgctggcgacgttggcgtataccagcacggtaccgaacagaccaaaagcgacaccaacagtacaaataatgatgtacttccatgctgcttccagcgatgaacgctgaccgtaaatgcctaccagaaacgccgagcttaaggtggtggcttcgatcgccgcccacatcacaatcaggttattgctggtaacaaccagcagcatggtaaactaaaacagatggaagaaaccgtagtaatcgcacagcgtaacgggggaaagctcgccgtgtgccacttcatgacgcatgtagccaatcgagtaaacaccggtgagaaagccaatcacaccaagaatggcgaggaacaaaccgcccagaccatcaatatgaagccacagtcccgcagcgaatatttctcctgcatcagcggcagtttggaccacccagagtgccagaatcagcagcagtgtgatccctaagctatgtaatacagtcaccgtacaagtcgcagagagcccccgtttccggcaggcaaaacagagcagcgaaaaaagcagcggcgtgagcaggagtaaagcgaacatcacagaataactcatctcattatcccttcagcgcggtcaagttgttcacgtccagcgtgccgtgggtacgccatatttttcttgccagtaacaccatcacaatgacggcgaagatggcgtcggtagcgatacctatttccaccagttccggtgctcgccaggcaagaagcgccagcaccagatgggagccgttttccatcaggcagtaaccaaaaatttgccgcaggatattgcgctggctgacaatgcacagcaggccaagcagaaaatgacctaacgctaccgccagcgccggtttcagcccggtagccatcggtagcttcacgggctgaacgacaaatgcgcaaagcaggacaattaacgccgcgagcagtgccatcattgccggaccgaataacgctttttccgggatgttctggggaatatttcgtgcagcgtaagtcatgattaacggtaccagcagcactttggtgataaaggcgctggcggaccagatcagcagttgctctgcggcgaacaggcacgagagagtggcgaaaatagacaccagcaccagcgactggcaggcgtaaaatccgcatgacaggcgatagcttttgacgctaatcacaaacagcgatgtcagcatcatcagtcccgccagattatttacgatcatagaaccggtcattcatcatctccttactgcaaccaggtcgcggcgattacgctggaaatcagcgacatcacaatcagtacaatcaacaccaggcgcattgaccctggcagcggtgcggcatcggcgacggcctcgctcggtttgccaggcacaacgcgaccaaaccagcgaataaaccaggcgaaactggcgaccgattcaatcatcagcagaatcatggcgggcagcaggatccagtactccactgacaacgcaaaaccggcagcaaacagcgggaatttactgaagaagccgttgaacggcggcacgccggtaatcgccagcgctgccacgcagaaacccacgcctggcaacggcagggtgtgcaatacgccacgcagacgcggcaacaagcgcgtgccgcagctgtaactcagcgcacctgctacaaggaaaaacaggcttttagcgaacgcgtggttgacgatgtaggcgatgctgccctccagtgccagccgcctactttcaccatcgatgcggcgtggagataggcgctgatcggtgttggcgcttccattgcgtccggtagccacgcttgcatcggtagctgggccgatttcccccacgcggcaaacaggatgccgccataaaccagataacgtgcgtcgccatgtaactcgctcatcgcgctaagcacaaacgttccggtctgcaaaaacagcgtggcggcggcaagatacaaccccaacgaaccgatatgggtgataagcaacgcttttagtgctgaacgctgcgctttatcgctctggtaataactgatcaacgcccaggagcagccgccctaatttcaaaaaacaacaactgaccgagcagcgtcgaggagagtaccagtcccgccatcgcgccgataaacaccagcaaaaatgcgtaataacgattcgtgccgttatgcgggtgttcgcgatttttatccgtcagataacccgtggagtagatcgtgaccagcaaaccgagaaacaccaccacaaacagaatcagcgtactcacgcgatcaatgaccaggccaaacaatgccacatcccccacgttgaccaacgtcaacgtgacggcaactttatcggcctgataaaacgcggagatcagcgacaacatgcacagcgtggtcagtgcggcgaataaaacccccattcggcggcccgacgttgtggcgaaaacgaaacgaccagtgcgccgataaaaggcagcattaacgtcgtcagagcaagattttccatattccgtcagtgctccttacagaccggttaaccagaagacccatgcaagcgcagcaaggctgaagccaagccaggtcacatggtgaatgagtaaaaaacgcccgcgtgccagcgtgttttctgcgattgaggccagtacaaaaatcagcaaaaccttgagcagcgtaacgacaagtgaagtcagcaggcaggcgagagaaagttcttgcgcgcgcccaaagagcagaaacagggccacaaacagtgctgccatcacgacctgtttcagccccagcccccatttcgctagcgccagcccggcaccggaatattcggtcagcgggccttcctgtaattcctgttctgcttcagcaacatcaaagggaatttttcccatctcaatgaagcaggcaaaaccacaggccagtaacgccagtacggtggttagcggcgagttccagcccgttgccagcgtattgctgatcatctcgatatgcgtggaacctgctatcagcgccaataccagcagtgagagaatgagcatgggttcgaccagaatgccgagcgtcaactcgcgactggcaccgactcccgcaaacgggcttccggtatccagcccggaaagagcaaagaaaaaacgaaacagggcaagaagatagataagggtgatcagatcgccgccgcccgcaaaaggggaaacggtaataaaaagtggtagggccatcgccagcaccagcatgctgctgattaatacccacggcatcaggcggaacatcagacctgaagatataggcgcaacttcctggcgtttaaacagtttgtggatatcgcgataatcctgccagatccccggcccgcggcgggagtgcatacgcgcgcgtatctgccgggaaatacccgtaaaaagcggggttagcagcagaatcacggcctgtgctaacgcaaaaatgaccagatatccgtcgcaaagagtttgtctcatggtgatttccttagacggcaatagcgattagcagcacaaccagtgcggcgaccacatacaggcaatagagacgaaagtcgccgctttgcagatgctgtatttctttggccagccgttgggtggcgctcacgatggggcggatcacccgctcatcccagaagggttctgtgctctgagccctggcggtgacgtgcgcaagacctttatttagcctcagcgtagggtcgaactgttgtcgtagacgaaatagcgcagaaaagaccacacgcagcggctgcatcacgccattgcctgacggggccatcgcattttcccagccgtagccgcatgcccaggcatctcctgtgcgacgaaacgctgcgcggcgcgaacgacaccacagccagtaaaggccaggcagcaaaggcatcgccagtagtaacagcaacagtaatgagggggtgacctgtgtatgaaacgtgccgggtacaagtgctattccgctggcgacagtgacgggaggggtattggtaaacgcatgggcaatatgcattatcttcggtgccagccaactggcactaagcgcaattaatacgcagagtgccgcgagcagtagcatggcgacgatcatcgtatttggcacttcctgtgcctcttcagcgtgtgtactgcgcggcgcaccacagaaagtaataccgtacatttttacgaagcacattactgccagcccaccagtgactgccagcattaccatagcaataggacccgcaagttgtagcgctacggcttccacacgacttagtgagaacagcgactgccaggtgtaccattcgctgataaaaccattcagcggaggaatggctgatatcgcgaggcaaccaatcaggcatgctgcggctgtccacggcatccgtttcgccagtgcccccattttttccatgtcgtgggtatgcaaacgcgaaataatcgcgcccgcgccgagaaatagcagccctttgaacagcgcatggttgagcagatgaaacagtgcgccgagcagtccaaccacggtgagcagcgggtcgtgcagtgacagaccgaccatcgccacaccgactgccagcaaaataatgccgacgttttcgacggtactccaggccagcagccgtttgatatcctgttccgccagcgcatacagcacgcccaggagcgcggagattgcgccgatcgccatcaccagaatgccccaccacagcggcaaacccgtttgcgccagcaggtccatcgctactttcaggatgccgaaaataccgattttgaccattacgccagacatcaacgccgaagcgtgcgatggtgcggcagggtgagcgcgcggcaaccagctgtgcaacggcatcatcccggctttcgcgccaaaaccgaaaaaggccagcagaaacaccgccgacgccagccccggagaaagtgaaagcgtgcgaaactggcaaaatcgaggctgccgctttcgcgccccatcagcaagaaggcgatcataatcagcaccgatccggcgtgggcgataaaaaagtagagcatgccagcgttgatcgacgttttatcctgcctggcaatgaccagaaaccaggaagacagcgacatcatttcaaacagcacgatgaaccaaaaagcgttgtccatcaccagcagggcaaccatcgatgcgatgaaaagattcataaagaagcccatcgccgccgcgcctttgccctcgtattcgcgcatataagtcaatgaatagagcgaacaaaccaccaccagcaaggagataaccagcaccataaatgccgagaggctatccattcgcagggttaaatcggcaaagtcaaaaggggtggcaaaatgggcgactaaagttacaccagcatgtaattgcgtaattccgctgatgatgccaatcacgccgcccaccagcgatgtgatgccggaaagcttaatagccagtctgtccagaccgagtaaaaacagcgaagccagactggcaaacagatagaggatcagcgaccaggttaataattgcagggcatccattagtgttgctcctgagtgagggaaaggggatcctccccgccattggcaaaccagcttgcggcaaggcgctgtttttctttcatctgtcgttgcaggctatcgtcggtgatcagccgtaacgcctgattcgggcaagcgcgaacgcaggccggaccttctggcaagaaatcacacaggtcgcatttcaccgcgacggtctggacacccggttcccagcgcagcaatgcatgttggggcggcacgttttcttcgccgtctttgagtgagccttcagcctgaaaaacatattgcgcaggggcattcaccggacggcttcctgaagcgctgattgcgccaaatgggcagaccacggcgcaaagcttgcagccaatacagaggctttcgttgagttggatcgcatcatccctctgggagatggcattaaccgggcagacctgcaggcaaggggcttcctcacagtgatgacacacgacaggggcagtgagtgttgacgtcttcgccagggccaggcgcgggtgttgctgtaaaccttgcgttttatgcacgtccgaacaggcagcgagacaggtattacatcctgtacaccacagtggttcggccaccacaaagcggttcatgtcggctccttgaaaatgatatgaaacattgcatttcatattgcataaaggatgccattctgattaactcaatatattcaataagttatgtattgactggattctgaacggtacaaaaatgatggtcattaacgttcagcaaaaaatggattcgacacccgtgtcgcaggggaaagcgagaatgtgatcttgatcacgagaagtgaggtatgctggccgcaagcgcagccagcacggaatggagcaaagtaatcaggcgtgttctttcagccagttcagcacaacgtcgtggtgattgctggttttgaaatcgtcaaagacatgttcgattttgccatcagcgtcaatcaggaagctgatgcgatgaatgccatcgtaggttttgcccatgaaggacttttcaccccagacgccgaattgttcgcacacctggtggtcctcatcagacaggagcgtaaagttaagcagctctttttccgcaaaacgggagagtttttcgggtttatcggtgctgatacccagcacatcaacgcccgcttttttcaactcatccatgttatcgcgtaagccgcaggcctgtacggtacagccgggggtcatggctttcgggtagaaataaaccagaacacgctgtccctggaagtcggtcaaattaacttgttctccgtcttgatccggcaagctaaatttcggtgcgatatcaccggctttcagtggattcattacttaactccatcctgttcatcatgttgggaataattgacgacgttaatactgccttgtgcattgagttctgtacatagggctttgaacgcttgctcaatatttgctgcgtccgcagatgcggggctgtgggcggttatctgaatatgcaactgcgcagcccgttcattttcagcaggttgtgtgcgcgacaccagctccgcaatgttcatatgatgcgcgtcgaaaagtgctgtgaagcgttcaattaaatgcggggagtctgccacatcgacctgaacccagacagatgctggcattggcggacgcggacgcgccgtcgtgcgcttcatcacgattaaaagatccagttcggcacctttcaacggtaacgttgattcaatcagagtaatggcattccatgaaccggaaagcagcataataaacgtgaactcttctcccagcatcgccaggcgactgtcttcaatattacagccgcaactactgacatgacgggtgatggtgttcacaattccagggcgatcggcacccaacgcagtgatcaccagataatgttgcgatgacagtgtcaaactggttattcctttaaggggtgagttgttcttaaggaaagcataaaaaaaacatgcatacaacaatcagaacggttctgtctgcttgcttttaatgccataccaaacgtaccattgagacacttgtttgcacagaggatggcccatgttcacgggaagtattgtcgcgattgttactccgatggatgaaaaaggtaatgtctgtcgggctagcttgaaaaaactgattgattatcatgtcgccagcggtacttcggcgatcgtttctgttggcaccactggcgagtccgctaccttaaatcatgacgaacatgctgatgtggtgatgatgacgctggagctggctgatgggcgcattccggtaattgccgggaccggcgctaacgctactgcggaagccattagcctgacgcagcgcttcaatgacagtggtatcgtcggctgcctgacggtaaccccttactacaatcgtccgtcgcaagaaggtttgtatcagcatttcaaagccatcgctgagcatactgacctgccgcaaattctgtataatgtgccgtcccgtactggctgcgatctgctcccggaaacggtgggccgtctggcgaaagtaaaaaatattatcggaatcaaagaggcaacagggaacttaacgcgtgtaaaccagatcaaagagctggtttcagatgattttgttctgctgagcggcgatgatgcgagcgcgctggacttcatgcaattgggcggtcatggggttatttccgttacggctaacgtcgcagcgcgtgatatggcccagatgtgcaaactggcagcagaagggcattttgccgaggcacgcgttattaatcagcgtctgatgccattacacaacaaactatttgtcgaacccaatccaatcccggtgaaatgggcatgtaaggaactgggtcttgtggcgaccgatacgctgcgcctgccaatgacaccaatcaccgacagtggtcgtgagacggtcagagcggcgcttaagcatgccggtttgctgtaaagtttagggagatttgatggcttactctgttcaaaagtcgcgcctggcaaaggttgcgggtgtttcgcttgttttattactcgctgcctgtagttctgactcacgctataagcgtcaggtcagtggtgatgaagcctacctggaagcggcaccgcttgcggagcttcatgccccggctggaatgattttgccggtgacctccggtgattatgcaatcccggtgaccaacggtagtggtgctgtcggtaaggcgctggacattcgtccaccagcccagccgctggcactggtttctggcgcgcgtacccagttcacgggcgataccgcttcattgctggtggaaaatggtcgtggcaatactctgtggccgcaggtggttagcgtgctgcaggcgaaaaactacaccatcacccaacgtgatgatgctggtcagacactgaccaccgattgggtacaatggaaccgtctggacgaagacgagcagtatcgtggtcgttatcaaatctctgttaagccgcagggttatcagcaggcggttacggttaaactgctgaacctggaacaggcgggcaaaccggttgcagacgcggcttccatgcagcgttacagcacggagatgatgaacgttatttccgccggtctggataaatctgccactgacgccgcgaacgctgcgcaaaatcgtgcctccaccactatggacgtacaaagtgcagctgatgacaccggtttaccaatgctggtcgtacgcgggccgttcaatgtggtttggcaacgtctgccagcggcgctggaaaaagtgggcatgaaagtgaccgacagcacccgttcgcagggcaacatggccgtaacttataagccgctgtctgacagcgactggcaggaactgggcgcgagcgatccaggcctggcatccggtgactataaactgcaggttggcgatttagataaccgcagcagcctacagttcatcgatccgaaaggtcatactctgactcagagtcagaacgacgcgctggtagctgtcttccaggctgcgtttagcaagtaaaaatacggggctggaatcatccggcccttttttctgatatgatacgcaaacgtgtgcgtcggcaggaaaacgcgattttagcggtaattcgcacgaaatttgtttgtcggacgtagttcggataaggcgttcacgccgcatccgacaaaacatccggcacaccagacagcaaaagattttaaaacgttaattcacacccaggagtgataaagatgcaaaagcaagctgagttgtatcgtggtaaagcgaaaaccgtatacagcacggaaaacccggacctgttggtgctcgaattccgcaatgatacgtcagcaggggatggcgcgcgcattgagcagtttgatcgcaaaggtatggtgaacaacaagttcaactacttcattatgagcaaactggctgaagcgggtatcccgactcaaatggagcgtctgctctccgataccgaatgtctggtgaaaaagctggatatggtgccggttgagtgtgtcgtgcgtaaccgtgctgctggctctctggtgaaacgtcttggaatcgaagaaggtattgagctgaacccgccgctgttcgatctgttcctgaaaaacgatgccatgcacgatccgatggtcaacgaatcttactgcgaaacctttggctgggtgagcaaagagaacctggcgcgtatgaaagagctgacctacaaagcgaacgacgtgctgaaaaaactgttcgatgatgctggtctgattctggtcgacttcaagctggagtttggtctgtacaaaggtgaagtggtactgggcgatgagttctccccggacggcagccgcctgtgggacaaagaaacgctggagaaaatggacaaagaccgtttccgccagagcctcggtggcctgatcgaggcctatgaagccgtcgcccgccgcctgggtgtacagctggactgatttttctggttgcttgtttatttagccggagggtactccggctaaatgtcttcgatacccccgctacaatacttcgcattatctccctttgacaggaaagtaataacaggccaatatgtatatacatgacgtatatcccaaaaaaagggggggctatggaaactactgtatttttaagtaatcgcagtcaggccgtcagattaccgaaagcggtcgctctgccagaggacgttaagaaagtagaaattattgcgattggtcgtacaagaatcatcactcccgccggtgagtcctgggacagttggtttgatggcgaaaatgtgagtgcggattttatggatatccgtgatcaacccgcaatgcaggaaagggaatcattctgatgctgaaattcatgctggataccaacatctgtattttcactattaagaataaaccagtacatgtcagagagcggtttaacctgaattctggccggatgtgtataagttctgtaacattgatggagcttatctatggggcagaaaaaagtcagatgccagaacgcaatttggcggtgattgaaggtttcgtatctcgtttggaagtgcttgattatgatagtgctgctgcgacgcatactgggcaaatcagggccgagcttgcccggcagggaaggcctgttggaccttttgaccagatgatagcgggacatgctcgcagtcgcggtttgattgtggtaaccaacaatacccgagagtttgagcgagtggcgggaatcagactagaagactggagctaacattctcttttacttctaacattcgtaaattatataacgtggcatgaagccttaattcctccgccatttcatcccgctttcctgtggtaatcttcctctgaaccacctacgatcatttctataatgaatatattgttgaggtatctatgcgttggcaagggcgacgtgaaagtgacaatgttgaagacaggcgcaacagctccggtggtccgtctatgggcggtcctggttttcgcctgccaagcggtaaaggcgggctgattttactgttagtcgtgctggttgcaggctactatggtgttgatttaaccgggttaatgactggacagccggtttcccaacaacaatcaacgcggtccattagccctaatgaagacgaagctgcaaaattcacctcggtgattctggcaaccacggaagacacctggggacaacagttcgagaagatgggtaagacctatcagcaaccgaagctggtcatgtaccgtggaatgacgcgcaccggctgcggggctggtcagtccattatggggccgttctattgcccggcggatggcacagtttatatcgatctctccttctatgatgacatgaaagacaaacttggcgcggatggcgattttgcccaggggtacgttatcgcccatgaagtcggtcatcatgtgcagaaactgttaggcatcgagccgaaagttcgtcaactgcaacaaaacgcgacgcaggcggaagtgaaccgcttatctgtgcgtatggaactccaggccgactgttttgccggtgtctgggggcataacatgcagcagcaaggcgttctggaaaccggcgatctggaagaggcgctgaacgcggcgcaggccatcggcgatgaccgtttacaacagcaaagtcaggggcgagtagtaccagatagtttcacacatggcacttctcagcaacgctacagctggtttaaacgtggtttcgacagcggcgatccggcacaatgcaatacttttggtaaaagcatttaacttccggggcagggatggctgaactgactgcgcttcacacattaacagcgcaaatgaaacgtgaagggatccgccgcttgctggtgttgagcggggaagagggttggtgttttgatcatgcgcttaagttgcgtgatgccttacctggcgactggctgtggatttcgccgcagccagatgctgaaaaccactgttcaccctcggcgctacaaactttacttgggcgcgagttccggcatgcggtattcgacgcccgccacggctttgatgccgctgcctttgcagcacttagcggaacgttgaaagcgggaagctggctggttttgttactccctgtatgggaagagtgggaaaaccaacctgatgccgattcgctgcgctggagtgattgccctgaccctattgcgacgccgcattttgtccagcatctcaaacgcgtacttacggcggataacgacgctatcctctggcggcaaaaccagccgttctcgttggcgcattttactccccgtactgactggcaccccgcgaccggcgcaccacaaccagaacaacagcaactcttacagcagctactgaccatgcctccgggcgtggcagcggtaacggctgcgcgtgggcgcggtaagtcggcgttggcagggcaactcatttctcgtattgcgggcagtgcgattgtcaccgcgcccgcaaaagcggcaacggatgtactggcacaatttgcgggcgagaagtttcgctttattgcaccggatgccttgttagccagcgatgagcaagccgactggctggtggtcgacgaagccgcagccatacctgcgccgttgttgcatcaactggtatcgcgttttcctcgaacgttgttaaccactacggtgcagggctacgaaggcaccggacgtggttttttgctgaaattttgcgctcgctttccgcatttacaccgttttgaactgcaacagccgatccgctgggcacagggatgcccgctggaaaaaatggttagtgaggcactggtttttgacgatgaaaacttcacccatacaccacaaggcaatatcgtcatttccgcatttgaacaaacgttatggcgaagcgagccagaaacgccgttaaaggtttatcagttattgtctggtgcgcactaccggacttcgccgctggatttacgccggatgatggatgcaccagggcaacattttttacaggcggctggcgaaaacgagattgccggagcgctgtggctggtggatgaggggggattatctcaacaactcagtcaggcggtatgggcaggttttcgtcgcccgcggggtaatctggtggcccagtcgctggcggcgcacggtagcaatccactggcagcgacattgcgtggacggcgggtcagccggatagcagttcatccggcgcgtcagcgggaaggcacagggcagcaacttattgctggtgctttgcaatatacgcgtgacctcgactatctttcggtgagttttggttacaccggggagttatggcgtttctggcaccgctgcggttttgtgctggtgcggatgggtaatcatcgtgaagccagcagcggttgctatacggcgatggcgctgttaccgatgagtaatgcgggtaaacaactggctgaacgtgagcattaccgtttacgtcgcgatgcgcaagctctcgcaaagtggaatggcgaaacgcttcctgttgatccactaaacgatgccgtcctttctgacgacgactggcttgaactggccggttttgctttcgctcatcgtccgctattaacatcgttaggttgcttattgcgtctgctacaaaccagtgaactggcattaccggcgctgcgtgggcgtttacagaaaaacgtcagcgacgcgcagttatgtaccacacttaaactttcaggccgcaagatgttactggtccgtcagcgggaagaggccgcgcaggcgctgttcgcacttaatgatgttcgcactgagcgtctgcgcgatcgcataacgcaatggcaattttttcactgactccttcaattttctcccatggtcattgtgagtcagcggcgtaaaattaatgacatcagttaaggagttcgccatgaaacatgaccattttgttgttcaaagcccggataaacctgcgcaacagttgttactgcttttccacggtgtcggggataacccggtggcaatgggggaaataggtagctggtttgcaccgctgtttcctgatgcgctggtggtgagtgtcggtggcgcggagccgagcggtaatccggcggggcgtcagtggttttcagtgcagggtattacggaagataatcgccaggcgcgtgtggatgccatcatgccgacgtttattgaaacggtatgctactggcagaaacagagcggagtaggggctaacgccacggcgctaattggtttctcacaaggcgcgattatggcgctggagagcattaaagccgaaccgggccttgcttcgcgcgtcattgcctttaacggacgctatgcgagcctgccggagaccgcgtctacagccacgacaattcacttgattcatggtggtgaagatccggttatcgatctggcgcatgcagttgcggcgcaggaagcgttaatcagtgccggtggtgacgtgacgctggatatcgtggaggatttaggccatgcgatcgacaatcgcagtatgcaatttgccctggatcacttgcgttataccattccgaaacattatttcgacgaagcgctaagtggcggtaagcctggcgatgatgatgtgattgaaatgatgtaaaagacagattacctggcctgataagacgcgtgagcgtcgcatcaggcatcgttcaccattgccggatgcggcgttaacgccttatccggcctacggttgagcactcagcttacttcttcggttgatcctttttcggccagtcgtcgtcatcgtcccacttatcgttgaaatcacgatgcgggggaagctccggcttgttggcgagaaatttcttatggtcgacgcgcttgagatctttaatcacgttcagcaggacgcctaccaaaaagacaatcaccagaatccaccaatatttagccagccagtccatgcttatttcctcttgcagaaccactcatcaggcgacgagctgttccatgatacgttgatacatacgggcaagtagctgcaggtcggcagcgttcacacattcattaattttatgaatagtggcattgaccggcccgagttccaccacctgcgcccccatgcgggcaataaagcgcccgtcggacgttccgcctgtggtcagtagctgcggtttaatttcattatagtgctcaaccgcgttaacgaccgcatccaccagtttaccgcgcgcggtcaaaaatggctgcccggaaagccaccagtccaccgtataacgcagttgatgtttttcaagcagggcaagcacctgtgctttgatcatctcatcagtcagttcggtgctgaagcggaagttaaactgcacaaacagttcacccggaataacattgttactgcccgttcccgcctgaatattagcaatctgcatactggtcgccgggaaaaattcattgccctgatcccactcaatagccactaattcattaaggaaaggtgctgcgcgatgtactggattgtcagccagatgcgggtaggccacatgcccctgaacgccatgaatggtaaggttgcaggttaacgatccgcgacgaccatttttcaccacatcaccaaccacttcgatactcgacggttcgccgaccaggcagtaatcgagacgctcattacgtgccatcaacgcttcgacgacttttaccgtaccgttgtgggcactggcttcttcatcagaggtgatcagaaatgccagtcgccccgtatggttgggatgttgtgcgacaaagcgttctgccgctaccaccatcgccgccagcgagcctttcatatctgccgcaccgcgtccgaataacatgccatcacgaatggtgggttcaaacggcggattgatccaacgatcggcgtcgccaggcggcaccacgtcggtatgcccggcaaaggccaacgtttcaccttgcccacgccatgcccaaaaattctgcgtatcggcaaaatccatgcgttcaacggtaaaaccgatcgcttgcaaacgttcaatcaacaaagcctggcatcctgcgtcatcaggactcagggaagggcggcgaataagctgttgtgtcagctcaataaccgggcacgacatagactacacctcatggaaaaattgctgataactggaatcactgaaacccagcagcataggcttaccaggcgcgcagagcaatggacgtttgataattgcaggcatttcagtcattaatgccgccgcagaggccgcatcggtgattttattgcgggtggtttcgtccagtttacgccaggttgtaccacgggtgttcagtaacgcttcccagcctaattcgttgataaaaccgttcaataattcgctgtccagcccatcgacgcggtaatcatgaaaacgatagtcgatgttattggcttccagccaacggcgagcctttttaatggtgtcacaatttttgatgccgtaaagtgtaaccataatgaatcctttttcgatctatgagaataaatactcatttaagggtgaaaacattttgcctgcaaatgattatcaggaaatataacattatcgaagtattcaaattaacaactattaaataatattaaacatttttaacgtaaacattaagaatattcatcttgttatctgtctgtattttaaccagaattaaatcagtattagatgccgtatgaatatctcgaaatgttgctgtgtatcacatacaaattatcaccgcaggaccatagtatttacataaggtttgtcccccggaggtagtcatcgcagcaatcgagtaaattagcttcaccacggtatattgtttccgtagaatacccataattataagagaggttgttatgattgaacgtgaactggggaactggaaagactttatcgaagttatgcttcgtaagtaattcctgagacaaagtacaaacagcaagaacccgctgagcaggttcttaatcggaaagttgaaaaaggcgacacattagcatgtcgccttttttattgcttattccgggcgcggcttcagcgggaagcggcggcgcaccagtacaaagaacagcggcacgaagtaaatagccagaatagtggccgaaatcatcccgcccattacgccagtacccaccgcatgctgaccaccggaaccggcacccgtgctggttgccattggcaatacgccgaagataaatgccagcgaggtcatcagaatcgggcgtaaacgctgacggcaggcgtggagcgtcgcttcaaacaggtcgtggcctttttggttcatctcgttagcaaactcgacgatcaggatggcgtttttcgccgataaaccaatgaccgttaacaggcccacctggaagtaaacgtcgttttccagcccgcgcatccaggttgccagcagcgcgccgataacccccagcggcacgaccagcattaccgagaacggcaccgaccagctttcatacaacgccgccagacacaggaataccaccagcaaggaaatagcgtacagcgccggagcctgcgcgccggaaagccgctcctgatacgacatcgccgtccactccagaccaaagccgtttggcaactgcttcactaacgattccataatatccatcgccgtaccggtactgacccccggtgcggcttccccaacaatctcaaccgcagaataaccgttatagcgttccagacgcggcgagcctgtctcccagcgtgaggtcgcgaaagcagagaagggcaccatgccgccatctttatttcggacataccagagattgatgtcatctggcagcatgcgatacggcgcagctgcctgcacatagactttcttcacgcgaccgcgatccataaagtcattaacatagctcgaaccccaggcggtttgcagtgtgtcgttaatatcgtcgatatcaacgcccagcgcctgagctttacgctggtcgatatcaatctgcaactgcggactgtcgtcgaggccgttatggcgcacacgggttagctccgggttttccgccgccagcgccagcaactggttacgtgctgccatcagcgcatcgtgacctgctccagcgtggtcctgcaactccatatcaaaacccgcagaactaccaagaccgctaattgctggcgggctgctggcgataacgcgagcttctttaatcttgttaaacgcctttgttgcacgctcgataatggcaaacgaggtgccggtcttactgtcgcgttcgctccagtctttcaggcggataaacattcgcgccacgttttgcccgttacccccggggccagaaccaacagtggcaaacaccgacatgatgttgtctttttcatgggtgaagtaatatttctcgatttgctcaacgactttcagggtctgttgttgggttgaaccgctgggcaattgtaccgaggtagtaaacatgccacggtcttccagcggtaagaacgacgtcggcaaacgcaggaacaggaacaccatgccgccaagcagcaggacataaatcacaatccagcgcaggctacggtggagaattttcgccacccctttttcgtagcgttcggcgttgcggttaaacatctggttaaaccaggcaaaaaagcctttttgcccgtgatgctcaccttttttcagtggcttaagtagcgtggcacacagagccggagtgaggatcatcgctaccagtactgacagcaccatcgccgcaacaatggtaatagagaactggcgatagatggcaccggtggtgccgccgaagaaggccattggtacaaataccgccgaaagcaccatcgcaatcccgaccagtgccccctggatctgccccatcgatttacgtgtggcttcgcgaggagtgagtccttcctcactcataatacgttcgacgttttccaccaccacgattgcgtcatccaccagcagaccgatcgccagtaccatcgcgaacatggttaaggtgttgacgctgtaaccgaaggcgtaaagtacggagaaggttcccatcaacaccaccggcacggcgatagtgggtatcagcgtggcgcggaagttttgcaggaacagatacataacgaggaaaaccagggcgatagcttccagcagcgttttcaccacgtcttcaatggaggctttaacaaacgaggtggtttcatacgccaccttgtattccagtccgtgcgggaagtactgcgccagctcgtcgagacgattgagcaccagctccgctgtcgccatttcgtttgcgccggaggccagttttacccccagcccggaggctggcttaccattgaagcggctaagataatcgtatttctccgcccccatttcgacggtggcgacatcgcccagccttacctctgagccgtcttgattcacccgcaaggtgatatcgcggaactgttctggtgtttgcagcagtgactgggcgttaatggtggcgttgagcgcctgcttatcgacggaaggtgtaccaccaagttgcccaaccgcaatctgcgcgttctgtgactcaatggcatcagtgacatctttagccgtcatctggaaactgttgagtttcgccgggtccagccagatacgcatggaatattgcgaaccataggcatcgatatccccgacgccattcacgcggcttaacgggtcctgaatattactggcaacataatcggcaatatcctgtttatccatcgaaccatcggtagagacgaaagcaatggtcagaatattggtatcgccggttttacgcaccgtcacgccctgattttgcaccgcctgcggtaactttcgcatggctgattgcagctggttttgtacttgctgcacggcttcgtccggatcggtgcctgctttaaaacttaaagtaacagatgcctgaccggtgccactgctctgagatgacatatacatgagattatcgaggccggtcatattttgctcgataacctgggtcacggtgttttccagcgtctgggccgatgcgccgggatagttagcggtcactcgcacattcggtggcgcgagatcggggtattgttcaacgggcaatgagaaaatcgccagggtacctgtcagacacaacaggattgccagcacccaggcaaaaatggggcgatcaataaagaaattcgccattaaaagaggacctcgtgtttctgcgtatcgttgtaggcttgacttgcttcactgtagcggcaaggtacgagccaatcgtggagaaaaaaaggagttaatgtaaattatcatgcccttttatactgaaccttaagtgcaagtattctttggtcagtaggaggcattacatcagctgactttcctcaccctccgcggagcgaaagctaatactcactaacgtgccgccgccggaaggttgtgaaaaagtcagcgtcccacccagccgttccgcgcgttcgcgcatgatattcagaccataatgaccttcgggttctttcggttcaccgataccaatcccgttatcacggatataaaccgtgtgattgccgtccggcgcggtgacgcaactgacggcgatttcgctggcgttggcgtgcttcatcgcattcagcaccgcttcgcgaataatttgcaacaaatgcacctgcatttgcgcatccagcgccagggttggcagacggcagtcgagggtcagtttggcgctggtttgattttgtaacgtatccagcatttccctcaacgcggaggggagatccgcctgctgcagcgtcaggcggaaagtagtcaacagctcgcgtaactgccgataagcatcattcaacgcctgggaaaaatcggccatgatactttgtgcggtggcgttatcttccggtatcgaacgcttcagtaacgtcaactggatacgtaagtaagaaagtacctgagccagcgagtcgtgcaattcgcgggcgatggttgcacgttcttccatcaacaataactgctgaaaatgcttctgcgcctgattaaagtacaaaccgcgtcccagcatcgacgaaacgctgttaagcagcggttctgatgatgaaacgtgactattttgccagtgcagttcgccgtaaaccgtctcttgcattgtcaccggtaaaatctgcatcggcaattccgggtttggttgcccttcgctaatccgccagttttcaccgacatttaactccagatattcagccgcttcattatcgcgaacaatctgcaaaatatggcggaaacaatgcacatcaatctggctggtgttcagcgcctgcgaacactgatacaacacctccagacgacgcttggcctcgtggagatcgcgggtcttttcttctactgacgcctccagcgaaaggtacaatttatgcagctcgctcgacatctggttaaaggtttttgcaagcagaccaagctcattcggcagactggtatccagcggcggcgagtcgaactgtccgtgttcaatacgctgactggcggtaaccagctgattcagcggggcaaccacctgatggcgtatgcggcgcaaagtaaaaaagaccagcgtgaaaataccgataccgccagccagggaaatcgccaccaccagcagcattttgcgttcagcgtagtgctgtaaagccagcacgaacaggtctatctgattaacataattattaatattggcctgataccacggcaaatcgcccttgctgagccgattattcatctccagccagttggcattcagatgcgcatagcgagtttttactgcttctggcacataccagacgttgagattggttaataccggtgaatgcagtgcctgctgaaacaactggcgatgtgcattgagttgtggactgccactttgcaagtcgtagcccaggcggtaactctgcatacgcagcgatccggcaatattgatagcctcagcgtcgcgcaaactgctcgccagagttagcagagcgatacccgtggaaagaatcgacagcagcacaatgtaaaaaaaggcccgggccagactggccgagacgggtcgtttaacaatcacacgcgtcttctccacaaaaaatcattaatgttccagttcgctgaaacacaatttagtcagtgatgggattatttgatctgccacagtttatagcgaaatagttacttattctgggcacatgaacattgccgattcccctgtaagtcgggtaataacaacactcatataaagaataaggtttttacaaccaaaaaagaaggtcgttatgaatcgttttattatggccaacagtcagcaatgtctgggttgtcatgcttgtgaaatcgcctgtgtcatggctcacaatgatgagcaacatgtcctgagccaacaccattttcatccccgaattacggttatcaaacatcaacagcaacgtagtgcagtgacctgtcaccattgtgaagatgcgccctgcgcccgtagctgccctaatggcgcaatcagccacgttgatgacagcattcaggtcaatcagcaaaagtgtattggctgtaaatcctgcgtggtggcctgtccttttggtacgatgcaaatcgtcctgacacccgtcgcggcaggaaaagtaaaagccacggcgcataaatgcgacctttgtgcggggcgcgaaaacggtcctgcctgtgttgagaattgcccggcggacgcgctgcaactggtcactgacgtcgcactctccggcatggcgaaatcccgccgcttgcgcaccgcgcgtcaggaacatcaaccgtggcatgccagtaccgcggcgcaagaaatgccggtaatgagtaaagtcgaacaaatgcaggcaacgcccgcgcgtggcgagccggataaactggcgattgaagcgcgcaaaaccggttttgatgaaatttatctgccatttcgcgccgaccaggcacaacgggaagcctcgcgctgccttaagtgcggcgagcacagcgtttgtgaatggacctgcccgctgcataaccatattccgcagtggattgaactggtgaaagccggaaacatcgacgccgccgtcgagctttctcaccagaccaacaccctgccggaaattaccggacgcgtttgtccgcaagaccgtttgtgtgaaggtgcctgtactattcgcgatgagcacggcgcggtaactatcggcaacattgaacgctatatttcagatcaggcgttggcgaaaggttggcgtcctgacttaagtcatgtcaccaaagtggacaagcgggtggcgattatcggggcaggtccggcagggctggcctgtgcggatgttctgacccgcaatggcgtggcggtgacggtgtacgatcgccatccagaaatcggtggcttgctcactttcggcattccttctttcaaactggataaatccctgctggcacgccgtcgggaaatcttcagcgcgatggggattcacttcgaactcaattgtgaagtgggtaaagatgtctctttggattcgcttttggaacaatacgacgcggtcttcgttggcgtaggcacttaccgttccatgaaagcgggtttacccaatgaagatgcgccgggcgtttatgacgcgctgccgttcctcattgccaacactaaacaggtgatggggctcgaagagctaccggaagagccgtttatcaataccgccggacttaacgtcgtggtactgggcggcggcgacaccgcgatggactgtgtgcgtaccgcactgcgccacggcgcgagtaacgtcacctgcgcttatcgtcgtgatgaagctaacatgccaggctcgaagaaagaagtgaagaacgcccgcgaagagggggccaacttcgaatttaacgtccagccggtggcgcttgagctgaatgaacaaggtcacgtctgcgggattcgtttcctgcgcacgcgtcttggcgagccggatgcccaggggcgtcggcgtccagtgccggtggaaggcagtgaatttgtcatgccagccgacgcggtgattatggcgtttggcttcaatccgcacgggatgccgtggctggagtcgcacggtgtaacggtagacaaatggggccgcatcatcgcggatgtggaaagccagtaccgttaccagaccaccaatccgaaaatcttcgctggtggtgacgccgtgcgtggtgcggatctggtggttaccgcaatggcagaaggacgtcatgcggcacaggggattattgactggttgggggtaaaatcagtcaaatctcactgatagcctgcgcagacaaacccgacttcacagcgtaagataattgttcatttcgcgctgtggagtcggtatgacgcaacaaatcaccctcattaaagacaaaattctctccgataactatttcaccctgcacaacattacttacgatctcacgcgcaaagatggcgaagttatccgccataaacgtgaagtttacgatcgcggtaatggtgcgacgatcctcctgtacaacgcgaagaaaaagaccgtggttctgattcgtcagttccgtgtcgctacttgggttaatggcaatgaaagcgggcagctgattgaaacctgcgccgggctgctggataacgacgaaccggaagtgtgcattcgtaaagaagcgattgaagagacgggctatgaagtgggcgaagtgcgcaaattatttgaactgtatatgtcgcctggcggtgtgactgagctaatccacttttttatcgccgaatacagtgacaatcagcgcgctaacgccggtggcggtgttgaagatgaagatattgaagtgctcgagctgccgttcagccaggcgctggagatgatcaaaaccggcgagatacgtgacggtaagacggtgttattgcttaactatttgcaaacgtcacatttaatggactgaaaaataacaataatatttcgttgtttattattggctcaatccgacaaatctgattgagccgcgctacctgcgcaacgaagatacgacttgtgctgtttgtttgaacttctggggtcgtaccgtccatgcgctatcgcattttccttctcttttttttcgctttgttgccgacgtctttggtgtgggcggcaccagcgcaacgggcgttttccgactggcaggtcacctgtaataaccaaaacttctgcgtggcgcgcaatacgggcgatcataatggactggtgatgaccctgagccgcagcgccggggcgcataccgatgccgttttacgtattgagcgcggcgggttgaagtcgccggatgcgtctgaaggagagatagcgccacggctgctgttagatggtgagccgttggcgttaagtggtgacaagtggcggatttcaccatggttattagtaaccgatgatacggcaaccatcaccgcgtttttgcagatgattcaggaagggaaggcgatcaccttacgcgacggcaatcagaccatttctctgagtggcttaaaagcggcgttgttgtttattgatgctcagcaaaagcgcgttggcagtgaaaccgcgtggatcaagaaaggggacgaaccgccgctcagcgtaccgcccgcgcctgcgctgaaagaggtcgtggtggttaacccaacgccgacgccactctcactcgaagaacgcaacgatttgctggattatggaaactggcggatgaatggtctacgctgctcgcttgatccattgcgtcgtgaggtgaatgtcactgcgctgactgatgataaagcgctgatgatgattagctgtgaggcaggggcctataacaccattgatttggcatggattgtgtcgcgtaaaaagccgctggcctcgcgcccggttcggctgcgtttgccgttcaacaacggtcaggagacgaatgaactggaactgatgaacgcaacatttgatgagaaatcgcgtgaactggtgaccttagcgaaagggcgcggattaagcgattgtggcattcaggcgcgctggcgctttgacggtcagcgttttcgcctggtgcgttacgccgcagaacccacctgcgataactggcatgggccagacgcctggcccacgttgtggatcacccgttaaacaaaatggcgggacatgtaggccggataagacgcgtcagcgtcgcatccggcaatcagcatctgccggtcagtatcaggcacctttcactcccagcaccttatgcgcttttgccacaatattctcggcggtaaagccaaagaacgggaacagcttatccgccggagcagattccccgtaacccgtcatcccgacaattgcccctttcagaccaacatacttgtaccagtaatcggcaatacctgcttccaccgccacgcgagccgcaacgttagaaggcaacaccgactcccgatattcctcatcctgggcgtcgaaaatatcggtcgagggcagggaaactacgcgaacattgcgaccttctcccgctaatttctctgccgcttgcagggtgatttccatctctgaaccggtggcaatcaaaataatatctggcttaccgccgctgtctttcagcacataaccgccacgagcaatctctttaacctgatccggcgtacgttccacctgggccagattctgcctggagagaatcagtgccgtcggtccgttgtggcgctcaaccgccagcttccagcccaccgccgcttccacctgatcgcacggtcgccaggtgctgaaatttggcgttaagcgcaggctggccagttgctcaacagcctggtgcgtcggaccatcttcgcccaggccaattgagtcgtgggtataaaccataatctgccgcgctttcatcagtgccgccatccgcgcggcgttacgggcgtattcaacaaacatcaggaacgtcgcggtatacggcacaaagccgccgtggtgcgcaatgccgttggcgatagcggtcatgccaaattcacgcaccccgtagtgaatgtagttgcccgccggatcttccttcagcgacacagagcctttccagatggtgaggttgctgggagccagatccgctgaacctccgagcagctccggtagcatcggtccgtaagcgttaagcgtattttgcgaacccttacgggtggcgattttcgccggattcgcctgcaactcattgatatatttctgagtcgttttctcccagtccttcggtaaaccaccgttcatccgacgggtaaactcttctgccagttgcggatgagcctttttataggcggcaaacttctcattccagctctgctgcgctttttcgcctttttcgcgggcatcccaggcgtgataaatctctttagggatctcaaatggcggatggtgccagcccagtttttgccgtgccagcgccacttcttcttcccccagaggtgcgccgtgcgcctcttccttacctgctttattcggcgaaccaaagccaatcaccgtacggcagataatcagcgacggcttatctttcacgctttgcgcttcaaggatcgcttccttcaccgcctgcggatcgtgaccgtcgatttcatggatcacatgccagtgataggcttcaaaacgttttgccgtatcgtcggtaaaccagccttcggtttcaccgtcgatggaaataccgttgtgatcgtaaaaaccaatcagcttgcccagtcccagcgtgcccgccagcgaacagacttcgtgggaaataccttccatcaggcagccgtcgcccataaacacataggtgaagtgatcgacaatttcatgatccggctgattaaactgcgccgccagtgtacgctctgctatcgccagtccgacggcgttcgccaaaccttgtccaagcggaccggtggtggtttcaacacctggcgtatagccaatctccgggtggcctggggttttcgaatgcaactgacggaagttcttcagttcttccagcggcaggtcgtaaccggtcagatgtagcaaactgtagagcagcatcgacgcgtgaccgttggaaagaataaagcggtcgcgatcataccaggttgggtcggtaggattatgtttaagaaaatcgttccacagcacttcggcaatatcagccatgcccatcggcgcgccgggatgaccagaattggctttttgtaccgcatccatactgagtgcgcgaatcgcattggcaaggtcttttcgggacatataacactccgtggctggtttatagtttggcggcaagaagatcttccagtttgcgttgatcaacagcgaacagacgaatgccttcagacagtttttctaccgccatcgcatcctgattgtgctcccaacggaactccgcttcgctcatgggagctgggcgtgggaacgtctgagaaggtgggattaatttacgtaccactggcgaaactttttcctgcagctccttcagcaaattcggtgcgatagtcagtcgatcgcagccggttaaggcgaggatttgttcggtgcgacggaagctcgcgcccatcacaatggtttcatagtggtgttgcttatagtagtcgtagatattgcgcaccgatttaatgcccggatcttcttccaccacatacgggtccatcggcttgcgtgcctgataccagtcataaatacgcccgacaaacggcgaaatcagaaaaacgcccgcttctgcacaggcccgcgcctgggcaaaagaaaacagcagcgtcaggttgcagttaataccttctttttccagctcttcggccgcgcgaattccttcccaggtcgaagccagtttgatcaaaatgcgtgatttctcaacgccttgttgctgatacaagtccaccagatggcgcgccttctcaatactcttttctttatcaaaagagaggcgtgcatcaacttctgttgacacgcgaccgggtacgattttgagaatttcagcaccgaaattgactgccagtttgtcacacgctgcgaccacctgttgttcctgggtcttgccattttttttaccccaggcgatagcatcgtctattaaatgctcatattgtgataatccggcagctttgagtaacagcgaaggattggtggtggcatcctggggatgataatggcgaatggactcaatatcgccgctgtctgccacgacagtggtgaactgtttgatgccgtctaactcgttcataggaaatactccttgaaaagtaaagtgttagatgagtgcgttaattcacacttctgagaaatttcgctaaacgcatcaaaaaagcatagcagacaggcatggtattgctggattaagcaggtaacatcagtgttataggattattaccaaaacattatattaatggtgagagtttggacttgctcaaagtctgtagactccggcagggtaataatgtgcgccacgttgtgggcaggggctgttgcccacacactttatttgtgaacgttacgtgaaaggaacaaccaaatggatgaccagttaaaacaaagtgcacttgatttccatgaatttccagttccagggaaaatccaggtttctccaaccaagcctctggcaacgcagcgcgatctggcgctggcctactcaccaggcgttgccgcaccttgtcttgaaatcgaaaaagacccgttaaaagcctacaaatataccgcgcgcggtaacctggtggcggtgatctctaacggtacggcggtgctggggttaggcaacattggcgcgctggctggcaaaccggtgatggaaggcaagggcgttctgtttaagaaattcgccgggattgatgtatttgacattgaagttgatgaactcgacccggacaaatttattgaagttgtcgctgcgctcgaaccgaccttcggcggaatcaacctcgaagacattaaagcgccagaatgtttctatattgaacagaaactgcgcgagcggatgaatattccggtattccacgacgatcagcacggcacggcaatcatcagcactgccgccatcctcaacggcttgcgcgtggtggagaaaaacatctccgacgtgcggatggtggtttccggcgcgggtgccgcagcaatcgcctgtatgaacctgctggtagcgctgggtctgcaaaaacataacatcgtggtttgcgattcaaaaggcgttatctatcagggccgtgagccaaacatggcggaaaccaaagccgcatatgcggtggtggatgacggcaaacgtaccctcgatgatgtgattgaaggcgcggatattttcctcggatgttccggcccgaaagtgctgacccaggaaatggtgaagaaaatggctcgtgcgccaatgatcctggcgctggcgaacccggaaccggaaattctgccgccgctggcgaaagaagtgcgtccggatgccatcatctgcaccggtcgttctgactatccaaaccaggtcaacaacgtcctttgcttcccgttcatcttccgtggcgcgctggacgttggcgcaaccgccatcaacgaagagatgaaactggcggcggtgcgcgcgattgcagaactggcccatgcggaacagagcgaagtggtggcttcagcgtatggcgatcaggatctgagctttggtccggaatacatcattccaaaaccgtttgatccgcgcttgatcgttaagatcgctcctgcggtggcgaaagcggcgatggagtcgggcgtggcgacgcgtccgattgctgatttcgacgtctacatcgacaagctgactgagttcgtttacaaaaccaacctgtttatgaagccgattttctcccaggctcgcaaagcgccgaagcgcgtagttctgccggaaggggaagaggcgcgcgttctgcatgccactcaggaactggtaacgctgggactggcgaaaccgatccttatcggtcgtccgaacgtgatcgaaatgcgcattcagaaactgggcttgcagatcaaagcgggcgttgattttgagatcgtcaataacgaatccgatccgcgctttaaagagtactggaccgaatacttccagatcatgaagcgtcgcggtgtcactcaggaacaggcgcagcgggcgctgatcagtaacccgacagtgatcggcgcgatcatggttcagcgtggggaagccgatgcaatgatctgcggtacggtgggcgattatcatgaacattttagcgtggtgaaaaatgtctttggttatcgcgatggcgttcacaccgcaggtgcaatgaacgcgctgctgctgccgagtggtaacacctttattgccgatacctacgtcaatgacgaaccagacgcagaagagctggcggagatcaccttgatggcggcagaaactgtccgtcgttttggtattgagccgcgcgttgctctgttgtcgcactccaactttggttcttctgactgcccgtcgtcgagcaaaatgcgtcaggcgctggaactggtcagggatcgtgcgccagatctgatgattgatggtgaaatgcacggcgatgcagcgctggtggaagcgattcgcaacgaccgtatgccggacagccctttgaaaggttctgccaatattctggtgatgccgaacatggaagctgcccgcattagttacaacttactgcgcgtttccagctcggaaggtgtgactgtcggtccggtgctgatgggcgtggcgaaaccggttcacgtgttaacgccgatcgcatcggtgcgtcgtatcgtcaacatggtggcgctggccgtggttgaagcgcaaacccaaccgctgtaattcttttttaactctcacgcttaccctgaatattcagggtaagcggtttggctgcaatatattagtaaagcttattactgagtttgcgaataataaaaaaagcagtctatataatatctcgatattattttatttatattcatgcgttgcatatgaaagtttatgcaccacagcgaatacctctccattcttagtgatctacctcaccttttaaacgcgcttgccgaattttgttatttactctgacgaaaaattgtcacgatacacgaaagtttttcacaggcggcgactcatggataaagaacgcatcattcaggaatttgtgcccggcaaacaggtcacactggcgcatcttatcgcgcatcccggtgaggaactggcgaagaaaatcggcgttccggatgcgggcgcaattggcattatgacgctaactcccggcgaaacggcgatgatcgccggtgatttagcgctgaaagccgctgatgtgcatatcggttttctcgaccgcttcagcggtgcattggtgatttatggctcggtgggcgcagtagaagaagcgttatcacaaaccgtcagcggtttaggtcgcttattaaattatacgctttgtgaaatgaccaaaagttaatacgaggcattcatgaaacgaattgcgtttgtgggtagcgtcggggcaggaaaaacaacgttatttaatgcgttgcaggggaattataccctcgccagaaaaacacaggccgtggaatttaatgataagggcgatattgatacgccgggtgaatattttagccatccccgctggtatcacgccttaattaccacgctacaggatgtagacatgctgatctatgtccatggcgcaaatgacccggaaagtcggttgcctgccgggttgctggatattggcgtcagcaaacggcaaatcgccgtcatcagtaaaacggacatgccagatgctgacgtcgccgcaacgcgaaagttattgcttgagacgggtttcgaagagccgattttcgagctaaacagccacgacccgcaaagcgtgcagcaactggtggattatctggcatctctcaccaaacaggaggaagcaggtgaaaaaactcatcacagcgaatgatattcgtgaagcacacgcgcgcggcgaacaggcaatgtccgtggttctgcgcgccagcattattaccccggaagcccgtgaagtggcggatctactgggttttaccatcaccgaatgtgatgaatcgatcccggtaacggcgtccgtgcccgccagcgtgccagccgacaaaaccgaaagccagcgcatccgcgaaaccatcattgcccagctgccggaaggccagtttactgaaagcctggtcgcacagctgatggaaaaagtgatgaaggaaaaacagtcgctggagcagggcgcaatgcagccgagcttcaaatcggtgaccggcaaaggcggcatcaaagtgattgatggcagcagcgtcaagtttggtcgtttcgacggcgcagagccgcattgcgtgggcttgactgatcttgtgaccggagacgacggcagcagcatggccgctggttttatgcagtgggagaacgcattcttcccgtggaccctgaactacgacgaaatcgacatggtgctggaaggggagctgcatgttcgccacgaaggcgaaaccatgatcgccaaagcgggtgacgtgatgtttatcccgaaaggctccagtatcgaatttggtacgacatccagcgtgaaattcctgtatgtcgcctggccggctaactggcaatccctatgaaagatttcatcaccgaagcatggctaagagcgaaccatacgctcagcgaaggcgcagagatccatctccctgcggacagtcgcctgacgccctctgcccgggagttactggaaagccgccatctgcgcatcaagtttattgacgagcagggccgcctgtttgttgacgatgaacagcagcagccgcagcccgttcatgggctgaccagtagcgatgaacatccgcaggcgtgctgcgaactgtgccgccagccggtggcaaaaaagccggatacgctgactcacctgtcggcggaaaaaatggtcgccaaaagcgatccgcgtctgggttttcgcgcggttctcgacagcaccattgcgctggcagtgtggctgcaaattgaactggcggaaccgtggcagccgtggctggcggatatccgttcgcgtcttggcaacattatgcgcgccgatgcgctgggtgaaccgctgggctgccaggcgattgtcgggctttctgacgaagatctgcatcgactttctcaccagccgctgcgctatctcgaccacgatcatctggtgccggaagccagccacgggcgcgatgcggcgttgctcaatctgctacgtaccaaagtgcgggaaaccgaaaccgtagcggcgcaggtgtttatcacccgcagctttgaagtattacgcccggacattttgcaggcgctgaaccgcctttccagcacggtctacgtgatgatgatcctgagcgtaacgaagcagccgctaacggtgaagcagatccaacaacgactgggggaaacgcaatgattattgaacgttgtcgtgaactggcgttgcgagcgcccgccagagtggtttttccggatgcgttagaccaacgtgtgctgaaagccgcgcaatatttacatcaacaaggtctggcaacgcccattctggtcgccaatccgtttgaacttcgtcagtttgcgctcagtcacggcgtggcgatggacgggctacaggtgattgatccgcatggcaacctcgcaatgcgggaagaatttgctcatcgctggctggcccgcgcgggcgaaaaaacgccgccggatgcgctggaaaaacttaccgaccctctgatgttcgccgcagcaatggtcagcgccggtaaagcggatgtctgtatcgcgggcaacctctcttccacggcaaatgtgctgcgtgccggattacgcattatcggcttgcagccaggctgtaaaacgctctcttccattttcctgatgttgccacagtacagcggcccggcgttgggctttgccgattgcagcgtggtgccacagccgacggcggcgcagctggcggatatcgcgcttgccagtgccgaaacctggcgcgccatcaccggagaagagccgcgcgtggcgatgctgtcgttttccagcaatggtagcgcccgtcacccctgtgttgctaacgtccagcaggcgacagaaatcgtccgtgagcgcgcaccaaagctggtggtggatggcgagttacagtttgacgccgccttcgtgccggaagtggcggcgcaaaaagcgcctgccagcccgctacagggcaaggccaatgtgatggtttttccgtcgctggaagccggaaatattggttacaaaatcgcacaacgactcggcggatatcgtgccgtcgggccactgatacaaggacttgccgcgccgatgcacgatctctctcgtggttgtagcgtgcaggaaattatcgagctggcgctggtggcagctgtgccgcgtcagacagaagtgaaccgcgaaagcagtttacaaacactggttgaatgaacggtcccgttctggaccctgataaagaggaaagcacaatggaagcattaggaatgatcgaaacccggggcctggttgcactgattgaggcttctgacgcgatggtgaaagctgcgcgcgtcaagctggttggtgttaagcagattggcggcggcctgtgtactgccatggttcgtggtgatgttgcagcctgtaaagccgcgaccgatgcaggtgccgcagcggcacagcgtatcggcgagctggtatctgtacacgttatcccgcgtccgcacggcgacctggaagaagtcttcccgatcggcctgaaaggcgatagcagcaacctgtaatcaccctgtgtgacgtcgattcgggcgtcacgctctctcctttttcattttaccttctgcggagggtagggggagcttttacctgaaatacgccacggaggcgggtatgaaactggcagtcgtcactggacaaattgtttgtaccgtacgccatcacggactggcgcatgacaaattgctgatggtggaaatgattgatccacaaggtaatcctgacgggcaatgcgccgtcgccatcgacaatattggcgcgggaaccggggagtgggtgttactggtgagtggcagttccgcccgccaggcgcataaaagcgaaacgtcaccggtcgatctgtgcgtgattggcattgtcgatgaggtggtgtctggcggtcaggtaattttccacaaataaggcagaacatcatgaatcaacaggatattgaacaggtggtgaaagcggtactgctgaaaatgcaaagcagtgacacgccgtccgccgccgttcatgagatgggcgttttcgcgtccctggatgacgccgttgcggcagccaaagtcgcccagcaagggttaaaaagcgtggcaatgcgccagttagccattgctgccattcgtgaagcaggcgaaaaacacgccagagatttagcggaacttgccgtcagtgaaaccggcatggggcgcgttgaagataaatttgcaaaaaacgtcgctcaggcgcgcggcacaccaggcgttgagtgcctctctccgcaagtgctgaccggcgacaacggcctgactttaattgaaaacgcaccctggggcgtggtggcttcggtgacgccttccactaacccggcggcaaccgtaattaacaacgccatcagcctgattgccgcgggcaacagcgtcatttttgccccgcatccggcggcgaaaaaagtctcccagcgggcgattacgctgctcaaccaggcgattgttgccgcaggtgggccggaaaacttactggttactgtggcaaatccggatatcgaaaccgcgcaacgcttgttcaagtttccgggtatcggcctgctggtggtaaccggcggcgaagcggtagtagaagcggcgcgtaaacacaccaataaacgtctgattgccgcaggcgctggcaacccgccggtagtggtggatgaaaccgccgacctcgcccgtgccgctcagtccatcgtcaaaggcgcttctttcgataacaacatcatttgtgccgacgaaaaggtactgattgttgttgatagcgtagccgatgaactgatgcgtctgatggaaggccagcacgcggtgaaactgaccgcagaacaggcgcagcagctgcaaccggtgttgctgaaaaatatcgacgagcgcggaaaaggcaccgtcagccgtgactgggttggtcgcgatgcggcgaaaatcgcggcggcaatcggcctgaacgtgccgcaagaaacgcgtttgctgtttgtggaaaccactgcagaacatccgtttgccgtgaccgaactgatgatgccggtgctgcccgtcgtgcgcgtcgccaacgtggcggatgccattgcgctggcggtgaaactggagggcggttgccaccacacggcggcaatgcactcgcgcaatatcgaaaacatgaaccagatggcgaacgccattgataccagcattttcgttaagaacggaccgtgcattgccgggctggggctgggcggggaaggctggaccaccatgaccatcaccacgccaaccggtgaaggggtaaccagcgcgcggacgtttgtccgtctgcgtcgctgtgtattagtcgatgcgtttcgcattgtttaaggagtaaccgatggcgcacgacgaacaatggctcaccccacgtctgcaaacggcggcaacgctgtgtaaccagacgcctgccgcgacggaatctccgctgtggctgggggtggatctgggcacctgcgatgtggtgtcgatggttgttgaccgcgacggcatcgtctgggatttcttcggtgcggtcaccattgttcgtcgccatctcgacactcttgagcagcaattcggtcttcgttttagccatgcggcgacttcatttcctccaggtacggacccgcgtatttccatcaacgtgctggaatctgctgggctggaagtgagccatgtgctggatgagccaaccgcagtcgcggatctgctgcaactggacaacgccggtgtagtggatatcggcggcggcactaccggcattgccatcgtgaaaaagggcaaggtgacgtactcggcggatgaagccaccggcggacatcacatctctctgactctcgccggaaatcgtcgtatttcgctggaagaggcagagcagtacaagcgcggtcatggtgacgagatttggcccgcggtgaaaccggtgtacgaaaaaatggcggacattgtcgcccggcatattgaagggcagggcattactgatttatggctggcgggcggctcttgtatgcaaccgggcgtggcggaactgtttcgcaaacaattcccggcgttacaggtgcatttaccgcagcacagtttgtttatgaccccgctggcgatcgccagtagtgggcgagagaaagcggaggggctatatgcaaaatgaattgcagaccgcgctctttcaggcgttcgataccctgaatctgcaacgggtaaaaacatttagcgttccaccggtgacgctttgcggtccgggctcggtgagcagttgcggacagcaagcgcaaacgcgtgggctgaaacatctgttcgtgatggcagacagctttttgcatcaggcagggatgaccgccgggctgacgcgtagcctggccgttaaaggtatcgccatgacgctctggccatgtccggtgggcgaaccgagcatcaccgacgtgtgtgcagccgtggcgcagttgcgtgagtcaggctgtgatggggtgatcgcatttggcggcggctcggtgctggatgcggcgaaagccgtggcgttgctggtgacgaacccggatagcacgctggcagagatgtcagaaaccagcgttctgcaatcgcgcctgccgttgattgccattcccactaccgccggaaccggctctgaaaccaccaacgtaacggtgattatcgatgcggtgagcgggcgtaagcaggtgttagcccatgcctcgctgatgccggatgtggcgattctcgacgccgcattgaccgaaggtgtgccgtcgcatgtcacggcgatgaccggcattgatgcgttaacccatgccattgaagcatacagcgccctgaacgctacaccgtttaccgacagtctggcgattggtgccattgcgatgattggcaaatcgctgccgaaagcggtgggctacggtcatgaccttgccgcgcgcgagagcatgttactggcttcatgtatggcgggaatggcgttttccagtgcggggcttgggttgtgccacgcgatggcgcatcagccaggggcggcgctgcatattccacacggtctggcgaacgccatgttgctgccaacggtgatggaatttaaccggatggtttgtcgcgaacggtttagtcagattggtcgggcactgcgaactaaaaaatccgacgatcgtgacgctattaacgcggtaagtgagctgattgcggaagttgggattggtaaacgactgggcgatgttggcgcgacatctgcgcattacggtgcatgggcgcaggccgcgcaggaagatatttgtctgcgcagcaacccgcgtaccgccagcctggagcagattgtcggcctgtacgcagcggcgcaataaatgccggatgcgacgcttgccgcgtctgatccggccttcgggattgcacatgtagggcggataaggcgtttacgccgcatccgccaataaataacaactaacagggagtaaaggcgatgggaattaacgaaatcatcatgtacatcatgatgttctttatgctgatagctgccgtagacaggatcctgtcgcagttcggcggttctgctcgtttcctcggtaagttcggtaaaagtatcgaaggatcaggcggtcagttcgaagaaggctttatggcaatgggcgctctgggtctggcgatggtcggtatgaccgcgctggcaccggtactggctcacgtactcgggccggtaattatcccggtttacgaaatgctcggcgcaaacccgtcaatgttcgccggaacgctgctggcgtgcgatatgggcggtttcttcctcgccaaagagctggcgggcggcgacgtagcagcgtggctatactctgggttaattcttgggtcgatgatggggccaacgattgtgttttccattccggtggcgctcggcattatcgaaccttctgaccgtcgttatctggcgctcggcgtgctggcgggcattgtgaccattccgattggctgtattgctggtggtctggttgctatgtactccggtgtgcagatcaacggtcagccggtggaattcactttcgccctgatcctgatgaacatgatcccggtgatcattgtcgcgattctggtggcgctggggctgaaattcatcccggaaaaaatgatcaacggcttccagatcttcgccaaattcctcgttgcattgatcaccctcggtcttgccgctgcggtagtgaaattcctgcttggctgggaactgatccccggtctggatcctatctttatggcccctggcgataaacccggtgaagtgatgcgcgccattgaagttatcggttctatctcctgcgtgctgttaggggcgtatccaatggtgctgctgctgactcgctggtttgaaaaaccgctgatgagcgtcggtaaagtactgaatatgaacaacatcgcggcagccggcatggtggcaacgcttgccaacaacatcccgatgttcggcatgatgaagcagatggatacccgcggcaaagtcatcaactgcgccttcgccgtttccgctgctttcgccctgggcgaccacttaggcttcgccgctgccaacatgaacgccatgatcttcccgatgattgtcggcaagttgatcggcggcgtaacggcgattggcgtggcgatgatgctggtgccaaaagaagacgcgaccgcgactaaaaccgaagcggaggcacaatcgtgaacactcgccagctattgagcgtcggtatcgatatcggcaccaccaccacccaggtgattttctcccacctggagctggttaaccgtgcggcggtgtcgcaggtgccgcgctacgaattcattaaacgcgaaattagctggcaaagtccggtgttctttacccctgtcgataaacagggcggtttaaaagaagcggaactgaaaaccttaatactcgagcaatatcaggctgcgggtattgcgccggaaagcgttgattctggtgccatcatcatcaccggtgaaagcgcgaaaacccgcaatgctcgcccggcggtgatggcgctctctcaatcgctgggggattttgtcgttgccagcgccgggccgcacctcgaatccgtgatcgccggtcacggagctggggcgcaaaccctttctgaacaacggctgtgtcgggtactgaatatcgacatcggcggtggcaccgcgaactacgccctgttcgatgccggaaaaatcagcggcactgcctgtctcaacgtcggtggtcgcctgctggaaaccgacagccaggggcgcgtggtttacgctcataaaccggggcagatgattgtggatgagtgcttcggtgcaggcactgacgcccgttcgctgaccggcgcgcagctggtgcaggttacccggcggatggcggcgctgattgtcgaagtgattgacggaacgctttcgccactcgcgcaggcattgatgcaaaccggtttgctgcccgcaggtgttacgcccgaaatcattacgctttctggaggcgtgggcgaatgttatcgccaccagcccgccgacccgttctgttttgccgatattggcccacttctggcaacggcgctgcatgaccatccgcgcctgcgtgagatgaatgtgcagtttccggcgcaaaccgtacgcgccacggtgattggcgcgggtgcacataccctttcgctctctggcagcacaatctggctggagggcgtacaactgccgctgcgcaatttgccggtggcgatcccgattgatgaaacggatctggtgagtgcctggcaacaggcgctgcttcagctggatcttgatcccaaaactgacgcgtacgtgctggcgcttcccgcctcgctgcctgtgcgttacgccgcggtactgacggtcatcaacgcgctggtcgatttcgtcgcgcgttttccgaatccgcatcccctgctggtggtggccgggcaggactttggtaaagctctgggcatgttgttgcgcccacagctacaacaactcccgttggcagtcattgacgaagtgattgtccgcgcgggggactatatcgacattggtacgcctctttttggcggatcggttgtgccggtgacggtgaaatcactcgcatttccttcctgagggaacgacttatgaaactaaagaccacattgttcggcaatgtatatcagtttaaggatgtaaaagaggtgctggctaaagccaacgaactgcgttcgggggatgtgctggcgggcgttgcagcggcaagctcacaggagcgcgtggcggcaaagcaggtgttgtcggaaatgaccgtagcggacatccgcaataatccggtgattgcctatgaagatgactgcgtgacgcggctgattcaggacgacgttaacgaaacggcctacaaccagattaaaaactggagcatcagcgaactgcgtgagtatgtgctgagcgatgaaactagcgtggacgacattgcctttacccgcaaagggctgacctcggaagtggtcgcggcggtagcgaagatttgctccaacgcggacctgatctacggcgcgaagaaaatgccggtaatcaaaaaggccaataccaccatcggtattccgggcaccttcagcgcccgtttgcagccaaatgacactcgtgacgacgtgcaaagtatcgccgcgcaaatctacgaagggctttccttcggggtgggcgatgcggtgatcggcgttaacccggtgactgacgacgtggaaaacttaagccgcgtgttggacaccatttacggcgtgatcgacaaattcaacatcccaactcagggctgcgtactggcgcacgtcaccacccagatcgaagcgattcgtcgcggcgcgcctggcggactgattttccagagtatctgtggcagcgaaaaagggctgaaagagtttggcgtggaactggcgatgctcgacgaagcgcgcgcagtgggtgcagagttcaaccgtatcgccggggaaaactgcctctacttcgaaaccggacaaggctctgcgctatccgctggcgctaacttcggcgctgaccaggtgacgatggaagcacgtaactatgggctggcgcgtcattacgatccgtttatcgtcaacaccgtggtcggctttattgggccggagtatctctacaacgaccgccagattatccgtgctggcttagaagatcactttatgggcaagctgagcggcatctctatgggctgtgactgctgctacaccaaccacgctgacgctgaccagaacctcaacgaaaacctgatgatcctgctcgccaccgcaggctgcaactacatcatggggatgccgctgggtgatgacatcatgctcaactaccagaccaccgcattccacgataccgccactgtgcgtcagttactcaacctgcgcccgtcaccagagtttgaacgctggctggaaagcatgggcattatggcaaacggtcgcctgaccaaacgggcgggcgatccgtcactgttcttctgatgacgcggagataacacatcatggatcaaaaacagattgaagaaattgtacgcagcgtgatggcgtcaatgggacaaacggcccccgcgccgtcagaagcaaagtgcaccaccaccacctgtgcggcaccggtgacctcggaaagctgcgcgctggatttaggttctgcggaagcaaaagcgtggattggtgttgaaaacccgcatcgcgcagacgtattaacagaactgcgtcgcagcaccgtggcccgcgtttgtaccggtcgtgccggtccgcgtccacgtacccaggcgttgctgcgtttcctggccgatcactctcgttcgaaagataccgtactgaaagaagtgccggaagagtgggtgaaagcgcagggcttgctggaagtacgctccgaaattagcgacaaaaatctctacctgactcgcccggatatgggccgccgcctgtgtgcagaagctgttgaagcgctgaaagcacagtgtgttgctaatccggacgtacaggtcgttatttctgatggcctgtcaactgatgccatcaccgtgaactacgaagagatcctgccgccgctgatggcgggcctgaaacaggccgggctgaaagtcggcacgccattctttgttcgttatggtcgcgtgaagattgaagatcagatcggtgagatcctcggcgcgaaagtggtgatcctgctggtgggggaacgtccggggttgggtcagtcagaaagcctctcctgttacgccgtttactcgccgcgtatggcgaccaccgttgaggccgatcgcacctgcatctctaacattcaccagggcggcacgccgccggttgaagccgcagccgtcattgtggatttggcgaaacgtatgctggagcagaaagcatccggcatcaacatgacccgataaggaggcatcatgccagctttagatttgattcgaccgtcggtaaccgccatgcgggtgattgcctccgttaacgctgaatttgcgcgtgaactaaaattgccgccgcatattcgtagcctcgggctgatttctgctgattccgatgacgtcacctacattgcggctgacgaagcgaccaagcaggcgatggtcgaagtggtatatggccgctcgctgtatgcgggagcagcacacggaccgtcaccgactgccggtgaagtgctgattatgcttggtgggccaaacccggcggaagtgcgtgctggtctggatgcgatggttgcacatattgaaaatggcgctgctttccagtgggctaatgacgcagaaaacaccgcattcctggcacatgtggtttcgcgtaccggttcttatctctcatcaaccgccgggatcacgcttggcgatccgatggcgtatctggtggcaccgccgctggaagcgacctacggcattgatgcagcgttgaaatctgccgacgtacagctggtgacctatgtcccgccaccgtctgaaaccaactactcggcagcatttttaaccggtagccaggccgcgtgtaaagcagcctgtaacgcctttaccgatgcagtgctggaaatcgcgcgtaatccaatccagcgtgcgtaacggaggttgccgatgatcaatgcactgggattgctggaagtggacggcatggtcgccgcgatagatgcagcggatgccatgctcaaagcagctaacgttcgtctgctcagtcacgaagtgcttgaccctggtcgcttaacgctggtggtggaaggcgatctggcggcgtgtcgtgcggcgctggacgcaggttgtgctgccgcgatgcgtaccgggcgtgtcatcagccgcaaggagatcggtcggccagacgatgacacccagtggctggttactggctttaaccgccagccgaagcaacccgtaagggaacccgacgcgccagttatcgtcgcggaatctgctgacgagttgttggcgctgttaacatcagtacgtcagggaatgacggcaggagaagtggctgcccactttggctggccgctggaaaaagccagaaatgcgctcgaacagctcttttctgccgggacgttacgtaaacgcagtagtcgttatcgtctcaagccccattaacctgtcggaggtgccgggtgtcctacaacacccggcattaacatcatgaaaaagacccgtacagccaatttgcaccatctttatcatgaacccttacccgaaaacctgaagctcacgccgaaggtcgaagtggataatgttcatcaacgacagacaacggatgtctatgaacatgctttaacgattaccgcctggcagcagatttacgatcagctgcatccgggcaagtttcatggtgaatttacggaaattctactcgatgatattcaggtttttcgtgaatacaccggtctggcgctgcgtcagtcgtgcctggtctggccgaactcgttctggtttggcattccggcgacgcgcggtgagcagggatttatcggttcgcaatgtctgggaagcgcggaaatcgccacccgccctggtggcactgaatttgaactgagcacgccggatgattacacgatcctgggcgtggtgctttctgaagatgtcatcacccggcaggctaactttttgcataacccggatcgggtattacatatgctgcgtagccagtcggcgctggaagtgaaagagcagcataaagccgcgctgtggggctttgtccaacaggcgctggcgacgttttgcgagaacccggaaaatctccatcagcctgcagtgcgaaaagtgctgggggataatttgctaatggcgatgggggcgatgctggaagacgcgcaaccaatggtgacggcggaaagcatcagtcatcagagttaccgtagattactttcccgcgcccgtgaatatgtgctggaaaatatgtctgagccggtgacggtgctggacttgtgtaatcaactgcatgtcagtcgccgcacgctacaaaacgcgtttcacgctattttaggcattggcccaaacgcgtggctgaaacgcattcgcctgaacgccgtacgccgcgaactgataagcccgtggtcgcaaagcacaacggtaaaagacgccgccatgcagtggggattctggcatctggggcaatttgccacggattaccagcagctgtttgccgagaagccgtcgttgacgttgcatcagcgggtgcgggaatgggggtgagggagttacacccaatccctgaccttaataaactcacttaacgccgcttctgggctgccatcttttggctgataatcatactcccagcgtaccagtggcggcattgacatcaggatcgactcggtgcgcccgccagtttgcaggccaaacagagtgccgcgatcccagaccagattgaactcgacataacgaccgcgacggtagagctgaaaattgcgctcgcgctcgccgtaggccatcgctttacgtcgctctacaattggtaaataagcgtcggtgtagcctttgcctaccgcctgcataaaggcaaaacagtggtcgaaatctggcgtgttcagatcatcaaagaacagcccgccaataccgcgctgttcgttgcgatgtttgaggtagaagtaatcgtcgcaccactttttgtaacggggataaacgtcttcaccaaatggcaggcacaggtcacgggcggtgcggtgccagtgaatggcgtcttcttcaaaaccatagaaaggggttaaatcgaagccgccgccaaaccaccagacgggctctgcacccggtttttcggcaataaaaaaacgcacattcgcgtggctggtgggaacatacgggttatgcggatgcactaccagtgaaacgcccatcgcctcgaaactgcgcccggcaagttccgggcgatgagcggtggcggaagctggcatcgcctcgccgtggacgtgagaaaagttgacgcctgcctgttcgaaaacaccaccattacgcaacacccgactacgcccgccgccgccagcttcgcgctgccaactatcttcgacaaattctgcgccatcgacggcggtcagctgctgacaaatcgtatcctgaaggttgagcagaaactgtttaacctggtgtgcgtcgggtttcataacttatcgctttttcgaatgtgctttctggttgtcgaaccagtggaaataactgatcacgccttcagcaatcgctgtggcgattttctgacgaaacgccgccgtgcctaacagccgctcttcttccgggttggtgataaacgaggtttccaccagcaccgaaggaaccgacggcgatttcaacaccacaaacgcggcttgttcggtgttgcggctgtgcagtttatgcaccggcttaatctttttcagaatatgcgagccgagcgtcaggctgtttttaatagtatcggtttgcactagatcaaacagcacttgctgcaataggtgatccttgtcagtcgcctttttaccggcaacttcatcggcgcggttttcgcgttcagacaggtatttcgccattgcgctacttgccccacggttagagagggcaaataccgaagcaccggcagctttcgggttggtaaagccatcggcatgaattgacataaacagatctgcgccatgtttatgggcgatttcaacgcgatcgtaaagtgggataaacgtatcgccagaacgcgttaaacgcgcatcaatcccatgattacgcaaaatggaacggacgtttttagcaatcgccagcaccacatgtttttctttcgaaccgttgcgtccgatcgctccggtatcaattccgccgtggcctggatcgagaacaacgacacgtttgccgccagattttttggctttcggcttgctgtgtccgttgctggtttttaaaggttcgtctttggcgatggcttgcgacattcctgacaacgtcagggcagccaaaccggctttcagcacctggcggcgcgaagtgagtgtttttagtggtttaaaagtgctcatacggcctgagttgtaataataaagttccagatgttatatcgtatcgcgtaatccgttacgacggtttgatgttgagaattgttttacttttcatttcaatagttgacaactccccattatgccactttttcaaccgattttcgtcagatattggctaattcgaccgttcacgccataatcagccttttaacccgcaaaaaggtaacgaataccatggagatacgcgtatttcgccaggaagatttcgaagaggtcatcaccctttgggagcgttgcgacttgctgcgtccgtggaacgatccggaaatggacatcgagcgtaagatgaaccatgacgtcagtttgtttctggtcgctgaggtaaacggtgaagtggtcggaacggtgatgggcggttatgacgggcatcgcgggtctgcttattatcttggcgtgcatccagagtttcgtgggcgtgggattgccaatgcgttgcttaatcggctggagaaaaagctgattgctcgtggctgcccgaaaattcagatcaatgtgccggaagataacgacatggtgctcggaatgtatgaacgcctgggatatgaacacgccgacgtgctgagtctgggtaagcgtttgattgaagatgaagagtactgagttccatcctgtccattatgatgcgcacggacgcctgcgtttacccttgctcttctggcttgtgctattgcttcaggcgcgaacctgggtgctgtttgtcattgccggtgcgtcgcgtgagcagggtactgcgctgctaaatctgttttatcccgatcacgataatttctggctggggctgattcctggcattccggcggtgctggcgtttttgttgagcggtcggcgggctacgtttcctcgcacctggcgtgtactctattttctgttgctgttggcgcaggtggttttactttgctggcaaccgtggctgtggctgaacggtgaatccgttagcggtatcggtctggcgctggtagtggcggatattgtggcgttaatctggctgctgaccaatcgacgtttacgcgcttgttttaatgaagtaaaagaataacggcactttttggtgaatttgcactccaagcaacgttattgaataaccaaaggaagtgacatgaaatcgctgcgtttaatgttatgcgctatgccattgatgctgaccggctgttccacgatgtcgtcagttaactggtctgccgctaacccgtggaactggtttgggtcgtccaccaaagtgagcgagcagggcgttggtgaattaacggcgtccacaccactgcaagaacaagccattgccgatgcgcttgatggcgattatcgcctgcgcagcggaatgaaaaccgcgaacggcaacgtggtgcgcttttttgaagtgatgaagggcgacaacgtggcgatggtgattaacggcgatcaaggcacgatcagtcgcattgacgtgctggatagcgatattcctgctgacaccggtgttaaaatcggtacaccgtttagcgacctttacagcaaagcatttggcaattgccaaaaagctgatggtgatgataatcgtgccgtcgaatgtaaagccgaaggcagtcaacatattagctaccagttcagcggggaatggagtggtcctgaagggttaatgccttcggacgataccctgaaaaactggaaagtcagtaaaattatctggcggcgttaatttgcgtctgaacaaaccgccgccgcgaaaaaacacgtaaaatagcgctcaacaatgccacggattgcgtggcattattattttcaggaggaacaatgtctcaggttcagagtggcattttgccagaacattgccgcgcggcgatttggatcgaagccaacgtgaaaggggaagttgacgccctgcgtgcggccagtaaaacatttgccgacaaactggcaacttttgaagcgaaattcccggacgcgcatcttggtgcggtggttgcctttggtaacaacacctggcgcgctctgagcggcggcgttggggcagaagagctgaaagattttccgggctacggtaaaggccttgcgccgaccacccagttcgatgtgttgatccacattctttctctgcgtcacgacgtaaacttctctgtcgcccaggcggcgatggaagcctttggtgactgcattgaagtgaaagaagagatccacggcttccgttgggttgaagagcgtgacctgagcggctttgttgacggtacggaaaacccggcgggtgaagagacgcgtcgcgaagtggcggttatcaaagacggcgtggatgcgggcggcagctatgtgtttgtccagcgttgggaacacaacctgaagcagctcaaccggatgagcgttcacgatcaggagatgatgatcgggcgcaccaaagaggccaacgaagagatcgacggcgacgaacgtccggaaacctctcacctcacccgcgttgatctgaaagaagatggcaaagggctgaagattgttcgccagagcctgccgtacggcactgccagtggcactcacggtctgtacttctgcgcctactgcgcgcgtctgcataacattgagcagcaactgctgagcatgtttggcgataccgatggtaagcgtgatgcgatgttgcgtttcaccaaaccggtaaccggcggctattatttcgcaccgtcgctggacaagttgatggcgctgtaagcgtttctgattcattgattaaaggccaggcagtaacattactgactggcctttttattacttttgctttaacgccgcatacacctgatcaactacccaaccatacgttgcaatcggcagctgaccgctttcgaacatattgggattcttttgcggatcggcaaccggcgaatgtggcttgttgcttaacatcacaatcgccatatgattcaccggatcgataacggtcaccgttccggtccagccagtgtgaccgtaggtttgcgggcttgccagcgtgccaaacgtcggcgtcatggtggcattaccattcacgcgccagccgaggccaaaagtggcatcttccttagagctggtggtgaacatcttcaccgtttccgcactgaacagctgcacatcgccatagcccccgccgttcagcatcgtttgcattaacaccgcaatatcgccggtattggaaaacaaacctgcgtgcccggaaacgccgcccatcgaataaaaggctttttcatcgtgcacctgaccccagagagtggaggtgcggatattcgggaaatggatcacgccatcgcgggtattgccgttcaattccgtggcggcaatttgctgcggtttaaagcctttcagcagcgggttaaataccgtatgtgtcaggccgagcgggcgataaatcgactcttcaacatagcggtcaagcggctgaccggtgaccgactcgacgataaatccaagcagcatataatcgacatcactgtaaatatgcttgctgccgggctgatactccagcggcgtgcgcttgatcatctccagcgtctggcctttatcctgggaatataacgcgcccgcgaccgctttattcggatattgtgggtccgccgggaaaccgccgctgtgatgcagcaggtcagaaatccgcagcgtgtttttgcctttgatggtgtcatttggactatcggcaaaccccggaatatatttcgcaatccgatcgtcaggatgcagtttgccttcgctcatcagcttttgcagggcgaagttcgtggcgtacattttggtgtttgaggccaggtcatacagcgtcccggtggtggctttgacaggctgttccatcaacacgctgccatcgtactttttcgccgctccccaggctttgcgatacacaatctgattatctttaatgatcagcaggtttacgccgggataaccggcgtccacttgctggctaatccagcgatccatctggttaagccgttcgacgttgaaccctgctttctctggcgaactttctgtcagaacagggtattttgcggcgctgacgctacaactaacagccagcagagaaagatagagcattgtccgtttcatgatatcagtccagattgacgttacggcagccaaagagcgtggtgaaaataaacccgcaaacccatgccaccagaatcccgccagcataaaccgccattgccggaaggatgccttgtgcggaagtcatcagcggcagcgccaccagaccagacggcccaaaggcgctgtttaagcccatcggcagaccccaccaggctatcaggccgataaacaaaccgcccgctgcgccgcctaaacaggcggtaataaacggtttcatgcggggcagggtgacgccgtaaatcaacggttcaccaacgcccagcagaccgggaataatcgccccgcgtacctgactgcgtaatgcactgtgcggttgcgcccgccagtagagtgccagcgccgcgcccacctggcccgcgcctgccattgaaaggatgggaaataagctgttgaatccctggctgtccattaacgcgaggtaaacaggaataaagccctgatgcacgccaaataccacggcgatcaggaacagcccggctaaaaccgcacaaccgaacggattactgttcaggtgcataaacagccatgacataccttcgaataaccagccacccagcggcataatgatcaggtacgcaagcgtagcggtgatcagcagggtgattaacgaggtcagcagcatgtcgagatcgtccggcataaagcggcgcaccatgccttcaatgcgggcgcaggcccacgcggcaatcagcacgccgataatattgccgcgcggatcgatgggcagaccaaagaaatcgtgaaaaccggcgtagtaaccggtggttgcagcggggttataaccgagcaaaaagagtgcggcaataattgcgccattgacgcccgtgccgccaaatgcctgggcggcgttatagcccaccagaatcaccaggaaagtgaacaaacctttgctgaacaccttcataaaattcagcgcgtcgggtagcgtgccctgagcatctgccggaacgtgcatcaccgtggcaattaacgtcgctatccccagcagcagaccggcggcaataaaaccggggatcagcggcgtgaagatggtggcgaatttggcgagaaattgttgcacgccggaggtttgtttggcttttaactgacgtttgttctgggcggcgatttctgcggcatcctgtaccggtgcctcgcccagcagctcgctcatcgcttttgcggcacgatgcgctttaccaggcccaaaaacgacctgcacctggtcgctggtcaaaatgacgcccttcacgccttccagcgttttgatattgggatcaaccagtgaactgtcatgtacacccagacgcaggcgcgtcatacagttaccacaactggcgatatttcccggtccgccgacacgggtaaggatggtgttcagaagttcactgctgatctctttggccatgggttattccttgtctaaaacctgacgaataaagccgccgtgttgatccaggcgttttttagcttctgcggcatcgagatttttcagcaccatcacaatggccgttttacagttgcgctcgcaggcaattaacgccgcttccgcttgttcggcattacatccggtggcgtttttaacgatattgacctggcgcacatgcagtttttcgttggtggcgaccacatcgaccatcaggttgccgaacactttgccagatttaatcatcagcccggtggaaagcatattgagcaccagtttctgcgctgtgcctgctttcattcgcgaagaaccagtgaccacttcggcacctacaatcggtgtaatggcaaactcggcggtggtggaaacggcactccccggattacaggaaattcccactgtgcggcagccgagctggcgtgcgtattccagtccggcaatcacatacggcgtgcgaccgctggcagcaatgccaaccaccacatcctgtgccgttaaattaatatttttcagatcgttaacaccaccttcccggctatcttcagcgccttccaccgcgtgctgaatggcatattcgcctccagcaatcaaaccaaccaccagacccggtttcacgccgtaggtgggcggacattcgctggcatccagaatccccagacgaccggatgttcccgcaccgagataaatcagacgaccgccgccgctgacctgggcgtggataacatcgatcgccgcggcgatatccggcaggacgcgctcaacggcaagcggtacggttttatcttcatcgttgataatccggcacatttccagcgtcgatacgcggtcaatttcagccgaggcggtgttcgagccttcagtaatcatcttttctagttgcatcggtggtgaccttactatttacgatcaaataattgcagatgtatggaatcatatatcccgaattgacagacttaaaggaatcattgagtctacactcgcagagtgtgaagagcgtcataagaacttaagcggaatttatgctgccagcccaggagagtggaagatgttgtacctgacgaaaataagcaatgcggggagtgaattcaccgaaaacgagcaaaaaatcgctgactttctgcaggccaacgtgagtgagctgcaatccgtttcttcacggcagatggcgaaacagctcggcattagccagtcgagcatagtgaaatttgcccaaaaactcggcgcgcaaggatttactgaattgcgtatggcgttaataggcgaatacagtgccagccgggagaaaacgaatgccacggcgctgcacctgcacagttcgattaccagtgatgattcgctggaagtgattgcccgcaaattgaatcgcgaaaaagagctggcgctggagcaaacctgtgcgttgttcgactacgcgcggctgcaaaaaatcattgaggtcatcagtaaagcaccgtttatccagataacgggcctgggcggatcggcgctggtggggcgcgatctgtcgttcaaactgatgaaaattggctatcgcgtggcctgcgaagccgacacgcacgtacaagccaccgtttcccaggcgttgaaaaaaggcgatgtacaaatcgctatctcttacagcggcagtaaaaaagagattgtcttatgcgcagaagcggcacgaaagcagggggcaacggtgattgccattacttctctggctgattctccgctgcggcggctggcgcatttcacgctcgataccgtttccggtgaaaccgaatggcgtagctcgtcgatgtctacccgcacggcgcaaaattctgttaccgatttactgtttgttggtcttgtgcaactcaatgatgtggagtcattgaaaatgattcagcgcagcagtgagctaacacaacgcctgaaatgatgcataaagcagcgactggattgagattttcctgaattagtgagctgatccgcagcaatattttgtttatcctgtattttcagagggaatggagtgtaacgctctgtattaacaaggagagcattaaaatgggtaaactcacgggcaagacagcactgattacgggcgcattgcagggaattggcgaaggaattgccagaacttttgcgcgtcatggcgcaaacctaatcttgctggatatctcccctgagatcgaaaagctggcggacgaactgtgtggtcgtggtcatcgctgtacggcggttgtcgccgatgtgcgtgacccggcgtcggtagccgcagctatcaaacgcgcgaaggaaaaagaagggcgcattgatatcctggtgaataacgcaggcgtttgtcgtctgggcagtttcctcgatatgagcgatgacgatcgcgatttccatattgacatcaatattaaaggcgtatggaacgtcacgaaggcggtgctgccggagatgattgcccgcaaagatggtcgcattgtgatgatgtcttcggtcactggcgatatggtggccgatccgggtgaaacggcgtacgccttaacgaaagcggcgattgttggcctgacaaaatcgctggcggtggagtatgcgcagtctggtattcgcgttaacgccatatgccctggatacgttcgcacaccaatggcggaaagcattgcccgccagtcgaacccggaagatccagaatcggtgctgactgaaatggcgaaagcaatcccgatgcgtcgcctcgccgatccgttggaagtcggcgaactggcggccttcctcgcatcggatgaatccagctatttaaccggtacacagaatgtgattgatggcggcagcacactgccggagacggtcagcgtcggtatctgattcacctctgtttcctccctgcatgtgtggggaggatttcgtcttattcccttttcaacttccaaatcaccaaacggtatataaaaccgttactcctttcacgtccgttataaatatgatggctattagaaagtcattaaatttataagggtgcgcaatggccgttaacttactgaaaaagaactcactcgcgctggtcgcttctctgctgctggcgggccatgtacaggcaacggaactgctgaacagttcttatgacgtctcccgcgagctgtttgccgccctgaatccgccgtttgagcaacaatgggcaaaagataacggcggcgacaaactgacgataaaacaatctcatgccgggtcatcaaaacaggcgctggcgattttacagggcttaaaagccgacgttgtcacttataaccaggtgaccgacgtacaaatcctgcacgataaaggcaagctgatcccggccgactggcagtcgcgcctgccgaataatagctcgccgttctactccaccatgggcttcctggtgcgtaagggtaacccgaagaatatccacgattggaacgacctggtgcgctccgacgtgaagctgattttcccgaacccgaaaacgtcgggtaacgcgcgttatacctatctggcggcatggggcgcagcggataaagctgacggtggtgacaaaggcaaaaccgaacagtttatgacccagttcctgaaaaacgttgaagtgttcgatactggcggtcgtggcgcgaccaccacttttgccgagcgcggcctgggcgatgtgctgattagcttcgaatcggaagtgaacaacatccgtaaacagtatgaagcgcagggctttgaagtggtgattccgaaaaccaacattctggcggaattcccggtggcgtgggttgataaaaacgtgcaggccaacggtacggaaaaagccgccaaagcctatctgaactggctctatagcccgcaggcgcaaaccatcatcaccgactattactaccgcgtgaataacccggaggtgatggacaaactgaaagacaaattcccgcagaccgagctgttccgcgtggaagacaaatttggctcctggccggaagtgatgaaaacccacttcaccagcggcggcgagttagacaagctgttagcggcggggcgtaactgatgtttgctgtctcctccagacgcgtgctgccgggctttaccttaagcctcggcaccagtctgctgtttgtgtgcctgattttgctgctgccgctctccgcgctggtgatgcaactggcccagatgagctgggcgcagtactgggaggtgatcaccaacccgcaggtggtcgcggcctacaaagtaacgctgctgtcggcgtttgtggcatcgatttttaacggcgttttcggtctgctgatggcgtggatcctaacccgctatcgcttcccaggccgcacgctgcttgatgcgctgatggatttaccctttgcgctgccaacggcagtcgccggtttaacgctagcctcgctcttttctgtaaacggtttttacggtgaatggctggcgaagtttgatatcaaagtcacctatacctggctggggattgcggtggcgatggcctttaccagcattccgtttgtggtacgtaccgtgcagccggtgctggaagagttaggcccggaatatgaagaagcggcggaaacgcttggtgcaacgcgctggcagagtttctgcaaagtggtgctgccggagctttctccggcgctggtggcgggcgtggcgctgtcgtttacccgtagtcttggtgaatttggcgcggtgatttttatcgccggaaatatcgcgtggaagacggaagtgacgtcgctgatgatttttgtgcgcttacaggagtttgattacccggcagcgagcgcgattgcttcggtgatcctcgcggcatctctgctgctgctgttctcaattaacactctgcaaagtcgctttggtcggcgtgtggtaggtcattaatggcggaagttacccaattgaagcgttatgacgcgcgcccgattaactggggcaaatggtttctgattggcatcgggatgctggtatcggcgttcatcctgctggtgccgatgatttatatcttcgtacaggcgttcagcaaagggctgatgccggttttacagaatctggccgatccggacatgctacacgccatctggctgacggtgatgatcgcgctgattgccgtaccggtaaacctggtgttcggcattctgctggcctggctggtgacgcgctttaacttccctggacgccagttactgctgacgctactggacattccgtttgccgtatcgccggtggttgccggtctggtgtatctgctgttctacggctctaacggcccgctgggcggttggctggatgaacataatctgcaaattatgttctcctggccgggaatggtgctggtcaccatcttcgtgacgtgtccgtttgtggtgcgcgaactggtgccggtgatgttaagccagggcagtcaggaagacgaggcggcgattttgcttggcgcgtctggctggcagatgttccgtcgtgtcacattgccgaacatccgctgggcgctgctttatggcgtagtgctgaccaacgcccgcgcgattggcgagtttggcgcggtgtcggtggtttccggctcgattcgcggcgaaacactttcgctgccgttacagattgaattgctggagcaggactacaacaccgtcggctcctttaccgctgcggcactgttaacgctgatggcgattatcaccctgtttttaaaaagtatgttgcagtggcgcctggagaatcaggaaaaacgcgcacagcaggaggaacatcatgagcattgagattgccaatattaagaagtcgtttggtcgcacccaggtgctgaacgatatctcactggatattccttcaggtcagatggtcgcgttgctggggccgtccggttccgggaaaaccacgctgctgcgcattatcgccgggctggagcatcaaaccagcgggcatattcgcttccacggcaccgacgtcagccgcctgcacgcgcgcgatcgcaaggtcggtttcgtgttccagcattacgcgctgttccgtcatatgacggtgttcgacaatatcgcttttggcctgacggtgctgccacgtcgcgagcgcccgaatgccgcagccatcaaagcgaaagtgacaaaattgctggagatggtgcagcttgctcatctggcagatcgttatccggcacagctttccggcggccagaaacagcgcgtggcgctggcgcgcgcgctggctgtagaaccgcaaattctgctgcttgatgaaccgtttggcgcgctggatgcgcaggtgcgtaaagagctgcgtcgctggctgcgtcaactgcatgaagagctgaaattcaccagcgtgttcgtgacccacgaccaggaagaggcgaccgaagtagccgatcgtgtagtggtgatgagtcaggggaatattgaacaggctgatgcgccgaatcaggtatggcgcgaaccagcgacccgttttgtactcgaatttatgggcgaagtgaaccgcctgcagggaaccattcgcggcgggcagttccatgttggcgcgcatcgctggccgctgggctacacacctgcgtatcagggtccggtggatctcttcctgcgcccgtgggaagtggatatcagccgccgtaccagtctcgattcgccgctgccggtacaggtactggaagccagcccgaaaggtcactacacccaattagtggtgcagccgctggggtggtacaacgaaccgctgacggtcgtgatgcatggcgacgatgccccgcagcgtggcgagcgtttattcgttggtctgcaacatgcgcggctgtataacggcgacgagcgtatcgaaacccgcgatgaggaacttgctctcgcacaaagcgcctgataggttgagtgaatgttaaacgcccggaggcgcttcccgcgatccgggctttttaatggcaaggtttgtaacctgtagacctgataagacgcgcaagcgtcgcatcaggcaacaccacgtatggatagagatcgtgagtacattagaacaaacaataggcaatacgcctctggtgaagttgcagcgaatggggccggataacggcagtgaagtgtggttaaaactggaaggcaataacccggcaggttcggtgaaagatcgtgcggcactttcgatgatcgtcgaggcggaaaagcgcggggaaattaaaccgggtgatgtcttaatcgaagccaccagtggtaacaccggcattgcgctggcaatgattgccgcgctgaaaggctatcgcatgaaattgctgatgcccgacaacatgagccaggaacgccgtgcggcgatgcgtgcttatggtgcggaactgattcttgtcaccaaagagcagggcatggaaggtgcgcgcgatctggcgctggagatggcgaatcgtggcgaaggaaagctgctcgatcagtttaataatcccgataacccttacgcccattacaccactaccgggccggaaatctggcagcaaaccggcgggcgcattacccattttgtctccagcatgggaacaaccggcactatcaccggcgtttcacgctttatgcgcgaacaatccaaaccagtaacgattgttggcctgcagccggaagaaggcagcagtattcccggcattcgccgctggcctgcggaatatctgccggggattttcaacgcttctctggtggatgaggtgctggatattcatcagcgcgatgcagaaaacaccatgcgcgaactggcagtgcgggaaggaatattctgtggcgtcagctccggcggcgcggttgccggagcactgcgggtggcaaaagctaaccctggtgcggtggtggtagcgatcatctgcgatcgtggcgatcgctacctttccaccggggtgtttggggaagagcattttagccagggggcggggatttaagattattgcgcaggcaccgttttatccgtctgcgcaattagcgcatgtaaaaaaggctgtgcgttctcatcgctcttaccggggatcttcacaatatacggcttcccggtaatcgatgacgacgaagcaaccttatcaataaactgctcggcagtgtcaatgcggttacgggtattgcccagcttcagacgcagatgagaaaccgcttcatcgcaggtatgttcatcaccgttgcgcacaaatatcaaatcctttttctgtgctaatccctccagcatggcgttgatgcgggcttcttcatgggcagttaacttcgcgtaagcggggagtgtcattagtagtgtaatgaccagacaaatgattttcttcattgaattaccttatccttgttttgtgatagccgatttgactgccagaatcaggtaaagtttcggttggaatacgatgaggatcatcggcaaggagaaaaaattaaatgagtagtttgttgttgtttaacgataagagcagggcgctgcaggcggatatcgtcgccgtgcagtcgcaggtggtttacggcagcgtgggcaacagcattgccgtgcctgctatcaaacagaacggtctgaatgtttttgccgtgccgacggtattgctgagcaatacgccgcattatgacactttctacggtggtgcgattccggatgaatggtttagcggttatttgcgtgcgcttcaggagcgtgatgcgctgcgccagctgcgcgctgtaaccacgggctatatgggaacggcatcgcaaatcaaaatccttgccgagtggctgactgcgctacgcaaagaccatcctgacctattgatcatggtcgatccggtgattggcgatattgatagcggaatttatgtcaaacctgaccttcccgaggcgtatcgacaatatttactgccgctggcgcagggaattacccccaatatctttgagctggaaatcctgaccggtaaaaattgccgcgatctcgacagtgccattgctgccgcaaaaagtctgctttcagacacattaaaatgggtggtgattaccagcgcctccggtaatgaagaaaatcaggagatgcaggtggtggtggtcagtgccgacagcgtgaatgtcatttcccattcacgggtaaaaaccgacctgaaagggactggcgacctgttttgtgctcagcttatcagtggtttgctgaaagggaaggcgttaaacgatgcggtgcaccgtgcggggttgcgcgtactggaagtgatgcgctacacccagcagcatgagagcgatgaattgattttgccgccgctggcggaagcataaaaaatggcgccgatgggcgccatttttcactgcggcaagaattacttcttgatgcggataaccggggtttcacccacggttacgctaccggacagtttgatcagttctttgatttcgtccatgttggagataacaaccggagtcagggtagacttggctttctcttccagtagcggcagatcaaattcaatgacagtatcgccaactttcacgcgctgaccttcttcagcaatacgcttgaagccttcgcctttcagttcaacggtgtcgataccgaagtggacgaacagttcaacgccgctatcagattcgatagagaacgcgtgattggtttcaaagattttaccaatggtaccgtctacaggcgcgaccattttgttacccgttggtttgatagcaataccatcaccaacgattttttccgcaaaaacgacatccggcacgtcttcgatattgacgatctcgccagagagcggagcaatgatctcaatagttccggtatccttcttgtcgtcggaaaccagagatttcagtttatcgaacaaacccatgatcttctcctaagcagtaaattgggccgcatctcgtggattagcagattgttttttcttcaatgaacttgttaaccagcgtcattaactcgtccgttgtcggttgagcaagagcctgctctgctaacaccttcgcatcttcgaagttcgtgttacggataatcttcttaatgcgcgggatagaaatggcgctcatagagaattcgtccagacccatccccagcaacagaagtgtagcacgttcatcgccagcaagctcaccacacatgccagtccatttgccttcagcatgagaagcatcaataacttgcttgatcaagttcagcacggacggtgacattggttggtaaaggtgtgaaatcatatcattaccacggtcaactgccagagtgtactgcgttaaatcattggtgccgatactaaagaaatcaacttctttggctaaatgacgtgcaattgttgcggcagccggtgtttccaccattacgccgatttcaattgactcgtcaaacgctttaccttcgtcgcgcagttcctgtttgtagatttcgatctctttgcgcagtgcacgcacttcttcaacagagatgatcatcgggaacataatgcgcaatttaccgaaagccgaggcacgcaggatagcgcggagctgatcgcgcaggatctctttacgatccatcgcgatacggatagcgcgccagccgaggaacgggttctcttctttcgggaagttcatgtatggcagctctttgtcgccgccgatgtccatggtacgaacgataaccgcctgcgagccacacgcttcagccactgctttgtaagcagcaaactgttcttcttcagtgggcagcgcgtcgcggtccatgaacaggaactcagtacgatacagaccaacgccttcagcgccgttacgctctgcaccttcaacgtcacgaaccgtaccaatgttagcgcacacttctacctggtgaccgtccagcgtaatagctggcagatctttcagtttagcaagctctgctttttcagaagccacttgctcctgaacagcgcgcattttatcaataacttcgttggttggattgacgtaaacctgattatttacggcatccagaatcagatagtcgtcatttttcacctgagaggtgacgctaccggtacccacgatagcaggcagttccagagaacgcgccatgatagaggtgtgggaagtacggccacccgcgtcggtgatgaaacccagcaccttcttcaggttcagctgtgcggtttcggacggcgtcaggtcagcggcaaccagaatgacttcatcctgaatggcgctcaggtcgataatcttcaggcccaggatgttgcgcagcaggcgcttacctatatcacgtacgtcagccgcacgttctttcaggtattcatcatccagctcttccagggcagaagcctgaccttcgataacttcatgagcagctgcgtcagctgtcatgtgtttatctttaatcagggctatgatttcctgctccagctcctcatcttcgagcagcataatatgcccttcaaagatggcttctttttcttcaccgaacgtttcaccagctttcgttttgatcgtttccagctgggctgatgccttggcacgaccgctcagaaaacgttcaacttcctgatcaacctggtcggcagaaatttttttccggtcaatgacaatttcgtcttctttcagaagcagagctttaccgaaagcgatacccggggatgctaaaatgcctgaaatcataaccctaccttacttgtgactgatttttaaaagaacccgggaaattactcgagttccgccatcagtttaaccagatgttcaaccgctttctgctcgtcttcgccttctgcggagatagtcacaacggtaccttgagtcaggcccagagtctgcagtttaaacaggcttttcgcgctggcgcttttgccgttggaagtcacagtaatttcagaagtgaagcccttagcttcttttacaaactgggcagcagggcgggtgtgcagaccgttcggagcggtaatggtaacttcttgctggaacattgtatttccccaacttataggtttagtgttgtggaactaaagtctagcctggcggttcgactttagcctgtattgttagcgccagtttttaacagacgcgacgcacgaagagcgcaatacagtccattgctggcgggtgttgaccgctgacgtttcgtacgtcattaaacattatgccgctaaaggaagaattgaaccaaatcataaaatcgattcagctttggcttttcctgtaacgattaatttcgcgcatcaaaataattagtctggttaaataccagttccgacaggctgaatcaatgccaggaggggcgaaagtttgaagcaggccacaaaaaagcacctaaaaaggtgcttttttacgcatttttaacaagctggcattactgttgcagttctttctcagtgaagagatcggcaaacaatgcggtgcttaaataacgctcacccgatgacggtagaataaccacaatattcttgttggtaaagctttcatcttcttgtagtttcaacgccgcagcaacagctgctccagaagagatacctgcaagaataccttcttcttccatcagacgacgcgcggtagaaatcgcttcttcattggtgatgccaatgactttatcgaccagcttgagatcgaggttagctgggataaaaccagcgccaataccctgaattttatgcgggccaggtttaatctcttcaccagccagtgcctgggagataactggagaatcggttggctcaacggcgacagagataagatcggtcttgcctttggtgcctttaatgtagcggctgacgccagtcagcgtaccgccagtcccaacgccagcaataaatacatcaacctgaccgtcggtatcttcccagatctccggaccggtggttttttcgtgaatttcagggtttgccggattgctgaattgttgcagcagcaggtatttctctggattgctggcgacaatttcttctgctttttggattgcgcctttcatgcctttagcaccttccgtcagcaccaggtttgcacctaacgctttcagcagcttgcggcgttcaatactcatggtttctggcatggtcagggtgagtttgtaaccgcgagcggcagctacataggccagtgcaatcccggtattaccgctggtcggttcaaccagttcaacgcctggtttcagcacgccgcgcttttcggcatcccaaatcatgttggcaccgatacggcacttaacgctgaagctggggttacgagattccaccttcgccagaatgcgtccgttaccgatgcgattcaggcgaaccagcggcgtgtgaccgatagtcagcgagttatcttcaaaaatcttactcatggcctgtccttaactgtatgaaattgggatacaacaggtagcatacccgctcagagaatatgcggaagtaaggatttagcatatctatatacagaagggaaataatgacatgcaagatggaataaggggcggcataagccacccctgtttcacacaaacggtttacaaaataaccggtagattgttaccgccacatcgcgtgtttatcgcgatagcaatcgacccacatcgccgtcgcgccacaaacggcaacgggcatgatgaacagattaagcagcgggatcatcgtaaacaggctggttaaagcaccaaactgcatattggtgattttgcgtgtgcgcagggcggtgcgcatctctttaaacggcactttgtggttatcgaaggggtaatcgcaatactggatggctaacatccaggcgctaaacaggaaccacagtaccggcgcgacggtttgcccaataccagggatgaagtaaagaattagtaatacaattgcgcgcggaagataccaggcaaatttttgccattcgcgtttcatgattcgcggcacatctttcatgataccgaaaatcccggtatctggcggtgtagcgccagtcaatcgtgcttccagttgttcagccaataaaccgttaaacggagcggcaatccagttagcaatcgtggagaagaaatagccaaacactaacagcacagagatgacagccagaggccacaacagataactcagccattgtagccagtccggaacgtaactcatgagagtcgggatccagacatcgagctgtgtaaagagccaccagaatgcgccccccatcaacaaaatattgaccagcagcggtaaaataacgaaacgccgaatcccaggttgcgagacgagcttccagccttgcgcaaaatagtaaaaaccgctgcgtggggcagatgtgaatgatgaaaccataatcaggatgagctccttttgaccaatcccaggaaaattctgcgtattttaccgggtaattgcgcaatggacagttaggatatgttcgaaaaaacagcaaaaagcacgatttcatctatctttgtgctgtgaaagttaatagtgcacttgcacttgaggtaatcggcaaatactcttagtgagtaaatgtttgccgtggtggcaaggtgttagaacaacagagaatataatgatgcaggatttgcgtctgatattaatcattgttggcgcgatcgccataatcgctttactggtacatggtttctggaccagccgtaaagaacgatcttctatgttccgcgatcggccattaaaacgaatgaagtcaaaacgtgacgacgattcttatgacgaggatgtcgaagatgatgagggcgttggtgaggttcgtgttcaccgcgtgaatcatgccccggctaacgctcaggagcatgaggctgctcgtccgtcgccgcaacaccagtaccaaccgccttatgcgtctgcgcagccgcgtcaaccggtccagcagccgcctgaagcgcaggtaccgccgcaacatgctccgcgtccagcgcagccggtgcagcagcctgcctatcagccgcagcctgaacagccgttgcagcagccagtttcgccacaggtcgcgccagcgccgcagcctgtgcattcagcaccgcaaccggcacaacaggctttccagcctgcagaacccgtagcggcaccacagcctgagcctgtagcggaaccggctccagttatggataaaccgaagcgcaaagaagcggtgattatcatgaacgtcgcggcgcatcacggtagcgagctaaacggtgaactgcttcttaacagcattcaacaagcgggcttcatttttggcgatatgaatatttaccatcgtcatcttagcccggatggcagcggcccggcgttattcagcctggcgaatatggtgaaaccgggaacctttgatcctgaaatgaaggatttcactactccgggtgtcaccatctttatgcaggtaccgtcttacggtgacgagctgcagaacttcaagctgatgctgcaatctgcgcagcatattgccgatgaagtgggcggtgtcgtgcttgacgatcagcgccgtatgatgactccgcagaaattgcgcgagtaccaggacatcatccgcgaagtcaaagacgccaacgcctgatacacttaaggcaaattaactcctcttcgaacccccgcttgtcgggggtttttagcattgatggtgcgatatggaatcaatcgaacaacaactgacagaactgcgaacgacgcttcgccatcatgaatatctttatcatgtgatggatgcgccggaaattcccgacgctgaatacgacaggctgatgcgcgaactgcgcgagctggaaaccaaacatccagaactgattacgcctgattcgcctacccaacgtgtaggcgctgcgccgctggcggctttcagccagatacgccatgaagtaccaatgctgtcactggataacgtttttgatgaagaaagctttcttgctttcaacaaacgtgtgcaggaccgtctgaaaaacaacgagaaagtcacctggtgctgtgagctgaagctggatggccttgccgtcagtattctgtatgaaaatggcgttttagtcagtgccgcgacccgtggcgatggcaccaccggggaagatatcacgtctaatgtgcgtactattcgcgctattccgctgaagctgcacggagagaatatcccggcgcgtctggaagtgcgtggtgaagtgttcctgccgcaggcggggttcgaaaagattaacgaagatgcgcgacgcacgggcgggaaagtttttgctaacccacgtaatgcggcagctggttcactgcgtcagcttgatccgcgtattacagcgaagcgaccgctcacttttttctgctatggcgttggtgttctggaaggtggcgagctgccggatactcatcttggccgtttactgcaatttaaaaagtgggggttgccggtcagcgatcgggtaacgctttgtgaatcggcggaagaagtgctggcgttctatcacaaagtggaagaagaccgcccgacgctgggctttgatatcgacggcgtggtgattaaggtcaactcactggaacagcaggagcagcttggctttgtcgcgcgtgccccgcgctgggcggtagcgtttaaattcccggcgcaggagcagatgacctttgtgcgtgacgtcgagtttcaggttgggcgtactggcgcgattacgcctgttgcgcgtctggaacctgtccatgttgctggcgtgctggtgagtaacgcaaccttacacaatgcggatgaaatcgaacgtcttggtttacgcattggcgataaagtggtgattcgccgcgctggcgacgtgatcccgcaggtggttaacgtcgtgctttctgaacgcccggaagatacccgtgaggttgtattcccgacgcattgtccggtatgtggttctgacgttgagcgtgtggaaggtgaagcggttgcccgctgtaccggtggcctgatttgcggagcgcagcgtaaagagtcgctgaaacactttgtttcccgccgtgcgatggatgttgacggaatgggcgacaaaatcatcgatcagctggttgaaaaagaatatgtccatactccggcagatctgttcaaactcaccgcaggcaaactgaccggactggagcgtatggggccaaaatcggcacaaaacgtggttaacgcgctagaaaaagcgaaagaaaccacctttgctcgcttcctctatgcacttggcatccgtgaagtcggcgaggccaccgcagcaggtctggcggcatatttcggcacgctggaagcgctggaagccgcttcgattgaagagctgcaaaaggtgcctgatgttggcattgtcgttgcatcccacgttcacaacttctttgccgaagaaagcaaccgcaatgtcatcagcgagctgttggcggaaggtgttcactggcctgcgccgatcgttatcaacgcggaagagattgacagcccgtttgctggtaaaaccgtggtgcttacgggcagcttaagccagatgtcgcgtgatgacgctaaagctcgactggttgaactgggcgcgaaagtcgcgggcagcgtgtcgaagaaaaccgatctggtgattgccggagaagcggcaggttctaaactggcgaaagcgcaggaactgggcattgaagtcatcgacgaagcggaaatgctgcgtttgctgggtagctgagatggaaaaagagcagctgattgaaatagccaatacgataatgccgtttggcaaatataaagggcgtcgcttaatcgacctgccggaggagtatctgctgtggtttgcccgcaaagatgaattcccggcagggaagctcggtgagctaatgcaaatcacgctgctgattaaaaccgaggggctgacgcaactggtccagcccctgaagcgtccgctttaagctttatcggcgctgctttcctgctgtgcctgtaactgttcggtctggcgtttgtatcgacgcgccagcaccgcacagaccatcaattggatctgatggaaaatcattaggggcagcaccatcataccgatcaccgatgtggggaacagaatgtttgccatcgggatgccatttgccagactctttttcgaaccacaaaagacgatagtaatttcatctgccttattgaagcccagtcggcgtgccataaagacgttaactacaatcacgatagccagaagaacgcagctgaccaccacgataaacagcaatgatccccagccaactttatgccagataccattaacgacggcttcgctgaacgctgtataaaccaccaacagaatggacgtctggtcagttttcgcaatccattttttattgcgcgacacccagtcaccaatccacggccgggaaagatgccccaacacaaacggcagcagcagttgcagcataattttaccgacctgctcaaggctgccccctgcaccgtgaacattcatcaccagaccaaccagcaatggtgaaaggaaaatccccagcaggctggatgctgacgcagaacaaaccgccgccgcgacgttaccgcccgccattgacgtgaaggcgattgcagactgcacggtagccgggagaatgcacaagtagagaaaaccggagtagagcatcgggtcgacatttaccggtttccaccaggcaaacagtacacccagaatcggaaacagcacgaaggtgctgcaaattacccacaaatgcagtcgccagtgaccaccgccagcaataatcgcctcacgcgacaacttcgcgccgtgcataaagaacagcagggcaatcgctgcggtggtcagattttcaaagaaggggacgaaatcgcctctggccggaaagaaagaggccagcaacaccaccgtgatcagggttaaggtgaaaggatcgaggatacgaaaaagtttcataaagactccagatgatcgatggttctattgtgcttcttccagttggagaaataaaattgatttattgcatccattcatgaagaaaacagatgaattattctttaaaacaattaaaggttttcgtcacagtagcgcaggagaaaagttttagtcgtgcaggagagcgtatcggcctgagccagtcggcagtgagtcacagtgtgaaggaactggaaaatcatactggtgttcgcctgctggacagaaccacgcgtgaagtggtgcttacagatgcagggcagcagctggctttgcgtcttgagcgactgctggatgaactgaacagcacgttgcgcgataccgggcgtatggggcaacaactgagcggaaaagttcgggtcgctgccagccagaccatttccgcgcatcttattccgcaatgcattgctgaaagccatcgccgctatccagatattcagtttgtcctgcacgatcgtccgcagcagtgggtgatggaaagtattcgccagggagatgtcgactttggcatcgtcatcgatccaggcccagtgggcgatctgcaatgtgaagcgattctttccgagcctttctttctgctttgccatcgcgatagcgctttggccgtcgaagattatgtaccctggcaggcattacagggagcgaaattggtgttgcaggattacgcgtcaggcagccgaccgctgattgacgcagcgctggcgcgcaatggtattcaggcgaatattgtgcaggagattggacatccggcgacgctgttcccgatggtagccgcaggcatcggcatcagtattcttcccgcactggcgctaccattgcctgaaggtagcccactggtggtaaagcgcattacgccggtggttgaacgccagttgatgctggtgcgcaggaagaaccgttcactttccaccgccgctgaagcgttatgggacgtggtacgagaccagggcaatgcgctaatggctgggcgggaaggggatccgttgtatcagatatagatatcgatatgagtcgttttttcaacaggatttagaagggatacattcagagacaaacactgctctttctcctgcgccttttctgcctgctgtttctgcaactgcgccagttgtgtttccagtagggtgatttgctgttgaatcaattcggcctgtttttgcttgtcttcagcactgccgctagtgtctacaatctctttaatttgttgagtgagtttgatgatttgctgacttatccgcgcgatttgtgaagcaacatcgctaccttgtgatgccctgttactactctgtgtttgtatggaaggaattgaagttgaagagatagtggccattgttcagtcctcgtcactgtacgaggtaatatcggtagaagaacaagcaacttgagaagaaaaatcaatcttacaaatcgcagatagcaaaaaagcgcctttagggcgctttttttacattggtgggtcgtgcaggattcgaacctgcgaccaattgattaaaagtcaactgctctaccaactgagctaacgacccgaagtggtgggtgatgacgggatcgaaccgccgaccccctccttgtaagggaggtgctctcccagctgagctaatcacccacttcggtacttcacatttttacaagaaatttagctggcgagaaagtggtgggtgatgacgggatcgaaccgccgaccccctccttgtaagggaggtgctctcccagctgagctaatcacccacttctcaatttcttgctacacggcggagactacataaagtagttggtgggtgatgacgggatcgaaccgccgaccccctccttgtaagggaggtgctctcccagctgagctaatcacccccgctgtgtggagtcgcattatagggagagttcaaaatgagtcaacgcattttctaaagaaattgttcgttcgtcgtaaatttaagcaagatgatcgcaaaacagaccgtgttgcgcaatttgtcaacgaaaacaataatgcgtaaggtagaaacccgaactacattgaggaatcaggcgggagtgatagaatatcgcccactcaatttttccaggatttgccggttgtcggcatctttctaaacgtaaggccatttcatgaaaatcaaaactcgcttcgcgccaagcccaacaggctatctgcacgttggcggcgcgcgtactgctctttactcctggctttttgcacgtaaccacggcggtgagttcgtgctgcgtattgaagacaccgatcttgagcgttccacgccggaagctatcgaagccattatggatggcatgaactggctgagcctggagtgggatgaaggtccgtactaccagaccaaacgttttgatcgctacaatgcggtgatcgatcagatgctggaagagggcactgcttataaatgctattgctctaaagagcgcctggaagcgctgcgcgaagagcaaatggcgaaaggtgagaagccgcgttatgacggtcgctgccgccacagccatgagcatcatgctgatgatgaaccgtgtgtcgtgcgttttgctaatccgcaggaaggttctgttgtttttgacgatcagatccgtggtccgatcgagttcagcaaccaggagctggatgatctgattatccgccgtaccgatggttccccaacctataacttctgtgtggttgtcgatgactgggatatggaaatcacccacgttatccgtggcgaagaccatatcaacaacacgccgcgccagatcaacattcttaaggccctgaaagcgccggtgccggtttacgcgcacgtttctatgatcaatggcgatgacggtaaaaaactgtccaaacgtcacggggcagtcagcgtaatgcagtatcgtgatgacggttatttgccagaagcactgctgaactatctggtgcgtctgggctggtcccacggcgatcaggaaatcttcactcgtgaagagatgatcaaatacttcactttgaatgccgtcagcaaatctgccagtgcgttcaacaccgacaagctgctgtggctgaaccatcactacattaacgcgctgccgccggagtatgttgctactcacttacagtggcacattgagcaggaaaatatcgatacccgtaacggcccgcagctggctgatctggtgaaactgctgggcgaacgctgcaagacgctgaaagagatggcacagagctgccgttatttctacgaagattttgctgagttcgatgccgatgcggcgaaaaaacatctgcgtccggtagcgcgtcagccgctggaagtggttcgtgacaaactggccgcgattactgactggaccgctgaaaacgttcatcacgctattcaggcgacggcggatgagctggaagtgggtatgggtaaagttggtatgccgctgcgtgtcgccgtaaccggtgcggggcagtctccagcactggatgttaccgttcacgcaattggtaagacccgcagtatcgagcgtatcaacaaagcgctggattttattgctgaacgcgaaaatcagcagtaattagcgtgtaaaaagataaacggcaggagataatatcctgccgttttttatttatgctgattcgtcaatatcgagacgggcgaggaaattgcgaattccttcacgtgacaaaaattgcgcgactttttcctgctcaatgtctgtcatattatctatcgcgttgatgatttgtcgatacgccggggcgcgtgctccaggagcgtattcagcaattctctcttcagcttccatcaacattggtgtgttatggaaggctggcgtgttctgaataaactcgcaaacttgcgtatcgaccagaataagtctggcacgaccgcctttcacgccgggaaatttttccgttttccagcctttttctctgatccaacggttaacagtttgtttagccacaccgaggcattcagccagttcttcggtggtcattttgttgcgtaatcttttcatattatttgctatcgcgaatccctaagcgttgtaacaatccgataatcccttcccgcagaagcaaggatgtaaactgtttttgttcaactggcgtcatctctttcgccagtgtcaccagcaatacttcaagcggcgcatcaccagaaagggcaggcgcttctccctgaccttctggacgttcagcattgcgaatatattcacgaacctgttcattgacgtgaaccagtcgggctttgccaccctggacgccaggttttggtgacgttgtccagccttccttgcgtacccatttattaatggtctggcggctatagccggtcagtctggcaagttcatctggtgtcatcctctccttgaacataacaattccctgaatgtatgtgggtctattagtagttcattttataacaccactttacaggaaaccgtgacatgaataactactgaatgcgagcggttttccaaaattgttcatttgcctgatttttcagcgattgaaactacacattgcaatttgccgttgacacattcgggcggaattcatatgatgccgcccgtcaactcgacaagctttacgtgacggggctatagctcagctgggagagcgcttgcatggcatgcaagaggtcagcggttcgatcccgcttagctccaccaaatttccaaccctcgctgcaaagcgggggttttttgtctctgctttttgccgcttttgtaatacagtctacgtccgggttagcgccgcctggtgaaagcatcattggatgaaaaatcggcaacaggctggcccctgtttgcttcgcgatgcgaataaacttattatttgtgtgcctgaaaaccccgatcagtgagagtagtgtactcatgtttgtggagcataacctgataaaaaatatcaagatattcacactagcgtttacgctcaccgtggtacttattcagctatcccgttttatttcgccacttgccattatccattccagttatatctttctggcgtggatgccactgtgcgtaatgctgtcaatcttgtttatctttggctggcgcggtgtcgttcccgttttatgcgggatgttttgcaccaatctgtggaactttcatctctcttttttacagactgcggtcatgctcggtagccagacgtttgtcgtgttgtgtgcctgcgcaatattacgctggcagctggggacgcgttggcgttatggattgaccagccgatatgtctggcaacgtctgttctggcttggtttggtgacgccgatcggcatcaaatgcagcatgtatcttgtggggagcttctttgatttcccgctaaagatatccacctttttcggcgatgcggatgcgattttcacggtcgttgatttgctaagccttttcaccgctgtgctgatttacaacatgcttttctactatctcactcgcatgattgtaagtccccactttgcgcagatattgtggcgcagggatatcgcgccgtcgttgggcaaagagaaacgcgcatttaccttaagctggctggcagcgttaagcgtgcttctacttctgttgtgcacaccttatgaaaacgactttattgccggttacctggtacccgttttcttcatcatctttaccctcggggtcggtaagcttcgctatccgtttttaaatctcacctgggctgtttcaacgctttgccttctgaattacaaccagaactttttgcaaggggtggaaaccgaatattcgctggcatttattcttgcggtgctgatttcctttagcgtttgcctgctctatatggtgcgcatttatcatcgcagtgaatggcttaatcgccgctggcatttgcaggcgctgacagatccgttaacgctcctacccaactttcgtgcgttggaacaagcgccggagcaagaggcgggcaagagtttttgctgcctgcgcattgataatcttgagtttatgagtcgtcattacggcttaatgatgcgcgttcactgtatccgctcaatttgccgtacgctgctgccgttgatgcaggaaaacgaaaagttgtatcaattaccgggtagtgaactgctgttagtgctgagcgggccggaaacggaagggcgactccagcatatggttaacatcctgaatagtcggcaaattcactggaacaataccgggctggatatgggctatggtgctgcctgggggcgttttgatggaaatcaggaaaccctgcaacccttgttggggcagttaagctggctggcggagcaatcctgcgcacatcatcatgtgctggcgctggatagcagagaggagatggtttccgggcagaccactaaacaggtgctattgctgaataccattcgcacggcgttagatcagggggatttgctgctctacgcccagccaattcgcaacaaagagggtgaaggttatgatgagatcctcgcgcgactgaaatatgacggcggcattatgaccccggataagtttctgccccttattgctcagtttaaccttagcgcgcgttttgatttgcaagtgctggaatccttgttgaagtggctggcaacacacccttgcgacaaaaaaggaccgcgcttttcagtcaatttaatgccgctcacgctgctgcaaaagaatattgccgggcggattattcgtctgtttaagcgttatcacatctccccgcaggcggtcattcttgagatcaccgaggagcaggcgttttctaacgcagaaagcagcatgtacaacatcgagcagctgcataagtttggtttccggattgcgattgatgactttggcaccggatatgccaactacgaacggttaaagcgtttgcaggctgatatcatcaaaattgatggcgtctttgtgaaagatattgtcacgaacacgctggatgcgatgattgtgagatcaattaccgatctggcgaaagcgaagtcattgagtgtggtcgcggagtttgtcgagacgcaacagcagcaggcgctattgcataagctcggggtgcaatatctgcaagggtatttgattggtcgcccgcagccattagctgattaacaggcgtaaaaaaaccggggaattatccccggcttttttatgtatggtcttacagcaccagtgctgcgattgacgcagacagcacactcaccagggtagagccgtaaaccagcttcagaccgaagcgagaaaccacgttaccttgctcttcattcaggcctttaactgcacctgcgataatcccgattgaagagaagttagcgaaggaaaccaggaacacagagatgatgccttcagcacgcggagagagcgtggaagcaattttctgcagatccatcatcgcaacgaactcgttggaaaccagtttggtcgccatgatactgcccacttgcagtgcttcactggaaggaacacccatcacccatgcaatcggatagaagatgtagcccaggatgccctggaaggagatgctgtagccaaaccagccagtaacggtggcaaacagtgcgttcagcgcggcgatcagggcgataaagccgatcagcatcgcggcaacgataatggcaactttgaaacctgccagaatgtattcacccagcatttcgaagaagctctgaccttcgtgcaggttggacatctggatgttttcttcactggcatcaacacggtaaggattgatcagcgacagcacgataaaggtgctgaacatgttcagtaccagcgcagcaacgacgtatttcggttccagcatggtcatgtatgcaccaacgatggacatcgacacggtggacattgccgtggcagccatggtgtacatacgattacgggagattttgccgaggatatctttataggcaataaagttttcagactgacccagaatcagggagctgacggcgttaaaggattccagtttgcccatgccgttgactttggagagcaggaaaccaattgcgcggatgatcaccggcaacacgcgaatgtgctggagaataccgatcagtgcagagataaagacgattgggcacagcactttcaggaagaagaatgccaggccttgatcattcatgctaccaaagacgaagttagtcccttcgttggcaaatccgagcagtttttcgaacatttcggagaagcctttcacgaagcctaaaccaacgtcggagttcaggaagaaccacgccagtaacacttcgataacaagcagttgaataacataacggatacgaatttttttgcggtcgctgcttaccagcagtgcgagaatcgcaacaacggcaagtgccagtacaaaatgaaggacgcggtccatatttgctccaaatatgaggcaggttaaatttccgtgcacattctatgtaacatggttaaggaaaacgagatctgacacacactataatgacgtcctgtgacaagcttcaaaaatagtgatctgtcatacatttctgctatgttgtgtatggaagctgaaagttatgtaaatgtgctaacattaaacataaccataacattcaagtcatcaatcttttcgtagtcataatcctggtctatcaaagaaatcaccacaacccattcaaatgaatttgataatcattctcgtttggcatagcatgaaacatagcaaaggctatgttttagaggcacaagatgacgaactatcgcgttgagagtagcagcggacgggcggcgcgcaagatgaggctcgcattaatgggacctgcgttcattgcggcgattggttatatcgatcccggtaactttgcgaccaatattcaggcgggtgccagcttcggctatcagctactgtgggttgtcgtttgggccaacctgatggcgatgctgattcagatcctctctgccaaactagggattgccaccggtaaaaatctggcggagcagattcgtgatcactatccgcgtcccgtagtgtggttctattgggttcaggcagaaattattgcgatggcaaccgacctggcggaatttattggtgcggcgatcggttttaaactcattcttggtgtttcgttgttgcagggcgcggtgctgacggggatcgcgactttcctgattttaatgctgcaacgtcgcgggcaaaaaccgctggagaaagtgattggcgggttactgttgtttgttgccgcggcttacattgtcgagttgattttctcccagcctaacctggcgcagctgggtaaaggaatggtgatcccgagtttacctacttcggaggcggtcttcctggcagcaggcgtgttaggggcgacgattatgccgcatgtgatttatttgcactcttcgctcactcagcatttacatggcggttcgcgtcaacaacgttattccgccaccaaatgggatgtggctatcgccatgacgattgccggttttgtcaatctggcgatgatggctacagctgcggcggcgttccacttttctggtcatactggtgttgccgatcttgatgaggcttatctgacgctgcaaccgctgttaagccatgctgcggcaacggtctttgggttaagtctggttgctgccggactgtcctcaacggtggtggggacactggcagggcaggtggtgatgcaggggttcattcgcttccatatcccgctgtgggtgcgtcgtacagtcaccatgctgccgtcatttattgtcattctgatgggattagatccgacacggattctggttatgagtcaggtgctgttaagttttggtatcgccctggcgctggttccactgctgattttcaccagtgacagcaagttgatgggcgatctggtgaacagcaaacgcgtaaaacagacaggctgggtgattgtagtgctggtcgtggcgctaaatatctggttgttggtggggacggcgctgggattgtagttgaatgagcgtcgcatctggcactattggcggatgcggcgtaaacgccttatccgccctacgcgttaaagagccggtttgtaggcctgataagacgcgctagcgtcgcatcaggcattgtgctccattggcgaatgtgtttaatggcggtgtccatgtccgcggccttttccgcgatgatcgtcacgatcgcgccagccttcacgatagccacgctcatacgctttacgcttatcccagccacgatgatagccattatcatgacgccaccagcggtttttacgccattcataattgcgatgccagtagtcacggtcgcgccagtgaccaccgtcccagtaattaccgtaatgatcgcgatcgccaatttgtaatttgattgatggcagtagggtgatttcacctgcgtttgctacaagcggggtaaatgccatcagggcggccgccagaaacagtgacctgaacattgttattctccttcacgatcgaagccgtcagcggcctgttaacgcaatattacggggaggtaaagccccgtatcatcgccataactcttaaatcataaaggagagcattttttgctaaacgttatcgtggggtggctgttgcttcggacgattgaccatcatcatcggcttacctgctaataacagccatgccggaagcatgacgatacagagcagcggtagcaatgtggtattgggtacaacgactgccgccataaaaagacttaaccagccatcgcgtgttaccaccagcacgatgccgagaatagcgcaagaaacggttattgccgctggtacggcgggaacgtgctcatgcagcatcaaccctaatgccacgccgacaaacactgccgggaagattcgcccaccgcgaaagccactggcggcagcaacgaccagggcggcaagtttaattaccgccagcaaaaagtaatcgctggtgctgaaagcctgatttgccaccatctgctgcatctcatccagccctttaaacagcgaaactggtccaccaataacccccagaataccgagaataaatccgccaatacccagcacgagcaccggatttttcatttgatgcatcattgagtgcaaccgtggtaagcaccatacggcgaccatccctgctgcgatggcaatcgccgcgacaattgcaccgctgagaatatcggtcatttccatctgtccgtaatgcgcaatgggcagtgaaaaatgaggatggaaaaataatccggtagtaagtgcaccagctgctgccgccattaacggcgcaaagagacgagcccatagcggaacttcactactgccatttaaggtttgcgaaaatatcaacgccgccgcaacaggtgtgccaaacagcgcgccgatggttccggcagaggctaaaatagtccactccattcggttgacgcgcggtaacagacgagcgccaatggcaaccgcaagggcgatattgacggtcatgatcggatgttctggccccaggctgacgccaccagcaagaccaagaattaatgctacgataagtcctggtagcgcagagggcggaaccggtgcgccgatcagcggttcacaggcggggtctggtccggcatgaccctggctgaaacggataaccaaccccaccgcaatacccgttagcgttaatacaccgatgatccagaggggtgaatcctgggctatccccagagttcccggcagtcgttgccagagcaaattctgtaatgccgaggcgattttcatcaccacaatcagaataagactggacgcaatcccaattgccacggcggggagcgataataacaacatggttctggctcgcggatggagcatgttctattccttatgcggggtcagatacttagtttgcccagcttgcaaaaaggcatcgctgcaattggtgctgaaacgataaagtaattgtgtgacccagatcgatatttacagggagcctgcctttccggcgttgttgttatgcccccaggtatttacagtgtgagaaagaattattttgactttagcggagcagttgaagaatgacaaagtatgcattagtcggtgatgtgggcggcaccaacgcacgtcttgctctgtgtgatattgccagtggtgaaatctcgcaggctaagacctattcagggcttgattaccccagcctcgaagcggtcattcgcgtttatcttgaagaacataaggtcgaggtgaaagacggctgtattgccatcgcttgcccaattaccggtgactgggtggcaatgaccaaccatacctgggcgttctcaattgccgaaatgaaaaagaatctcggttttagccatctggaaattattaacgattttaccgctgtatcaatggcgatcccgatgctgaaaaaagagcatctgattcagtttggtggcgcagaaccggtagaaggtaaacctattgcggtttacggtgccggaacagggcttggggttgcgcatctggtccatgtcgataagcgttgggtaagcttgccgggcgaaggcggtcacgttgattttgcgccgaatagtgaagaagaggccattatcctcgaaatattgcgtgcggaaattggtcatgtttcggcggagcgcgtgctttctggccctgggctggtgaatttgtatcgcgcaattgtgaaagctgacaaccgcctgccagaaaatctcaagccaaaagatattaccgaacgcgcgctggctgacagctgcaccgattgccgccgcgcattgtcgctgttttgcgtcattatgggccgttttggcggcaatctggcgctcaatctcgggacatttggcggcgtgtttattgcgggcggtatcgtgccgcgcttccttgagttcttcaaagcctctggtttccgtgccgcatttgaagataaagggcgctttaaagaatatgtccatgatattccggtgtatctcatcgtccatgacaatccgggtcttctcggttccggtgcacatttacgccagaccttaggtcacattctgtaaatccttcctgttatatcgggaggtaactctcccgataatcttttaaatcatacagttaattcaatttttctttgtgtcccctcacaaggccgacctgcgtcacacttccatacagcgggattaattctccagtaaatgcattatttgtctggtaacggcgatttgttttgcacgttcataatttcactcgtcaactatcactgaacgaggaattaacgatgagtaagaaactgattgccttatgtgcctgcccgatgggcctggctcacacttttatggccgctcaggcgctggaagaagcggcggtagaagccggttatgaagtgaaaattgaaacccagggcgcggacggcatccagaatcgcctgacggcgcaggatatcgccgaagcgaccatcatcatccattccgtggcagttaccccggaagataacgaacgtttcgaatcacgcgacgtttatgaaatcactttgcaggacgcaattaaaaacgctgtaggcatcatcaaagaaatcgaagagatgattgcctctgaacaacagtaatattcgacagggataattgttatggccattaaaaaacgcagtgcaaccgttgtgcctggcgcatccggtgcggcagcggcagttaagaatccgcaggcctctaaaagcagcttctggggtgaactcccgcagcatgtgatgtcagggatttcacgcatggtgccgaccttaattatgggcggtgtgatcctcgctttcagccagctgattgcttatagctggcttaaaattcctgctgagatcggcatcatggatgctcttaatagcgggaaattctccggtttcgacctctccttactgaaatttgcctggctgtcgcagtccttcggcggcgtgttgtttggctttgctattccgatgtttgccgcttttgtggcgaactctatcggcggcaaactggcgttcccggctggttttatcggcggcttgatgtctacccagccgacgcaactgctgaacttcgatcccagcactatgcaatgggcgacctcttcgccggtgccgtccaccttcattggtgcgctgattatatctatcgttgctggttaccttgtgaaatggatgaaccagaaaatccagttaccagatttcctgttagcgttcaaaaccacatttttgctaccgattctttccgccatttttgtcatgctggcgatgtactatgtcatcaccccatttggtggctggatcaacggcggtatccgtaccgtgctgactgccgcaggtgagaagggcgcgctgatgtatgcaatggggattgccgcggcgaccgcaatcgaccttggtggcccaatcaacaaagcggcaggtttcgttgccttcagctttaccaccgaccacgtattaccggttaccgcgcgttctatcgctatcgttattccgccgattggtctggggctggcgaccattatcgaccgtcgtttaaccggcaaacgcctgttcaacgctcaactttatccgcagggtaagaccgccatgttcctggcgtttatggggatcagtgagggtgcgattccgtttgcgctggaaagccccatcaccgccattccgtcgtatatggtcggcgctattgtcggctcaaccgccgctgtctggctgggcgcagtgcaatggttcccggagtccgctatctgggcatggccgctggtcactaacctgggcgtctatatggcggggatcgcgctgggggcagtcataactgcgctgatggtggtgttcctgcgtctgatgatgttccgtaaaggcaaattgttaatcgatagcctgtaagaaggaaaatccagatgacattactcgcttcgctgcgcgactggcttaaggcgcaacaactggatgcagtgcttctctcctcacggcagaacaaacagccgcatctggggatctccaccggatcaggttatgtggtgattagccgtgaaagtgcgcacattctggtggattcgcgctattacgttgaggtggaagcccgtgcgcaaggctaccagctgcatttgcttgacgcaacgaacacgcttaccactatcgtcaatcaaatcattgccgatgaacagttgcaaacgctcggttttgagggccagcaggtgagttgggaaaccgcgcaccgctggcagtctgaactcaatgcgaaactggttagcgccacgccggatgtgctgcggcaaatcaaaacgccagaggaggtggagataatccgcctcgcctgtgggattgccgatcgcggagcggagcatattcgccgctttattcaggcggggatgagcgagcgcgagatagccgctgaactggagtggtttatgcgccagcagggcgcagaaaaagcctcttttgacaccattgtcgccagcggctggcgcggggcgctgccgcacggcaaagccagcgacaagattgttgcagcgggcgagtttgtcactctcgattttggtgcgctgtatcagggctactgctctgatatgacgcgcaccttgctggtgaatggcgaaggggtgagcgccgaatctcacccgctgtttgacgtctatcagattgtcctgcaggcacagctcgcggcaatctctgcaattcgccccggcgtgcgctgccagcagattgacgacgccgcgcgccgggtcattaccgaggctggatttggcgactatttcggtcataacactggtcacgctatcggcattgaagtccatgaagatccgcgtttttcaccgcgggacaccacgacgctacagccaggcatgttgctgaccgtggagccggggatttatttgccagggcaagggggcgtgcgcatcgaagatgttgtgctggttaccccgcaaggcgcagaagtgctctacgccatgccgaaaacagtgttgctcacgggagaggcataatggatttatcgctattaaaagcgttgagcgaggcagatgcgatcgcctcctcggaacaggaagtgcggcagatcctactggaagaagcggatcgcctgcaaaaagaagtgcgatttgatggtctgggatcggtgctgatccgcctcaatgaatcgacaggtccgaaggtgatgatctgcgcccatatggacgaagtgggatttatggtgcgcagcatctcccgcgaaggcgctattgacgtgctgccggttggcaacgtgcgcatggctgcccgtcagctgcagccggtgcgcatcaccacccgtgaagagtgcaaaattccaggcctgcttgacggcgaccggcaggggaatgacgtcagcgccatgcgcgtggacattggtgcgcgctcctatgacgaagtgatgcaggcgggaattcgtccaggcgatcgcgtcacctttgatacaacttttcaggttctccctcaccagcgggtgatggggaaagcctttgatgaccgcctcggttgctatctgctggtgacgttactacgtgagctgcacgacgccgaactgcctgcggaggtgtggctggtggcaagttccagcgaagaggtgggattacgcggcgggcaaactgccacccgcgcggtgtcgccggatgtcgccattgtgcttgataccgcctgctgggcgaaaaactttgattatagcgcggctaaccatcgccagattggtaacgggccgatgctggtgttaagcgacaagtcgctgattgcgccgccaaaacttaccgcctggatcgaaaccgtggcggcagaaattggcgtgccgttgcaggcggatatgttcagcaacggcggcacggacggcggagcggtgcatttaaccggcaccggcgtgcccacggtggtgatggggccagcgacgcgccacggacattgtgcggcatcgattgccgattgccgcgacattttgcagatgcagcaacttttatctgcccttattcaacgtcttacccgtgagacggttgttcaactgacggatttcagatgatctcctgattaacccggagcggttatgttaacgattcaatttctctgtcctttgcctaacggtctgcatgctcgtccggcgtgggaacttaaagaacagtgcagccagtggcaaagtgaagtcacctttattaaccatcgccagaacgcaaaggccgatgcgaaaagttcgctggcgctgattggcaccggcaccctatttaatgacagttgcagcctgaacattagcggcagcgatgaagagcaggcgcggcgcgtgctggaagagtacatccaggtgcgctttatcgacagcgacagcgtccagcctacgcaggcagaactgacggcgcatccgctgccgcgttcattaagccgccttaacccggatttactgtacggcaatgtgctggcaagcggcgtcggcgtgggtacgctgaccctgttacaaagcgacagcctcgacagttatcgggcaatccccgccagtgtgcaagattccacccggctggagcacagcctggcaacgcttgccgagcaactgaaccagcaattgcgtgagcgtgacggcgaaagcaaaactatcctcagcgcccatttgtcgctgattcaggatgatgaatttgcaggcaatatccgtcgcctgatgacagaacagcatcagggactgggggcggcgatcatcagcaatatggagcaggtttgcgccaagctttctgcttctgccagcgattatctgcgcgaacgtgttagcgacattcgcgatattagcgaacagttgctgcatatcacctggccggaactgaagccgcgcaacaatctggtgctggaaaaaccgaccattctggtggctgaagatttaaccccaagccagtttttgagccttgatttgaaaaatcttgcgggcatgattctggagaaaaccgggcgcacctcgcataccctgattctggcccgcgcctcggcgatcccggtactgagcggcctgccgctggatgcgattgcccgttatgccgggcaaccggcggtgcttgacgcccagtgcggcgtgctggcgattaacccgaatgacgcggtgagcggttattatcaggttgcgcagacgctggcggataaacgccaaaaacaacaggcgcaggctgccgcgcagctggcctattcccgtgataacaagcgtattgatatcgcggcgaatattggcaccgctctggaagcaccaggcgcgtttgccaacggcgcggaaggcgtcgggctgttccgtaccgaaatgctgtatatggatcgtgacagcgcgccggacgagcaggagcaatttgaagcctaccagcaggtgctactggcagcgggcgacaagccgattatcttccgcacaatggacatcggaggcgataaaagcattccttatctgaatattccccaggaagagaacccgttcctcggctatcgcgcggtacgtatttacccggaatttgctggcctgttccgcactcaactacgggcgattttgcgcgctgccagttttggcaacgcccagttgatgatcccgatggttcacagcctcgatcagatcttatgggtgaagggcgagatccaaaaagcgatcgttgagcttaagcgcgatggcctgcgtcatgcagagacgattactctgggtatcatggtggaagtgccgtcggtgtgttacatcatcgaccacttctgcgatgaggtcgatttcttcagtatcggttctaacgatatgacccagtatctgtatgcggtcgatcgtaataacccgcgcgtatcgccgctgtataacccgattacgccatcgttcctgcgcatgttgcagcagattgttaccactgcgcatcagcggggcaaatgggtaggcatttgcggtgaactgggcggtgaaagccgttatctgccgctactgcttgggctgggcctggatgagctgagtatgagtagcccgcgtattccggcggtgaaaagccagcttcgtcaactggatagcgaggcgtgtcgggaactggcgcgtcaggcatgtgaatgccgcagtgcgcaggaaattgaagcgttactcaccgcctttacgccggaagaagacgttcgcccactgctggcgctggagaatatctttgttgatcaggattttagcaataaagagcaggcgatccagttcctgtgcggcaacctcggcgttaacgggcgcactgaacatccgtttgagctggaagaagatgtctggcagcgggaagagattgttaccaccggcgttggttttggcgtagcgatcccgcacaccaaatctcagtggatccgtcattccagtatcagcattgcccggctggcgaaaccgattgactggcagtcagaaatgggcgaagtcgaactggtgatcatgctgacgctgggtgctaacgaagggatgaatcatgtgaaagtcttctcgcagctggcgcgtaaactggtgaataaaaacttccgccagtcgttgtttgccgcgcaagatgcacaaagtatcctgacgctgctggaaacagaattaaccttctgacgttagccctgaaaacgggcgctgtactctcccggcgtcagaccaaactgacgccggaaaacgcgacaaaaatagtcgctatccggaaaaccgcaacgctgtgccacttcatgaattgacagatgatatttctgcaaaatcatcctcgccttcgccattcgcacccaacgcacatactcgataaaacgcatcgttccatgctgagcaaacagttttgacagatgattgggcgtgatattaaaaaactgcgccacgctctcgcgggtgagcggctgggcataattatcctgaacccagttacaaatgctgtgatagagaaaatcgccgcgcggttgcgaattacccggcggcatattcaccacgttgcggcaaagatgcagcaaacttaacaccagtggctgaatgatattctgctccagcggcgaacggctaagatgggtgagggcggtaagcatcgcttcaccttcaccgcgttgcaggctgggaagctggatctggcgagcaggatgcaacaacgacgtggtgcggctatcgtaaaacgataacccaagccaggtcggtgcgaacaccaggcttaacagcatcaccggtttgttgttgatcggtaaattagccgcgcgtgccggaataaacagcatttctccttccaccattcgctgctgctttgcttccagcaggttgccgtattcgccgcgcagcacgatatccagacggggaaaatcaatacataaactgcccaccggtaacgaggcaggctggctggcaaaccagacgcgccccagtagttgcgggttaagcaccaggccgctgaacagatcggcgaaaaattgttgatcggcgggcaagcctggtgctttcatgaaagttcccgattaaagatgcattaactggcgaaattctttcactttgctgcgactgaccggcacttcaaaatccagatctttcagtcgcagaatgtaggtgttattaaaccacggttcgatttcgcgtattttgttcagattgacacaaaatgagcgatggcagcggaaaaaatgcgacggcggcagtttgctgcaaaattcggtaatgttcatcggcattacgtaggattcacgccgcgtatagacaaaggtcattttctcgtgcgcttcggcgtaatagatatcgttaattggcgtgacgattattcgctcatctttcaccagattaatggtgtcattctcacgcgttaccgtcgcggcaggcgtactgctggtctgctgttgttgccaggccgcttccagtttttgcagcatcccggtaatacgtgactcctgatacggtttgagaatgtagtcaaacgcctccagttcaaacgcttctaccgcatgttctttccacgcggtgatgaacacaataaacggtttatgggcgaactggctgatgttttgcgccagcaacacgccatccagcgacggaatattgatatccagaaaaatggcgtcgacgcggttatgctgcaaaaacttcaacacgtccagaccgtcgtcaaaggtgccgacaatctccatctggctgtgctctttaattagccagctcagttcctgttgtgccaggaattcgtcttcaacaatgatgactttcacaatatcactccggctcaaagcaataacgtagcctgtgaggcgactggggtgcgttggttaggaatgtaaaacgcaatttccgtccccggctccaggcggcggatatgcagcccctcgccatacaataacttcacgcgatgatggacattcagcaggccaattttattgcccggcatttcattcgcttcgacccgctcaatcacctttggatcgatgccgtgcccggtatctcgcaccgcaatgcgtacccgatttccgcactctgcaacgctgatggtgacaacgcctttacctttgcaaggctgaataccgtggacaatggcgttctccaccaacggctggatcagcaggctgggaatgcagcaattcacctcttcatcaatatcatagataaccgtcagcttgtcaccaaagcgggcctgctcaatggcaatatagtctttaatttgatacagctcttttttgatatcgatttgctcatcgtcttttaattcaatgttatagcgcagataacgcgacagattaaagatcagctggcgagcagtatccggattcagacggattgatgatgaaatagcgttcaaagcgttaaacaggaaatggggattaattttgctttgcagggcgcgaagctctgccttatttgccatttcacgtagctgctcggcgcgtgaaacctccagttgggtggagatgatttgcgacagaccgaccgccatttcctgtaatgacgaggtgatctgatgcgcgtggcagtagtaaattttcagcgttccggtcacaacgcctttctcccacaatgggatcaccagcatggaatgaatctctggtgtgcggtgggcttcatcattgtttttaatgatgatttttccgtaattcatcgcctgacgggtagtcgggctaatgaagtcatcgccattctgatagttatgttcacccacgccaacataggccagcacatgatcggtattggtaatcgccaccgcatcggcgtgaatgtcatcgcgaataatttcacaaactttgcgtaatgactcgctattgacatggcgaaacagaggtagcgttttgttggcgatatccagcgccagcttggcctgccgcgcggcgctggcctctttttcgccctcaacgctttgcaccagaagcacaataaagccgatacagacgctaccgaggatcattggaatgccgattttagagacgatatcgatccccaacgcggtagttggtgcccagacaattaccagaatcatggtcaacgtctcacacaacatgccgccgagaataccgacgcgccagcgctgtgctttggggattttcaggtttatccagcctgatatacaacccgccagaatgctggtgataaagcaggggatcgccgtcacgccgccgatatcaattaaataccggtgaatacccgcaatcacgccggtaatgatgcctacccacgggccaaacagaatcccgccggacatcaccgcgataatacgtacgttcaccagcgagccttctacgggaacgccggaccaggtgctgaacagggcgaacagcgagaaaatggcggtaacggcgagcaattcttttggggagtgcgccgacttgtgcaacagttcgcgaaacaggcggatacggatgagaaagaacaggcagataagcattaacgctgcccgatcgaagaccgccagcagcatgttgaatatttcgtgcacgggtgactctgaataaggattaaacctctatgataggtaacctgaaggctgatgaccagcaggccgtttttgaggaaaaaccataaatttaaaaggggattgaaagataaatggtgtattagcaatgtatctcttgataatgcacttctggctggtaaatttattgaaattataatgttaataaaattggtggtaattttcttgttagcgtagaaaaatttcctgtttttgaagtggagttcctcatttaaagccattgataaaaatgttctaaaacgctggacagacagaaattaatcaggctattttcaaaacagccaccattgtggcagcgtcgctcggacggtccgggcgctaacgttaatctgaggaaattatggctgacactcgccctgaacgtcgctttacgcgcattgatcgtctcccgccctacgtttttaacatcaccgctgaactgaaaatggctgcgcgtcggcgcggcgaagatattatcgatttcagcatgggtaacccggacggtgcgactccgccgcatatcgtcgaaaaattatgtactgtggcccagcgcccggacacgcatggttactccacttcacgcggcattccgcggttacgtcgcgccatttcccgctggtatcaggatcgctacgacgttgaaatcgacccggaatcagaagccatcgtcactattggttcgaaagagggcctggcgcatctgatgctggcgacgctggatcatggtgacacggtgctggtgccgaatccaagttacccgatccatatttatggcgcggtgattgccggggcgcaggtacgctcagtgccgctggtggaaggtgtcgatttcttcaacgaactggagcgcgccattcgtgaaagttatccgaaaccgaagatgatgatcctcggcttcccgtcgaatccaaccgcgcaatgcgtggagctggagttcttcgaaaaggttgtggcgctggcgaaacgctacgatgtgctggtggtccacgacctggcctatgccgatatcgtctacgatggctggaaagcgccgtcaatcatgcaggtaccgggtgcacgcgatgtggcagtcgagttctttacgctgtcgaaaagctacaacatggcgggctggcgtatcggctttatggttggcaacaaaacgctggtcagcgccctggctcgtattaaaagctatcacgattacggcacctttacgccgttgcaggtggcggcgattgcggcgctggagggcgatcaacagtgcgtgcgcgacattgccgaacagtacaaacgccgccgtgatgtattggttaaagggctgcatgaagcgggctggatggttgaaatgccgaaggcttcgatgtatgtctgggcgaaaatcccggaaccatatgcggccatgggatcgctggaatttgccaagaagctccttaacgaagcgaaggtttgtgtctcgccggggattggctttggcgactatggtgatacgcatgttcgctttgcactgattgaaaaccgcgaccgtattcgtcaggcgattcgtgggattaaagcgatgttccgtgccgacggtttactacccgccagcagcaaacatattcacgaaaacgcggaataaacaccgtcgtcagaaatgcaaacaggagcctgatggctcctgtttttcattgcacagtttgcttttagatcatcagggcaaaagtaccggcccaaacgatgaccataaaagaaatgcccataaagaaatatttcactttacatctctccgcgtaattactgttacgcctgaatgacttcattacacctgatacagtgagttgacaccgggcaaagcgaccttaaaagccctgtattttaccgtgggcatcaccccagaattctgagctaaactgctcgagacggcgctaatgtacgcctaaaactgaaacgagacaagaggcattttcttatttacttttagtaacttacaagtgtctcatatcggcgacagtttaatttctgacggtaataattagatattcagcgaaggaaaaaaccttaagaaaaaagccataaaaaccatgaggttattatggccgatttgaggagggaaagagtaagagcagtttgttaaatgtacaacgacgattctcccaccgggcgcgttttaaagcgacggtggatccagaggtactgctccggtgcgcgcatgatctctttctcgataatcttgttcatataggcagcggcttgattttcatctgtcgggtagccttccatctctggggtgatgaacaaacgatatccgctgtaatccgcttttcttaccatcgttacggtcaacatggctgcgccagagagacgggagagaacataggtgccattggttgtggcgacattttccaccgcaaagaacggcgcgaaggagctgcctttacgaccataatcctgatcgggagcaaaccataccgcttcacctttcttcagtgcaccgacaatgccgcgcagattatttctgccgatcatcgctttgttagagcgcatgcgcccacgggtctgcacccattccatcagctgattattatgtggacgataggtagccatcattggttggcacagtcccatcacgcggccgcccagttccagcgacataaaatggacgccgacaaccattacgccgcgattttgcatttgtgcgcgtttaaggttatccaacccttcaacatcaaaccatttacgtacgcgactgtcgggccagaaccatgccatgccggtttctaccagcgccatgccgagtgaacgaaagttttcggcaatcatcttctcgcgttcttccgcagaatgctgcgggaaacaaagttccaggtttttacgggcgatagattcacgacgtttcaggaatggtcgcgccattgcgccaatacgcgtgccgagaaagcagagaacaggataaggaagctgtacccaaagccagagtacaccaagcccaaaccatgtgagccagtagcgaggatgtagaaactcgcgggaaaatttgcattgtggaaacatagttaccttctgtagatacgaattgttgtatcgcagaagattccatgtcgacagcggtacactcaattggttgggccatcatgtacgacaatggttcctgtaaagagtgtaaagactagtcaggacataaccacgaggagcatgaatgcggtatctgtactttatcactcgctgactgctttcagctactgattattaatcgtgcaaagtaaatatttttccgtacacaacagtcttgcatttaacatgctgttttcattgatgcttagcaaaaattgccagaggttaaggattgtcttactattaaagtgactgaagttacaggttttttagcgcggcaggaggttgagctatgatttatttatggatgtttctcgccctgtgtattgtctgcgtaagcggctacatcggtcaggtactgaacgtggtatcggcggtctcttctttcttcggcatggtgatcctcgctgcactcatttattacttcaccatgtggttaactggcggtaatgaactagtgacggggatatttatgtttcttgccccggcttgtggcttgatgattcgctttatggtggggtatggcaggcgatagtgggtcaggatggctcatttgggcaggtgttcacatcagcatcagacatgattgttcacctgccatgtgacagacgctatcgcacaggatgaataagataattcgcctttgtcggataagtaggcgtgatttcttctgtgaggtttaatggtggcgcatcttctctcatcttaaacaaaatcgcctgtgatggctgaagttttgtagagtgtgtggtcgtcatcgctgatgttttttcagtctctttatagctcctctcacttacaccaccagaaatggaaaatgcaaaaacattgcatgccataatagagaccaataaaaataagctgaaaagtattaagtttactttcatagaaagttatcctgaaaatggttcactgagaacctacgatgttatggctgtatttacatataattaatcaatatttacatcgatataataaatgacatctctttgtggtacataagaatagttctctgcgacaggaagcagattcctacaattgtaagactaaaatacttcttgcgataataactacaactgtaagataaccctttcaaaatgaccgttgctctctgatttctcatttcatgctcacccaatatgatggcggcgttttctaaaactgttaaagaatgaggtaagtatgaaacgtttaattatggctacgatggtcacagcaattctggcatcttcaactgtatgggctgctgataatgcaccggtagcggcacaacagcaaactcagcaagttcagcaaacccagaaaacggcagcagcagagcgtatctctgaacaaggtttatatgcgatgcgtgacgtgcaggtagcgcgcctggctctgtttcatggcgatccagaaaaggcaaaagaactgaccaatgaagcttccgctttgctgtcagatgacagtaccgaatgggcaaagttcgctaagccaggtaaaaagaccaatctcaataatgaccaatatattgtcattaatgcatctgtcggaatttctgagagttatgtagcaactcccgaaaaagaagccgcgataaaaattgccaatgaaaaaatggcgaaaggggataaaaagggcgcaatggaagaacttcgcctggccggtgttggcgtaatggaaaaccaatatctgatgccgcttaaacagactcgtaatgcacttgctgatgcgcagaaactgcttgataaaaagcaatactacgaggcaaacctggcgcttaaaggtgcggaagatggaatcatcgtcgacagcgaagcactgtttgtgaactaatgctgacaggcagtatattgaggtaaaggatttaactccctccagccgacaattttttatgaccacaatacgacaggttgtggtcataaaattatttggcgctcgcgattctataaacacgcattttatcttcctcaaagtaaatcccaataatcccgtgtcatcacaaatcatttattatgttatgttttatggtacgctttaaaaagcggaatcatacccttacttgtaaatcaccggcgcttcttacagttgtaagaataacatcacaaatgtcgcgactctctctgattaccacgaatcaatatttatcatattcttcttttcgtcctcactacttaccatgcagaaaggaattggaagtggcgatgaaatgattttcagcacttgatacaggattttaaaaatatcgagtgcagctacgacgatattttgcgggttatttatagaagatattacgccttaaataaacgctaaattaacacatatttaattaactaataggtattgctatgtcaactccacttcaaggaattaaagttctcgatttcaccggtgtgcaatctggcccatcttgtactcaaatgctggcctggtttggcgctgacgttattaaaattgaacgtcccggcgttggtgacgtaacgcgtcaccagctgcgagatattcctgatatcgatgcgctttacttcaccatgcttaacagtaacaaacgttctattgagttaaataccaaaacagcggaaggcaaagaggtaatggaaaagctgatccgcgaagctgatatcttagtcgagaactttcatccaggggccattgatcacatgggcttcacctgggagcatattcaagaaatcaatccacgtctgatttttggttcgatcaaagggtttgatgagtgttcgccttatgtgaatgtaaaagcctatgaaaacgttgctcaggcagcgggtggcgcggcatccactacgggtttttgggatggtccgccgctggtaagcgctgcagcgttgggtgacagcaacaccggaatgcatttgctgatcggtttacttgctgctttgctgcatcgcgaaaaaacggggcgtgggcaacgagtcaccatgtcaatgcaggatgccgtattgaacctttgccgcgtgaaattacgtgaccagcagcgtctcgataaattgggttatctggaagaatacccgcagtatccgaatggtacatttggtgatgcagttccccgcggtggtaatgcaggtggtggcggtcagcctggctggatcctgaaatgtaaaggctgggaaaccgatcctaacgcctatatttatttcactattcaggagcaaaactgggaaaacacctgtaaagccatcggcaaaccagaatggattaccgatccggcatacagtacagcccatgcccgacagccacatattttcgatatttttgctgaaatcgaaaaatacactgtcactattgataaacatgaagcggtggcctatttgactcagtttgatattccttgtgcaccggttttaagtatgaaagaaatttcacttgatccctctttgcgccaaagtggcagtgttgttgaagtggaacaaccgttgcgtggaaaatatctgaccgttggttgtccaatgaaattctctgcctttacgccggatattaaagctgcgccgctattaggtgaacataccgctgctgtattgcaggagctgggttatagcgacgatgaaattgctgcaatgaagcaaaaccacgccatctgatattaacgggggcttctggctcccaatttataaaaatttcgaggttattaatcatgtcagatcaacttcaaatgacagatggtatgcatatcatcgttgaagcattaaaacagaataatattgacactatttatggtgttgtaggtattcctgtgacggatatggcacgccatgcccaggcggaaggcattcgttatattggttttcgtcatgagcagtcggcaggctatgccgctgcggcaagcggttttcttacccaaaaaccggggatctgcctgacagtttctgcgccaggattcctcaatggtttgaccgcattggccaacgcaacggtaaatggttttccgatgatcatgattagcggctccagcgaccgcgcgatcgtcgacctacagcaaggtgattatgaagagctggaccaaatgaatgcggcaaaaccgtatgccaaagcagcatttcgcgttaatcagccgcaggatcttggcattgcattggcacgcgctatccgggtctctgtatcgggtcgccctggcggagtttatcttgatttgccagcaaatgtcctggccgcgacgatggaaaaagacgaagcgttaaccacgattgttaaagttgaaaatccatcgccagcattattgccatgcccgaagtcagtcactagcgcaatttcgcttttagcaaaagctgaacggccattaattatccttggcaaaggcgcggcgtattcacaagctgatgaacagcttcgtgaatttattgaaagtactcagattccattcctgccaatgtctatggcgaaagggatccttgaagatacgcatccactttctgcggcagctgcgcgttcgtttgccctggcaaatgctgacgttgtcatgcttgttggtgcacgactgaattggttattggcacacggtaaaaaaggatgggcggcagatacacagtttattcaactggatattgaaccgcaggaaattgacagcaaccgccccattgctgtgccagtcgttggtgatattgcatccagtatgcaaggtatgctggcagaactgaaacaaaacacatttacgactccactggtatggcgcgatattttaaatatccacaagcagcaaaatgcacaaaaaatgcatgaaaaattaagtacagatactcaaccattaaattactttaatgcattaagtgctgtgcgcgacgtattgcgcgagaaccaggatatttatttagttaatgaaggtgcaaataccctggataatgcacgaaatattattgatatgtataaaccacgtcgtcgtctggattgtggtacctggggtgtcatgggcatcggtatgggctatgccatcggtgctagcgtgacttctggttctccggttgtcgccattgaaggtgatagtgcttttggtttcagtgggatggaaattgaaacgatttgtcgatataacctgccggtgacgatcgttatttttaataatggcggcatctacagaggagacggtgttgatctcagtggcgctggtgcaccatcaccaacggatctgttgcaccatgcaaggtatgacaaattaatggatgcgtttcgtggcgttggctataacgtcaccacgacagatgaacttcgtcatgctttaaccaccggtattcagtcgcgcaaaccgaccattattaatgtggtcatcgaccctgcagcaggaactgaaagtggccatattaccaaacttaacccaaaacaagtcgctggtaattaaatactgacatcgtctcctcttgccaactcattatgcgatggtgaggggacccttatcggaaatactattatgctaacattttttattggcgatttattgcctattatcgtaatcatgctgttgggttattttagcggcagacgagaaactttttcagaagatcaagcccgcgcatttaataaactggtattaaactacgctcttcctgcggctctatttgtttctattacccgggcaaacagggaaatgatttttgcggacactcgtctgacccttgtatcacttgtggttattgtcggatgtttctttttctcctggtttggttgctacaaattttttaaacgtacccatgcagaagcagctgtatgtgcattaattgcgggttcacctaccattggattcctggggtttgcagttctcgatcctatttatggtgattccgtatcaacaggtttagtggtagcaattatttctattattgttaacgcaattactattcctattggtctgtatttgctgaatccttcctcaggagcggatggtaagaagaatagtaatctgagcgcattaatttctgcggcaaaggagccagtagtatgggcacctgttctggcaacgatcctggtgttggttggggtaaaaattccggcagcatgggacccaacctttaatctgattgcgaaggctaactcaggggtagcggtattcgctgcggggttgactctggctgcacataaattcgagttcagtgccgaaattgcttataacaccttcctgaagctgattctgatgccactggcactgcttctcgttggtatggcatgtcatttgaacagcgaacatctgcagatgatggtactggcaggcgcattaccgccggcattctccggaatcattattgccagccggtttaatgtctacacccgtactggtacagcgtcattggctgtgagcgtactgggctttgtcgtcacggctcccttgtggatttatgtcagtcgactggtttcataattaatcatgttattgattttacataaatgccgaagtgtcttttcaccttcggcttttttcaaggcataagcaaatgacaaataatgaaagcaaagggccgtttgaaggcttattagttatcgatatgacacatgtccttaatggacctttcggaactcaacttctttgtaatatgggcgcaagggtaattaaagttgagccgccgggtcatggtgatgatacccgcacatttggtccctatgtggatggacagtcactctattacagttttattaatcatggcaaagagagtgtggttcttgatttaaagaatgatcacgataaaagtatatttataaatatgctcaaacaagctgatgtattagctgagaattttcgcccaggtacaatggaaaaactggggttttcatgggaaacgcttcaagaaatcaacccgcgcctcatatatgcttcatcgtcaggtttcggacataccggtccgctaaaagatgctcctgcctacgataccatcattcaggcaatgagcgggataatgatggaaacaggatatcctgatgctccgccagtgcgcgttggtacatctcttgcggatctatgcggcggtgtctatttattcagcggaatagtgagtgcactttatggccgcgaaaagagccagagaggggcgcatgtcgatatagcgatgtttgatgccacgctgagttttctggagcatggtctgatggcatatatcgcgacagggaagtcaccacaacgtctgggaaatcgccatccctacatggcaccttttgatgttttcaatactcaggataagccgattacgatttgttgtggtaatgacaagcttttttctgcgttatgccaggcactggagcttacggaactggttaatgatccccgatttagcagcaatattttacgcgtacaaaaccaggctattcttaaacaatatattgagcggacgttaaaaacgcaggcagctgaagtttggttagccagaatacatgaagttggtgtacccgtcgcgccgttattaagtgtggctgaggccattaaattgccacaaactcaggcgagaaatatgttgattgaagccgggggaataatgatgccgggtaatccgataaaaatcagcggctgcgcggacccgcatgttatgccgggagcggcaacgctcgaccagcatggggaacaaattcgccaggagttctcatcataaatgtaagatgtgctggtaaatagctcccacatttgaacattgtgggagccgctatttagtcatttttctgacagaaaacagcaatctcctggtccagctctgcaatgtgttcttttacagagttcagcaactgaagaatttcaggcttactgtcatctgaaacaggtgttatttctaactgatggctaatattaatcaacttttgcaaattcaggatgttagccgcaccgtggatgcgatgaatacactgatggaaagttctgttatcgccagcttctagtgcttgaaacgcagcgggtagatctttatgcgtttcatgctggaaagtcatgagaatctcctgcatcagttgtagatcgttcgccgtattatttttcagggcttcgatatcaaggtggcgatactgaggtgcaatatgcgcaacctggtgtaactgacttaaatgtgttttcagtacatccagggtcaacggtttgaacaaacataagttcatgccgcaacttaaccctttttcacgttcgttagcctgtgcgttggctgtaagcccccagatgggtaaggaagaattttgctcacggagtttgcgagtcaactcaaaaccatccatattcggcatattaacgtcagtaataagcagatcataatgttgcatactgactttgtgtagcgcttgcacaccatcagtggcttcatcaacatcatatcctaatagatttagctggcgtttgagtaatagcctgttggtcggatgatcatccgcgattaatatgctcaacttttcaggtagtgtgatggggtgttctgcttttgcctcgacagtcgccacttgctggctaatttctaccgggattgtgatcgtaaatgttgttcctatgcctggatgactttctaatgacaaatcgccctgcatatttttaattaattctttgcagatcattaagcctaagccagatcctgtttgctggcgacctgcacttgtttggctgtagcgtttaaagagttgttgttgttcttcctgcgataatccacttccagaatccataatcgtcattttgataacagcgtggttgtcatcaatgtgaaccagggaggtcgtaatttttactgccccctcggtggtaaatttgagagcattgctcagtaaatttgataagacctgcttaaacgcctgaggatcgatcttaaccaggtaatgatcaggaaatgtactgctgcaacttaatgcgatggatttgcttgcagcaatcgcaccgaaagagtgacaagtgttctggactaaagtagggatatcgacccattgtggttgaagttgatagttacccgattcaattttgtcgacatcaaggatttcaccaattaagccgaggagtgattgtccggtggcgtaggcaagtgaaatcgcctccacccgttgctccttgctaagaccagaacccgacagaagttccaggaagcccataatagagcttattggtgttcttatttcgtgactcatcgttgccagaaattgactttttgctacggtagcctttatcgctttatttttttctacctcgagtgcattaattagatcacgcgtttcagtaatatcttgccaaccacaaatatatactgcattgtcacttgcaggaagattgcataatgtatgccagtgattaatgcatcttttctcgatgccattatcaatttcaaatacctgtgtgtatattgttcgattttctttcgtttctgctgtgacttcatgcgcattagaaaaaacatctttaaagggtgagtcactgttttctaatggtaacattgcatttttgtagtaatccgcagtgaaataatgttcaaaagcactattatgactaatgacattaccttgccagtttacaacataagttggattcggtaaggaatccgagagtgcttttcggaatgatatttggttttctaaatcaccctgaatgactttacgacgacgaactgagcgtaacaggtagaatccccataaaaggctactgccaactaataaaacggataatgtcgtaacaatataaaattgctcgctatataggtcccatgtgtcaatggtcacattgggcattttaatccatttttccgtcaggcgcagaacttcgcttgggggaattgcattcagtgctttattaataatatccttaagttccggttctccgcgaggaaaagcgaacgaaagcgatgcattcggaacgccaggaataagaaaatgataaagttcattaggatagtaatgatcgatcatgtaacgcgaatttaactgtgtcgcgaccagagcatcaagttcaccttccttaaccttgtgaaatgcagcgctggcattatcgacctgtatccattcaacctccggatacatctcttttaattgcgaatgcagctcataataatatggaatggcaactttcattcctttttttaatgtttgttcactgtcaggcgctttttgcatgacaaaaacgtaaggcgttgttatgaaggcttcagcaaataaaacattattttctcgatcttcactataaatagcgccaggtattatatcccatcctccggggctaagctgtgttccagcatggatattgtgtgaaacggtgatcggagaaaaatttaaacctgtttgcaaggtaataatattaagaatgtcccccataacgccccgaaccgagccattttcatccgtcatagaataggggggcgagtaaggattttccagcacctttaaattgggatgctgcttaatccactgtttttcatgttcagtgagttctaatggtttgttcagaaaggccaggtttcctgtatcaagccaattttgtgatacttcatagcgaacttcatttgttaaagcatcaacaaatctattgagtacttcattaagaatgacagattcttttctggtcaagaaaaaattatattgacgcggcgagttataatatttcactacatttaaggagtgagtgaaatagcgggaaatcatactgctggtaatgatgttactaccaataaagtaatcattgtgcccagctgagacggatgctaatgcctgatataaatttgtaaaagagataattgttgcttttggaaatgattgatgaattacctcgtctggggggtaatttgctacccgagcaatatttactggttttggtgaggtaagcggtcgcattgagtcgtgaagggtggttaccagcgccggaaaggtaattatcaatggtttggttgcagcaatgtcattattaagaggcggcgaagtaactaaatgtgataacactatatcgacttcaccttcttccagcgcgtccattgctttttgatgatctgcgtattcccggagtgttaatttgatatttaacgctctttttaaaagatttaaataatcagcattaataccacgaacctgttgctgcgaatcggtatgcaacaaggtagccgtttgggacttgtgtactgcaatcacaagattttttttgctcgctaaccaacgtaattccttgttgctcagacgtactggatcaagtgtgacacggttgttactactgatgccacgatattcgatgtaatcttcgtctgcgaaacttatggtcgaccaaagaccacaacagagaagaaaaaaatagggtaaaaacttcatgtgattagccgattttgttacgttgcgcgaatgtgtaaagatccatcagtgatttacattctaatttttccatcaggcgacttttataagtgctgacagttttgttgctgatgaacattttttcagcaatgtcattattatccttgccatcaagaatataccgcatgacactaatttcttgtttcgataaggagtcgagtttttgctggtcggacgttaaacttccaacaaaccggttgagagagaaggggaaatagcagtagccattttttgcagcttcaatagccgcaatgatattgttcatgccttcttttttactcacgaatccattagcgccagcatcagcacaatgtttcccgtaaaaatggtcatttttagcggagacaataataataattccgctatattggcgcttcctcagcgtttctaacacctggataccgttaactccggggatatcgacatcaatgatgacgatatcaggcttaagtgtttccacccgctgaacggcgcttcccccttcagtcaactccgctaagatttcaatatcgtttttgatcaataaattacgaattgctgcgatagcaagaggatggtcatcaataattattgcgttcatagattattccctttgcaatgaagcatctcccttctccctgtagtaatacagacataaggcgtcatctcattttctcaataaaaataagaaaatctgagcttcctttaagataattcgacaagtataccatataaatagtcggcataaatgaaatgtcaacaataaaatcagggattgtaccgatgatttatagtttcaagttggcactataagtcttcttactaatcctacaggcgtaagaattgtattgcaaaagccacggtttagtcctctgttgttttttttgcacctcatttaaattaggcctccaacgttcctgggataatgtgcaacacatgcactgtgtttgatatgaagaatgaatgctcttttcattcaattcataaatttcatctatgagaaatgagagataatagtggaacagattaattcaaataaaaaacattctaacagaagaaaatacttttctttattggcggtagttttatttattgcgttttcaggtgcctatgcctattggtcaatggaattagaagacatgattagtacagatgacgcctatgtcacggggaatgcagatccaatttctgcacaagtctcaggtagtgtcactgtcgttaatcataaagatacgaactacgttcgacaaggtgacattttagtttcactggataaaactgatgccactatcgcactcaataaagctaaaaataatctggcaaatattgttcggcaaacgaataaactatacttacaggataaacaatacagtgccgaagtcgcttcagcacgtattcagtatcaacaatctttagaagattataaccgtcgagtgccgttagcgaagcagggggttatttcaaaagaaacgctggagcataccaaagatacgttaataagtagcaaagcggcattgaatgccgctatccaggcttataaagcgaataaagctttaataatgaacacaccattaaaccgtcagccacaagtcgttgaagcggcggatgcaactaaagaagcctggttggcgcttaaacgtacggatattaagagtccggttaccggctatattgcccagagaagtgttcaggtcggcgaaacagtgagccccggacaatcgttaatggctgtcgtaccggcacgtcaaatgtgggttaatgccaactttaaagaaacacaactcacggatgtacggattggtcaatcggtcaatattatcagcgatctttatggtgaaaatgttgtgtttcatggtcgggtgacagggatcaatatgggaaccggcaatgcgttctccttattacctgcacaaaatgcgacagggaactggatcaaaatcgttcagcgtgtaccggttgaagtttctcttgatccaaaagaactcatggaacatcccttgcgtattggtttatcgatgacagcaactattgatacgaagaacgaagacattgccgagatgcctgagctggcttcaaccgtgacctccatgccggcttataccagtaaggctttagttatcgataccagtccgatagaaaaagaaattagcaacattatttcgcataatggacaactttaatggcaatcactaaatcaactccggcaccattaaccggtgggacgttatggtgcgtcactattgcattgtcattagcgacgtttatgcaaatgttggattccactatttctaacgtcgcaataccgacaatatctggctttctgggagcatcaacagacgaaggcacctgggttatcacctcgtttggcgtagcaaatgccattgcgatccctgttaccggcaggctggcacaaagaataggcgaattaaggttatttttactttcagtcacttttttttcgctgtcttccttaatgtgtagtttatcgaccaatcttgatgtgctgatattttttagagtcgttcagggattaatggcggggccgttaattccactgtcacagagtttattattaaggaattatccaccagaaaaaagaacatttgctctggcattatggtcaatgaccgtgattatcgctccgatatgtgggccgatattgggcggttatatttgcgataactttagctggggttggatatttttaatcaatgtccctatggggattatcgtcctgacattatgcttaaccttacttaaaggaagagaaactgaaacttcaccggtcaaaatgaatctaccaggactgaccctgttagtgctcggtgttggtggcttgcaaattatgcttgataaagggcgcgatctggattggttcaactcgagtacaataataatattaacagtagtatcagttatttctctgatctctttagtcatttgggagtcgacctcagagaacccgattcttgatctcagtttgtttaagtcccgtaacttcaccattggtattgtgagtatcacatgcgcgtatttattttactctggagcgatcgtccttatgccgcagttactccaggaaacgatggggtataatgcgatatgggccggacttgcttatgcgcccatcggcatcatgccactattaatttcacctttgataggacgttatggcaacaaaatagacatgcggttgttagtgacatttagttttttgatgtatgcggtttgctattactggcgttctgtgacatttatgccaacgattgattttacaggcatcattttgccacagtttttccagggattcgccgttgcctgtttctttttacccttaacaacgatttcgttttcaggcttgccagataataaatttgccaatgcctcgagtatgagtaatttttttcgtaccttgtcaggatcagttggtacgtcgttgacaatgacgctgtggggacgacgcgaatcgttacaccatagtcagttgacagcaaccatcgatcaatttaaccccgtgtttaattcatcgtcacaaattatggataaatactatggttcgctttcaggagttcttaatgaaattaataatgaaataacccagcagtcactttctatttctgcaaatgagattttccgtatggcggctattgcttttatcttacttacggttttggtttggtttgcgaaaccgccgtttacagcgaaaggcgttgggtgatgataaaaggagggggttatagtgggtaagagcggggatcttaagtctgcgccatcggcagcatcgctcacccagggaaaggattgcgatgctgcgttgaaacgttattaacggccttttgccagatattgattcatctcttcttccggcaccattccacctcccgtcgcccacaccagatgagtggcattacgcaattgttctgcgctgaaaccgtgcatctgttggtaacttactgatgcacacacgcgctgaggtccggccatacccgccagtgctgaaggttcaagacgaataccttcttcctgcgccagccagccaagcatgtcatacatggtttgatcgctaagggtatagaagccatccagcagacgctccattgcccgcccgacaaagcctgatgcgcgaccaactgcaaggccatccgctgcggtaaggttgtcgataccaatatcctgaacagaaatctgatcgtgtaatcctgtatggacgcctaacaacatacaaggggagtgcgttggttcggcaaaaaagcagtgaacatgatcgccaaacgccagtttaagtccgaatgcgacgccaccaggaccaccgccaacaccacacggcagatagacaaacagagggttatcagcatcgacgatacgaccttgctgggcaaattgcgctttaagacgctggccagcgacggaatacccaaggaacaacgtgcgggaattttcgtcatcaataaagaaacagttcgggtcagactgcgctgctttacgtccttcctcgacggcaacaccataatcttgctcatattccacgaccgtaacgccatggctgcgcagtttcgcttttttccatgcccgggcatcagcagacatatgaactgtcaccttaaagccaatgcgggcgctcataatgccgattgataaccccagatttccggttgagcccacagcaatgctgtattggctaaagaactgtttaaactccggagaaagcagtttgctgtagtcatcatcaagcgtcagcaaccccgcttccagagccagtttttctgcatgtgccaggacttcataaatcccgccgcgtgcttttatagagccggaaatgggcaaatggctatcttttttcagtaacagttgcccgctgatcggttgctgatattctttttccagccgtttttgcatagctggaatggcaaccagttctgattcaataatccccccagtggcagcagtttcaggaaatgcttttgccagatagggtgcaaaacgggataagcgcgcatgggcgtcctgaacatcctgttcggtcaggccaacataaggtaaaccttcagccaatgaggtcgtgccaggattaaaccaggtggtttctttaagagcaaccagatcctttaccaacggatactgggcgatgagcgagttcattttagcgttttccatagtacgtctctttgcgcttagatgataaatgacagcaggaatgtgcccgccagagcgacgactgaagcgataaatgtcgctgtcgtatagtatttaaatgtttcattgagcgtagcgccgcaatattgcttcaccagccagaaaagcgagtccgtaacgatcgtgcagccaatcgcgcctgaaccgatagcaatcgcaataatttccgggctaatgtcgggatacagcggcagcacaatgctccatatttatattttcttctccaggttggcgatgccagttggcatgttttacttacttgcctatatggttactcgttggcgagaacagaggcggaattggggacaattgtccgggaattattgttattttttattgtattgctgtgtcaggtgatagggcgttggatctcgccagtgacgtctgtttctgctacattgcccgttttacggcaaacggcttgggtatggcttcattaaaggatgtcgcacgcctggcgggagtgtcgatgatgacagtctcccgggtgatgcataatgcagaatctgtgcgtcctgcaacgcgtgaccgcgtattgcaggcaatccagaccctgaattatgttcctgatctttccgcccgtaagatgcgcgctcaaggacgtaagccgtcgactctcgccgtgctggcgcaggacacggctaccactcctttctctgttgatattctgcttgccattgagcaaaccgccagcgagttcggctggaatagttttttaatcaatattttttctgaagatgacgctgcccgcgcggcacgtcagctgcttgcccaccgtccggatggcattatctatactacaatggggctgcgacatatcacgctgcctgagtctctgtatggtgaaaatattgtattggcgaactgtgtggcggatgacccagcgttacccagttatatccctgatgattacactgcacaatatgaatcaacacagcatttgctcgcggcgggctatcgtcaaccgttatgcttctggctaccggaaagtgcgttggcaacagggtatcgtcggcagggatttgagcaggcctggcgtgatgctggacgagatctggctgaggtgaaacaatttcacatggcaacaggtgatgatcactacaccgatctcgcaagtttactcaatgaccacttcaaatcgggcaaaccagattttgatgttctgatatgtggtaacgatcgcgcagcctttgtggcttatcaggttcttctggcgaagggggtacgaatcccgcaggatgtcgccgtaatgggctttgataatctggttggcgtcgggcatctgtttttaccgccgctgaccacaattcagcttccacatgacattatcgggcgggaagctgcattgcatattattgaaggtcgtgaagggggaagagtgacgcggatcccttgcccgctgttgatccgttgttccacctgatattatgttaacccagtagccagagtgctccatgttgcagcacagccactccgtgggaggcataaagcgacagttcccgttcttctggctgcggatagattcgactactcatcaccgcttccccgtcgttaataaatacttccacggatgatgtatcgataaatatccttagggcgagcgtgtcacgctgcgggaggggaatactacggtagccgtctaaattctcgtgtgggtaataccgccacaaaacaagtcgctcagattggttatcaatatacagccgcattccagtgccgagctgtaatccgtaatgttcggcatcactgttcttcagcgcccactgcaactgaatctcaactgcttgcgcgttttcctgcaaaacatatttattgctgattgtgcggggagagacagattgatgctgctggcgtaacgactcagcttcgtgtaccgggcgttgtagaagtttgccattgctctctgatagctcgcgcgccagcgtcatgcagcctgcccatccttcacgttttgagggcattggcgattcccacatatccatccagccgataacaatacgccgaccatccttcgctaaaaagctttgtggtgcataaaagtcatgcccgttatcaagttcagtaaaatgcccggattgtgcaaaaagtcgtcctggcgaccacattccgggtattacgccactttgaaagcgatttcggtaactgtatccctcggcattcattccctgcggggaaaacatcagataatgctgatcgccaaggctgaaaaagtccggacattcccacatatagctttcacccgcatcagcgtgggccagtacgcgatcgaaggtccattcacgcaacgaactgccgcgataaagcaggatctgccccgtgttgcctggatctttcgccccgactaccatccaccatgtgtcggcttcacgccacactttaggatcgcggaagtgcatgattccttctggtggagtgaggatcacaccctgtttctcgaaatgaataccatcccgactggtagccagacattgtacttcgcgaattgcatcgtcattacctgcaccatcgagccagacgtgtccggtgtagataagtgagaggacaccattgtcatcgacagcactacctgaaaaacacccgtctttgtcattatcgtctcctggcgctagcgcaataggctcatgctgccagtggatcatatcgtcgctggtggcatgtccccagtgcattggcccccagtgttcgctcatcggatgatgttgataaaacgcgtgataacgatcgttaaaccagatcaggccgtttggatcgttcatccacccggcaggaggcgcgaggtgaaaatggggatagaaagtgttaccccggtgctcatgaagttttgctagggcgttttgcgccgcatgcaatcgagattgcgtcattttaatcatcctggttaagcaaatttggtgaattgttaacgttaacttttataaaaataaagtcccttactttcataaatgcgatgaatatcacaaatgttaacgttaactatgacgttttgtgatcgaatatgcatgttttagtaaatccatgacgattttgcgaaaaagaggtttatcactatgcgtaactcagatgaatttaagggaaaaaaatgtcagccaaagtatgggttttaggggatgcggtcgtagatctcttgccagaatcagacgggcgcctactgccttgtcctggcggcgcgccagctaacgttgcggtgggaatcgccagattaggcggaacaagtgggtttataggtcgggtgggggatgatccttttggtgcgttaatgcaaagaacgctgctaactgagggagtcgatatcacgtatctgaagcaagatgaatggcaccggacatccacggtgcttgtcgatctgaacgatcaaggggaacgttcatttacgtttatggtccgccccagtgccgatctttttttagagacgacagacttgccctgctggcgacatggcgacatggcgaatggttacatctctgttcaattgcgttgtctgccgagccttcgcgtaccagcgcatttactgcgatgacggcgatccggcatgccggaggttttgtcagcttcgatcctaatattcgtgaagatctatggcaagacgagcatttgctccgcttgtgtttgcggcaggcgctacaactggcggatgtcgtcaagctctcggaagaagaatggcgacttatcagtggaaaaacacagaacgatcgggatatatgcgccctggcaaaagagtatgagatcgccatgctgttggtgactaaaggtgcagaaggtgtggtggtctgttatcgaggacaagttcaccattttgctggaatgtctgtgaattgtgtcgatagcacgggggcgggagatgcgttcgttgccgggttactcacaggtctgtcctctacgggattatctacagatgagagagaaatgcgacgaattatcgatctcgctcaacgttgcggagcgcttgcagtaacggcgaaaggggcaatgacagcgctgccatgtcgacaagaactggaatagtgagaagtaaacggcgaagtcgctcttatctctaaataggacgtgaattttttaacgacaggcaggtaattatggcactgaatattccattcagaaatgcgtactatcgttttgcatccagttactcatttctcttttttatttcctggtcgctgtggtggtcgttatacgctatttggctgaaaggacatctagggttgacagggacggaattaggtacactttattcggtcaaccagtttaccagcattctatttatgatgttctacggcatcgttcaggataaactcggtctgaagaaaccgctcatctggtgtatgagtttcatcctggtcttgaccggaccgtttatgatttacgtttatgaaccgttactgcaaagcaatttttctgtaggtctaattctgggggcgctattttttggcttggggtatctggcgggatgcggtttgcttgatagcttcaccgaaaaaatggcgcgaaattttcatttcgaatatggaacagcgcgcgcctggggatcttttggctatgctattggcgcgttctttgccggcatattttttagtatcagtccccatatcaacttctggttggtctcgctatttggcgctgtatttatgatgatcaacatgcgttttaaagataaggatcaccagtgcgtagcggcagatgcgggaggggtaaaaaaagaggattttatcgcagttttcaaggatcgaaacttctgggttttcgtcatatttattgtggggacgtggtctttctataacatttttgatcaacaactttttcctgtcttttatgcaggtttattcgaatcacacgatgtaggaacgcgcctgtatggttatctcaactcattccaggtggtactcgaagcgctgtgcatggcgattattcctttctttgtgaatcgggtagggccaaaaaatgcattacttatcggagttgtgattatggcgttgcgtatcctttcctgcgcgctgttcgttaacccctggattatttcattagtgaagttgttacatgccattgaggttccactttgtgtcatatccgtcttcaaatacagcgtggcaaactttgataagcgcctgtcgtcgacgatctttctgattggttttcaaattgccagttcgcttgggattgtgctgctttcaacgccgactgggatactctttgaccacgcaggctaccagacagttttcttcgcaatttcgggtattgtctgcctgatgttgctatttggcattttcttcttgagtaaaaaacgcgagcaaatagttatggaaacgcctgtaccttcagcaatatagacgtaaactttttccggttgttgtcgatagctctatatccctcaaccggaaaataataatagtaaaatgcttagccctgctaataatcgcctaatccaaacgcctcattcatgttctggtacagtcgctcaaatgtacttcagatgcgcggttcgctgatttccaggacattgtcgtcattcagtgacctgtcccgtgtatcacggtcctgcgaattcatcaaggaatgcattgcggagtgaagtatcgagtcacgccatatttcgctatcaggattctgtgtgatggttacatcgcccggcccagggctgtttagtcatcagcgctttctgacagtgctgagatttcaacctgttgcagtaaaaatgagtagatataaggcaagtgtgctgccaaacccatcttttacggggtgaaggtagatttcgtttgaagggtatctggtgtcccctgcaggaatcgaacctgcaattagcccttaggaggggctcgttatatccatttaactaagaggacaatgcggcatgagtatacccgctaatggactgcggggtaagtacgctgccgctcgattgcttaaaccctcgccatttatgctgggtttttatcatttttcttaatgttttccgcacgttctgctttttggcgtgcttctgctttacgcttgttgctcatgtcgttacgaatctgtgcatgactcattaacgcgaagataaaggtgccgccgcagatgttccccgctaaagtaggtagtgcgaagggccagatgaaatcgctccagtgcagcgtgccgttaaacaccagatagaggatttcaacagaaccgacaacgatgtgggtggtgtcacccagtgcaataagccaggtcatcaatataatcaccacaatctttgccgcacccgcagcaggaaacatccaaaccatagtggcgatcagccagccggaaatgatcgcgttggcaaacatctcgctgggggtgttcttcatcacatccatgccgattttgacaaatgcatcgcgagtttcttcattgaagataggcatatattcaaatgcccatgcagcaatacctgtcccgagaatattacccagcagcacgacgccccataatcgcataagtaagccgacgttgctcattgtcggtttttgcatgacgggtagtaccgcagtcacggtgttttcggtaaataattgctggcgggccataatgacgataataaaaccaaaggtataaccgagattctccagtaagaagctgcctggcactccttccagttcgacatgaaatatcccttttgccagtagcgaagcgcccatcgacagacccgccgcaatggctgaccacagtagcgccattgcgtcgcgttccagctctttttcaccatcctggcggatatgctcatgaattgccatcgcccgggaggggagtcgatcttcatctatttctatttttttgccgcgctctttttcttcgctctcaacttcaatttcgtcgctgtgttgatcaattttgtcgttgtccatggtctcttctcttgaattagcacgtatagctaaagcgtagcggcttttttgctcgcaactggcgggagttactctgaaaatgtagaaaaggctgcgtttgcctttttctgtttctatagaatcaagtagcctacagggcggcgattaccaggctatgatcaaatcagcaaatcagggcgtctggacatcagttgacgtgctgttacaatcgcccacacctaaacaggcggatacggtatcgttccgtcatggatggcaaactgcataagccataaaaaaacagggagacatttatgaagcttcgcctgtcggcgcttgctctgggaactacgcttctggtggggtgtgcgagttccggtacagatcagcaagggcgttctgacccgttagaagggttcaaccgcaccatgtacaacttcaacttcaatgtattagacccgtatattgttcgaccggtcgctgtcgcctggcgtgattatgttccgcaaccggcgcgtaacggtttgagcaactttactggcaaccttgaagaacctgcggtgatggttaactacttcttgcagggcgacccttatcaggggatggtccactttacccgctttttcctgaacaccattttggggatgggcggttttattgatgttgcagggatggcgaacccgaaactgcaacggactgaacctcaccgcttcggtagtacgcttggtcattatggcgtgggttatgggccttacgtccagttaccgttctacggtagcttcacgctgcgtgatgacggtggtgatatggcggatggtctttacccggttctttcctggctgacctggccgatgtctgtgggtaaatggacgcttgaagggatagaaactcgtgcgcagttgttggattccgatggtctgctgcgtcagtcgtccgatccttatattatggtgcgcgaagcgtacttccagcgtcatgatttcatcgctaatggcggcgaactcaaaccgcaggaaaatccgaacgcgcaagcgattcaggatgatttaaaagatatcgattctgaataagaaacaaataaaaaaggtgagtcgcaatactcaccttttttgttgttatccctcaattaccacaagtaaaaggagataaaccgacaatgacccggacgtaatgatgtaaaaatactgatgttcgtcactgactatttccgatattcaggagttgaaaaatcaaaaaactggaaaaataattttaaatatcatcaaaattaacacctggcgcagatagttgattaatttcattttgatattccgtctggcgattttgaagccttttttcaactttatcttcgagatccttaaagtctttgtatttattttcaggatggtcaacgtcaactttgttagcgaataaagtagaaattatttcttttacattatcgcgtctaaattttgcatcgtccacttgaaaattatatcttattgctcgacctaaacgtttaaaaacttcgttaggttctctcagtctttccccgttgagctcgtttacaacctgatgatcggaacctgttgcaaatgattctgccatgatagctttactgctttcaaaccacgctgaagcattcctggctttttcactacaatattgggtgagactatcaccattaatacgaattcctctttgaatgtggtagtcgtcctgatcgtagtaaccgagagataagtaatcatttccgtttttatttttaattacaatagcgagagagtcgccttttttatctttaccgtaccaggtaaataagtccgttggttcgctattcccgctctcatcaaattccgttaccgtatgcctgagtttgtgtgatatcttatcgaagataaaaccaggatctccatcatatatttcttttaatgcgctgaagatcatttccttattattgatatcatgagtcttctcaactatgttgtcattaatgatagtacggacgagttctttgtctttatagttcgcaggtaattctattggttcttggttgtcgataccaatattaatatggtctgtatcattggagccaatatcaatataagtaactgaggaattattaatattaaatctataaggatcgtcgtttactcgtatggcgttttttataagctcaagtagatgtttaatacaggtgcttattccttccttaccattaaaaaggtttttgaactcttgtactaatccattaatttcatcattgttattttcattaatggattctgggtaagttgcgctggtattgttgattgaaatagatggtagcatgattttattccattttgattgatttgttacaaatatatattacctaatgaaatagactatcaaaaaacgctcatttatttagaacctatctttaatttgagtgtatgagcgcacaatagccagggggggggagtatcctggaaatgcagaaaagtaaactctttgagaaggacgagcagaacgcctgaaaatatgcctttcccttcaggtttgtctgtggataccgcttattgatttgaaagggcaagctgccaacaggctgtttgcaaaactcaggaggtaagcaatgaggacactactttcggtgaagtgggggagttaaagtcacctgctatgcaggtgactttatccaggcgaacgcgttatcagaacgcgtagttaaagttagtaccgaacagccaggctttaccttcagactcgaactggtatgggccttcgttaattttcacgctctgaccgtgcatataagaaacaccaacgtcgactgaagcatctttattaaatgcgtaagtcgtacctgcactcagccagaaacggtcctggtccggaatggagatagaacgattctgagccggaactgggctgtcatcaaaggcgataccggtacggaaggtccagttatcatcgtagtaataagtggtacccaacgcgatgcggtaagcatctttaaagccttcatgtttctggaacagcgtgtcgccactggttgaggtcgctttcagctgctggaactgactccagctggtgtaagccaggctatagtgaatcgcccactgtggatcaacacggttataacctgacacttcccacatttcaggcaggttcagcgtcagataacccgattgcgttgcgccacctgtcgcggtaggaattggcaaaccgtagttattaaacgcacgattaagatcgctgctgtagttacctttgaagtcaattttcacttcagaacggtaggtcagtgcatagcggttatttttatccagttcatacaggattccggcgttccagccaaagccccactggttaccgttcagatgagcgattttggtattactgtcgataccgttggcggtagctgccaatgcttgcccttgaggagtttgcccggcaggagattgcataatctgaccagcaaccaactgccccagatcgcctgcgaaacgttcaattttcgcgcgagcgtagacggcgttgaaaccaagaccaaagctccatgcattatttaagcgatacgcaccgcttaagttcaggttcatggtttcaaggtcagttgtacccccgacagagccgcctgcataagtatcattaaactctgttgccagaccatagttagaggtaatagaagcgccccaaccaaattggtcgttaatcggtgcaacaaagtgcatgttcggaacccatgccgtaggcgcgatgttatcggctttcaggctacgaccagacggagacgttccgctgatattcacatccgggtcaatataaaccgcacccgcagaaaatgtcgggcggtcaaacatggtaatcaatgcggggttacggctaacgttacctgcatcatcggcaattgcgccttcccctgaataagcccggcccaggccagaggaagaaaattcgtttaactgaaagcctgccgaccaggcctgggtggagataagtgccactgcgactgcgagagcagactttgtaaacagggttttctggctcatgaccataacctcaatgatttatttttatacaaactatgttacgtgctgtaacaggagcgcgaagtgtagggtctgaggtacatcttagaaatcagaccagtggcgagagtataggtcggaccagctggaatgttgcaagtatgtttccatcttttttcaaatatgatctaagaaacgcgatccagctggcaaaatttggaggttgcgcactcgcggattcgggtgaattttgttttagatcatttttaagtgtgatttcggtcacttatccgattttgcagaattaacaactggagcagcactttccggaagcgtaaaatatccacaacgtttatctggcaccttgggtgcacatacagaggaaatcaacgatgagtaaatgtagtgctgatgaaaccccggtttgctgctgtatggatgttggcaccattatggacaactccgactgcaccgcgtcttacagccgcgtgtttgcaagccgcgcagaagcagaacaaacgctggcggcgctgactgaaaaagcccgtagcgtggaatccgaaccgtgtaaaatcaccccgactttcactgaagagtctgacggtgtgcgcctggatatcgattttacttttgcctgcgaagctgaaatgctgatcttccagctgggtctgcgttaattcctctcgggtacgtacgcccctgtcagttgctggcaggggcgttttcttttctttctcctgtcttcactgtgtcatagctcccactttcctttttctccgcttggctaaatgtaaaaaaatggttaagactatgatcaggtcagaccactttatttatttttttacaggggagtgttatgggtcaggttttaccgctggttacccgccagggcgatcgtatcgccattgttagcggtttacgtacgccttttgcccgccaggcgacggcttttcatggcattcccgcggttgatttagggaagatggtggtaggcgaactgctggcacgcagcgagatccccgctgaagtgattgaacagctggtctttggtcaggtcgtacaaatgcctgaagcccccaacattgcgcgtgaaattgttctcggtaccggaatgaatgtgcataccgatgcttacagcgtcagccgcgcttgcgctaccagtttccaggcggttgcaaacgtcgcagaaagcctgatggcgggaactatccgagcggggattgccggtggggcagattcctcttccgtattgccaattggcgtcagtaaaaaactggcgcgcgtgctggttgatgtcaacaaagctcgaaccatgagccagcgactgaaactcttctctcgcctgcgtttgcgcgacttaatgcccgtaccgcctgcggtagcagaatattctactggcttgcggatgggcgacaccgccgaacaaatggcgaaaacctacggcatcacccgagaacagcaagatgcattagcgcaccgttcgcatcagcgtgccgctcaggcatggtcagacggaaaactcaaagaagaggtgatgactgcctttatccctccttataaacaaccgcttgtcgaagacaacaatattcgcggtaattcctcgcttgccgattacgcaaagctgcgcccggcgtttgatcgcaaacacggaacggtaacggcggcaaacagtacgccgctgaccgatggcgcggcagcggtgatcctgatgactgaatcccgggcgaaagaattagggctggtgccgctggggtatctgcgcagctacgcatttactgcgattgatgtctggcaggacatgttgctcggtccggcctggtcaacaccgctggcgctggaacgtgccggtttgacaatgagcgatctgacattgatcgatatgcacgaagcctttgcagctcagacactggcgaatattcagttgctgggtagtgaacgttttgctcgtgaagtactggggcgtgcacatgccactggcgaagtggacgatagcaaatttaacgtgcttggcggttcgattgcttacggacatcccttcgcggcgaccggcgcacggatgattacccagacattgcatgaacttcgccgtcgcggcggtggatttggtttagttaccgcctgtgctgccggtgggcttggcgcggcaatggttctggaggcggaataatggaaatgacatcagcgtttacccttaatgttcgtctggacaacattgccgttatcaccatcgacgtaccgggtgagaaaatgaataccctgaaggcggagtttgcctcgcaggtgcgcgccattattaagcaactccgtgaaaacaaagagttgcgaggcgtggtgtttgtctccgctaaaccggacaacttcattgctggcgcagacatcaacatgatcggcaactgcaaaacggcgcaagaagcggaagcactggcgcggcagggccaacagttgatggcggagattcatgctttgcccattccggttatcgcggctattcatggcgcttgcctgggtggtgggctggagttggcgctggcgtgccacggtcgcgtttgtactgacgatcctaaaacggtgctcggtttgcctgaagtacaacttggattgttacccggttcaggcggcacccagcgtttaccgcgtctgataggcgtcagcacagcattagagatgatcctcaccggaaaacaacttcgggcgaaacaggcattaaagctggggctggtggatgacgttgttccgcactccattttgctggaagtcgctgttgagctggcgaagaaggatcgcccatcttcccgccctctacctgtacgcgagcgtattctggcggggccgttaggtcgtgcgctgctgttcaaaatggtcggcaagaaaacagaacacaaaactcaaggcaattatccggcgacagaacgcatcctggaggttgttgaaacgggattagcgcagggcaccagcagcggttatgacgccgaagctcgggcgtttggcgaactggcgatgacgccacaatcgcaagctttgcgtagtatcttttttgccagtacggaagtgaagaaagatcccggtagtgatgcaccgcctgcgccattaaacagcgtgggaattttaggtggtggcttgatgggcggcggtattgcttatgtcactgcttgtaaagcggggcttccggtcagaattaaagatatcaacccgcagggcataaatcatgcgctgaagtacagttgggatcagctggagggcaaagttcgccgtcgtcatctcaaagccagcgaacgtgacaaacagctggcattaatctccggaacgacggactatcgcggctttgcccatcgcgatctgattattgaagcggtgtttgaaaatctcgaattaaaacaacagatggtggcggaagtggagcaaaattgcgccgctcataccatttttgcttcgaacacgtcatctttaccgattggtgatatcgcagctcacgccacgcgacctgagcaagttattggcctgcatttcttcagtccggtggaaaaaatgccgctggtagagattattcctcatgcgggtacatcggcgcaaaccatcgccactacggtaaaactggcgaaaaaacagggcaaaacgcccattgtcgtgcgtgacaaagccgggttttacgtcaatcgcatcttagcgccttacattaatgaagctatccgcatgctgaccgaaggtgaacgggtagagcacattgatgccgcgttagtgaaatttggttttccggtaggtccaatccaacttttggatgaggtaggaatcgacaccgggactaaaattattcctgtactggaagccgcttatggagaacgttttagcgcgcctgcaaatgttgtttcttcaattttgaacgacgatcgcaaaggcagaaaaaatggtcggggtttctatctttatggtcagaaagggcgtaaaagcaaaaaacaggtcgatcctgccatttacccgctcattggcgcacaagggcaggggcgactctccgcaccgcaggttgctgaacggtgtgtgatgttgatgctgaatgaagcagtacgttgtgttgatgagcaggttatccgtagcgtgcgtgacggggatattggcgcggtatttggcattggttttccgccatttctcggtggaccgttccgctatatcgattctctcggcgcgggcgaagtggttgcaataatgcaacgacttgccacgcagtatggttcccgttttaccccttgcgagcgtttggtcgagatgggcgcgcgtggggaaagtttttggaaaacaactgcaactgacctgcaataagaaggtcaaagctatatgaatccgcgctgaatggcggagtgttggtcaaaatgtaaacgcatattgactatacttacgccattgaggtaaaaaacagcgtttcattcggtgaatggataaggcacaatgccggccaccgttttctttctctggtttcagatgaaagaaaacgggcgaatctggttaacaaaagcggtgcaatatgcaagtttttatcatgcgtcacggcgacgcagccctcgatgccgccagtgattcggttcgtcctctgaccactaatggttgtgacgaatctcgcctgatggcgaactggctgaaaggtcaaaaagtggaaatcgaacgcgttctggtgagcccgttcctgcgagccgagcaaacactggaagaagtaggggattgtctgaacctgccttccagtgcagaagttctgccggagttaacgccctgcggcgatgttggtctggtcagtgcctatttgcaggcgttgaccaatgaaggtgttgcttcggtactggtgatctctcacttaccgttagtcgggtatctggttgccgagttatgtccgggcgaaacgccgcctatgtttaccacctcggccattgccagcgtaacgcttgatgaaagcggaaacggtacattcaactggcagatgagcccgtgtaatctgaagatggcaaaagctatctgatgtgttccaaattatgcccaatgaggtagattcattgggcataattgctcatcaggcagcggatatctgtcaacctcactactatcgaagactctccttatctataaataaaacactttctacattcattcggaaattattcttctgcgcgtatcttgattttgcccaaagttacatgttgaaatgaataatgtctgtttgacactcattgtcatttattaatacagataatagagttgaataatcaggcaggatgtaattgaaacttgattaaattctggctatagtgtttatatattatattgtcaaaagtggataaatgccaatcgcattatatgttcattgtttgttttttaagctgttgatattcattattgatatactttctattttttctaaatacttattccgtgttttttaaggatgtccttaagataacctttcttttgtcaatatattaattaaatctacatttactctttagtaaaattaaattgcatcaggggtgtggaaacatcactatgcggccccacaccaacgaatacaattttcggtaatgactccaacttattgatagtgttttatgttcagataatgcccgatgactttgtcatgcagctccaccgattttgagaacgacagcgacttccgtcccagccgtgccaggtgctgcctcaga

SEQ ID NO: 18 - DNA, 217279 bp, Escherichia coli
  source 1..217279: mol_type = genomic DNA
tcatacaccgccgccagctcaccgcgtggcgtccagtcgtagcacaccagtggcgcggcaggtaaattttccgggtattccgggtcgtgcatcagccacaccgccgaaagacggataccgctgtcagtgccgtattccgtaccgggcagtgtgtcggggaaggaaggagctgagagagggcggggactgtcaggggaagataacgaagcggtgtgcggtttacgggcctcttccgcccgctgcgcctgcgtggtcagcaccagacggaactcccgcccggcaccgtccgtcacgccggtgatttccccggccaggtcaccggcggcctcacgccggtacgccagcgtccgcccgaagcggtccgccatcccggtaagcacccggtacggcggcagcggcgctggcagtaagtcctcagcacccggcacccgctcagaccaccccagtatccaccacggcccctgtgcgctgttggtcgccaggtaaagatgcgggcttaaccggatatccggcggcagcgccccccacagccgcgccagcgtatggccgtccggctgtgctgccttaccaccgcgcaccagccacattgactcactgcggctgtacaccgcctcccccggcagcagcggctcaaagtgaatgctccgcccgccgttgtcgttgagtatcagtccgtcatcacgtagctgtaagcggatatcagaaggcgctttccagccggggccaaaaattcccaccggcgcaggcgtcttcgtccggtagctgctgtaggtgcgggagagaatgaacggcagcgggtcgggcagcgcaaggtccgtctcgccgggctgtacttttgcaccgagcagcgggttcaccgggttgcccgaggtcatcccgcccggacacaccgagcacgccacgccagttggcgcgccaattcttacacctgccgaaccctggacaatgggaccgccatactgagtcatatctccctgacgcgccgctggttttccgctcatataaagtgcccttttagttattgttcatatccctgtgttagcaacaaaaaaaataaaatgacacacaagaccagctaatgtatttatatatttttcacataaacttatttgttctcaatcaacaacaactgttattacaggtcactttcaatattttattaaactaaaatttttagcacagatgaattcatcatcaacaaattcactatatggataatatccattcaacgcatatgatttatgattttattagtctgagttatttttgtagggctatatttaaaattattaaactccaccgattcagattaatatcgcaatagaaagataggaaatcaccaattcaataacatcatcaatgaaacatattgtagaattaatttaaacaaggcgttccattcaaccagaacgccccttatttactctcatcaccccgcaaactgcctgaacagcgccttacccttaaccagtctcgcgcccagccagccgccgaaaagcgacagcagcagcgcaccgctgcacggcagaacaatccacaatcgccagtctggctcccacgggaaatcaaacactttcgcctgcaacactgccagcgccgtttccgcaccaattgcggctaccaggccagaaacaaacccaagcatggcgaactcgcaccacaatgtcgtacgcagcagttttttccccgcaccgagtgtgcgccacaccaccagctcctgatgacgctgacgcattcccacctgcacctgtgccagcaacagcaacataccgcaggcggtgaccagcaccaccatcacctccagcgcccgacttacctgctccagcacctgaccgacctgttttaaaatcgcgccaatgtctaacaggctaatggtagggaactggcggttgagttgcgtcaacatgccgttgccattctcccagcggaaactggtaagccagctctgcggttgcccgtctaatgccccttcagggaaaataaaatagaaattaggccgcagactttcccagtccactttgcgcaggctggtcactttagcgcggaactcctgggtatcgcccataaaagtcacggtatcaccgagggcaacgtttaagcgtttcgccagcccctcttccatcgacacttcatcggcttttggcggccagttaccggcgacaatcggattatgatcgggtcgcgtattttgccaggtaagattgagttcgcggttaagcgcctcatcttcattaccttctgtcggcttatcgttaatcgccgtcagccgcgcccgcactaccggataaaatgattccgggactatctgatgttccgcgaggaacgcttttagcggttctacctgttctgtggcaatgttaattaaaaagtagttcgggctttctggaggtagctgctgctgccagcggtcaagcagatcgccacgcaataccagcagcagcgccagcagcataaaggagagcgaaaatgccgaaagctggcttaatgttgaccacggctgacgtaacaggcggctaaccgccaggcgcagaggtagcgatttcagcgtcatgcggcgaagtacattcagcatcatccagcccagcacaccgcacagcaaagccagtactaccgcgcccgccagcaccgcccaaagcagcatgctgccacccattaatccggcgagcagcagcacaaccaccacactgacaatcggcagataaaacttcagcggccagacgttcgcgaccacatcattacgtaatacgcgtaaaggctgcgttgccagcaacaagcggtacggtcgtagccccaccagcagcgagataaccgtcatggtgcccagcgcccatagccacggccagaggctggctggcggtagtgcagcaggcagaacgggcttgagcagcaccatcaacacgttttcgaacaacaggcctatcgccccaccggtaacggctgaaagcgccagcaccagcaaccactgaccgacgattagcttacgcagttgcgctcgccctgcccccagcgttttgaggatcgccaccagatcgtagcgactgcgacagtaatgattcatcgctaccgccactgctgccactgccagcagcaaggtcagaagcgccgaaagcagcaggaactgttgcgagcgttccatcgatcgccccagcgcgccttcgtcctgttccagaccgtaccagcgttgttcgggtttaagctggggtaacaaccatttctcatagccgtcgagctggttctcgttgccgccgaatttataacgccaggtgacccgactccccggctgcacggctccggttttatcgacatccgccagattcatcatcagacgcggagccatctggaaggggttaaaaccggaatccggttcctgaatcacttctccggcaatccgcaaggtggcatcgcccacgtcaatggtgtcgcccgttttcaggttaagcagcgccatcaggcgtggggccagcaatacgctgcccgcctgcggtttcaggccagggggattagtttgcagatcgccatacatcgggtagatatcatccaccgctttgacgttcgccagctgcggtgtgtcgcctgcaaatgtcatggtggcgaaagtcagctgcttgccgactttcaggccgcgcttttgcgcttcctccagccatgcttgcggcacttcgcgcgaactgcgcaacgcccgatcgcccgccataaactcccggctttgttggcttaagcccttctccatgcgatcgctgatattgcccagcgccagcacgcaggccaccgccaggcttagcgccagccagacaattaatagcgacggcgaacgccattcgcgccagaaccaacgtgcaatcatgcttcctcctgcaactgtccgttcaccagccgtaagcagcggtcgcagcgtgccgccagttgcaggtcgtgggtcaccataatcaacgtggtgccatgctcacggttgagggaaaacagcaagtcggcaattttatcgcccgtctggcggtcaaggttgccggtgggttcgtcggcaaacagcacatcaggtcgaccattaaaggctcgcgccagcgccactcgttgctgttcgccgccggaaagctgtgccggaagatgatcaagacgtttacccagccctaactgttcgagcaacgctttcgctccgttacgactttccgcgctactctcaccgcgcagcagcgccggaagctcgacgttttccagcgcgttaagggtaggaattaacataaatgactgaaaaacaaagccgacgtgcttcgcgcgcaactttgcccgcgcttcttcgtccatattatgtagcggttgtcccaccagactcacttcgccactgctgccgtcatccagcccggcgaggatcgccagcaaggttgacttacccgatcccgactcgcccaccagtgcgatggtctcgccacgtttgacaaccagctcaactccggtgaggatggagagttcatgctccccctgaccgacggacttcttaagatgatgaacttcaacaatgttttccgctggcatttgcccttcctgttcctggtcctgttaaccttccgtgccgccgcagcggacacgttattgattctgggtgatagcctgagcgccgggtatcgaatgtctgccagcgcggcctggcctgccttgttgaatgataagtggcagagtaaaacgtcggtagttaatgccagcatcagcggcgacacctcgcaacaaggactggcgcgccttccggctctgctgaaacagcatcagccgcgttgggtgctggttgaactgggcggcaatgacggtttgcgtggttttcagccacagcaaaccgagcaaacgctgcgccagattttgcaggatgtcaaagccgccaacgctgaaccattgttaatgcaaatacgtctgcctgcaaactatggtcgccgttataatgaagcctttagcgccatttaccccaaactcgccaaagagtttgatgttccgctgctgcccttttttatggaagaggtctacctcaagccacaatggatgcaggatgacggtattcatcccaaccgcgacgcccagccgtttattgccgactggatggcgaagcagttgcagcctttagtaaatcatgactcataaagcaacggagatcctgacaggtaaagttatgcaaaaatcggtcttaattaccggatgttccagtggaattggcctggaaagcgcgctcgaattaaaacgccagggttttcatgtgctggcaggttgccgaaaaccggatgatgttgagcgtatgaacaacatgggatttaccggcgtgttgatcgatctggattcaccagaaagtgttgatcgcgcagcagacgaggtgatcgccctgaccgataattgtctgtatgggatctttaacaatgccggattcggcatgtatggccccctttccaccatcagccgtgcgcagatggaacagcagttttccgccaactttttcggcgcacaccagctcaccatgcgcctgttacccgcgatgttaccgcacggtgaagggcgtattgtgatgacatcatcggtgatgggattaatctccacgccgggtcgtggcgcttacgcggccagtaaatatgcgctggaggcgtggtcagacgcactgcgcatggagctgcgccacagcggaattaaagtcagcctgatcgaacccggtcccattcgtactcgcttcaccgacaacgtcaaccagacgcaaagtgataaaccagtcgaaaatcccggcatcgccgcccgctttacgttgggaccggaagcggtggtggacaaagtacgccatgcttttattagcgagaagccgaagatgcgctatccggtaacgctggtgacctgggcagtaatggtgctcaagcgcctgctgccggggcgcgtgatggacaaaatattgcaggggtgagttgaagcgcgcgcttaagcccccatgtcaaagaaaatatcgacaacagagagcgactccatgtccgtagaaaatattgtcaacattaacgaatctaacctgcaacaggttcttgaacagtcgatgaccactccggtgctgttctatttttggtctgaacgtagccagcactgtttgcagttaaccccgatcctggaaagcctcgcggcgcagtacaacgggcaatttattctggcgaagctggactgcgacgcggagcagatgattgccgcccagtttggtctgcgcgcgattccgaccgtgtatctgttccagaacgggcaaccggtagatggcttccaggggccgcaaccggaagaggcgatccgcgccctgctggataaagtgctgccgcgcgaagaagagctgaaagcgcagcaggcgatgcaactgatgcaggaaggcaattacaccgatgccctgccattgctgaaagacgcctggcagttgtcgaatcagaacggggagatcggcctgctgctggcagaaacgctgattgcgctgaaccgttctgaagatgcggaagcggtgctgaaaaccattccgttgcaggatcaggacacccgctaccaggggctggtggcgcaaatcgaactgctgaagcaggcggctgatacgccggaaattcaacagttgcaacagcaggtggcggagaatccagaagatgccgcactggcgacgcaactggctctgcaactgcaccaggttgggcgcaatgaagaggcgctggagttgctgttcgggcatctgcgtaaagatctcaccgccgcagacggtcagacgcgtaaaacgttccaggagatcctcgctgcgctgggtacgggtgatgcactggcgtcgaagtatcgccgccagctgtatgcattgttgtattgatattccgttgatcggcacatgaaccacaacgccggatgcgatgctgcgcatccggcatcgcatcatttcttcttcaattgcgtcaccaccaactggtggcgcgaattataaaacttacgataggttaaatagcaggcaataatggtcgacaagctggcggttgagagcagcataaaggtcaccataatctgatatttaatcgccttcaccggatcaatcccggcaaatatcagcccggacatcattcctggtaaactcactaagccaaccgtttttgctgaatcgaccgtcggaattaaagccgcgcgaatactgtcgcgaatcaatatcgctgaagcctgcttcggcgtcgcaccaagactcagtttctcctgaatctgttgctgttcgctaatgacccgttgccctaaattgttgtaacacaaccccaccgctaccatggcgttaccggcaatcatcccggcgatagggatcacctgcatcgggataaattcaatcgacccagagagaatcagcaccgccagggtaattcccgccccgaccgtaatggcaataaacgatgagataaaagctttagcaatatatttactgcgtttttgcgcgttccacgccgcattaaagcagataaataacaccatcaataatgtcaggctggcatcatccacgctgaaaatatacttcagcacatagccgacaataatcagctgaattatcgctcgcccgacgctccagaaaatatctttctccagcgccagtttttctttatggctaattaagattgccaccaccaccagcattaatgccagtgccaatgattcgttagtaatattatgcgagttcatagcgtgcttcctgcatttctccggcatgcggttgcagtgtaatcactttatccgcatgattaatttcgtctttatcgtgtgtcacccacagcacggcaatattttgctcgcgcacataacgatggatcatctcattaacgttatgtttattactttcatccagcgcactggtgatttcatccagcaataaaaccttcggcataaattgcaggttacgaatcagtgagatgcgttgtttttcaccaccagatagctcggcgatatttttcgtcaaaatgctgtccggcaaagcgaagcgttcgagaaaatcgagaaaaatggccgggtcaggctgctggttacggatctgccagggaaagatcagattatcgtataccgtatcgccaaacagcgtcggcgtctgggcgcagtaagagacttgctggcggtagatttctggctttagtgtgctgacatcctcaccttcaaacagtaacgttccgctggttgggctgatcaatgaagcaactatttttagcagcgtacttttgccacaaccggaaggaccggtaattaacttaaattcgccagcacgcagcgaaaaattgatgttattaagaatcttcgcatcacccgccagatatcctacgttttgtagctgaagcaaaggactattttcctgcatcactgttccctttttctgatttttactaaaaacagtttatccttcgcaggaataagggggaactctctttcagtaatcaggtataatttgtttaatcaagcagcaattttgctgattatggacggtacaacaggaggtttttccgatgcttatctttatcccgattctcatttttgtcgcgctggtcattgtcggcgcgggcgtcaaaatcgtgccgcagggctatcaatggacggtagaacgttttggtcgctataccaaaacgttacagccggggctcagtctggtggtgccgtttatggatcgcattggtcgcaagatcaatatgatggagcaagtgctcgatatcccttcccaggaagttatctcgaaagataacgccaacgttaccatcgacgcagtctgttttattcaggtgattgacgcgccgcgcgcggcttatgaagtcagcaatctggagctggcgatcatcaacctgaccatgactaacatccgtaccgtgttgggttcaatggaacttgacgaaatgctctctcagcgcgacagcatcaactcacgcctgctgcgtattgtcgatgaagccaccaacccgtgggggattaaagtcacccgtattgaaattcgcgacgtgcgcccaccggcagagcttatctcttcaatgaacgcgcagatgaaagcggaacgtaccaaacgcgcttacattcttgaagcggaagggatccgtcaggcggaaatcctcaaagccgaaggtgaaaaacagtcgcaaatcctgaaagcggaaggcgaacgtcagtcggcgtttttacaggctgaagcgcgtgaacgttccgccgaagcagaagcccgcgccaccaaaatggtgtctgaagctatcgcctccggtgatattcaggcggtgaactacttcgtagcgcagaaatacaccgaagcgttacagcagatcggttcctccagtaacagcaaagtagtgatgatgccattagaggccagcagcctgatggggtcgattgccgggattgccgagctggtgaaagacagcgccaacaaacggactcagccatgatggagttaatggtcgttcatccacatattttctggctcagtctcggcggtttgctgctggcagccgagatgctgggcggaaatggttatttgttgtggagcggcgtggcagcggtgattaccggcctggtggtctggctggtgccgctgggttgggagtggcaaggggtaatgtttgccatcctgacgctgctcgccgcctggctgtggtggaaatggttgtcgcggcgggtgcgcgaacaaaagcacagcgatagtcatttaaaccagcgcgggcagcagctgattggccgacgttttgtgctggaatctccgctggtcaacgggcgcggtcatatgcgcgtcggtgacagttcatggcctgtcagcgccagcgaggatctcggtgcaggtacgcatgttgaagtcattgcgatagaagggataaccctacatatccgagccgtctcgtcttaatcaccctgcccgatgatgacagcagccggagagattttcgataatcgggcagtcggcgctgtcatcgccagggcaggcattcgccagtgccagcagctggtcgcgcatggattgcagctcctcaatgtgtcgttcgatctccgccaccttctccagcgtgcgccgtttgacgtcggcgctgtgccgctgcgggtcgttaaacagattcaccagctcgccgctctcttccaggttaaagcccacctgccgtgcctggcgcagtaaggtcagttcgttgagatgctgctgcgtgtaggtgcgataaccgttttcgctgcgcatcggcggcgtcaccagccccttctcttcatagaagcgaatggctttgctagtcaggccggtaatttttgctacatcgctgatgttcatcgttcgcgcaacgcctcctgtgctttgttaaagggtttcaacagatattcaagcacgtttttttgccagtgcgaatatcgaccgccaccacaataatacaggaagtactgcgcacagagagatgttatacggttttattgcgcttcatgaccattgccacaataaggctgagtaagagtgagccaataatccatatcaacgcacggctaccctgggaccacagactgtagataaagccaacgatcaccaacaacatcaccaacgtaccaacgataagaatcggcaacgaggcgtgaatatcatgacgcaggcggatcgccaccacaaacaccgccaggtagcaaatcaaaaaggtggcgctggcaacgctggcgagtgagcctaaattcagtgccgccgtcatcagcataatcaacaccacgacaatgatgttgccccaggtactctgccgccacagggatttattcattagcttcggcagttcgcgttcgctgcccatgttgtccatgatgttaaacacggcgaacaggttcgcgttaatggctgaagccgtcgccagtaaagcgccgatgacgacgatcacataacccacatgtccgagcagcggagaagcagcctgcgctacggcggtatcggcatatttttctaactctaatgccgatacatcgctaagcaaaaccagtgccagcgagatataaagcaacgtggtaacgccaatcgccaccagaaacgcccgtggcataatgacctgcggatctttcactttatccgccgcgttcgccatcatgccaaagcccgcataggcaaggaaagttatcccaatacaggagaagaacgcaccggagctggggggcgcagagacggaaatatgcgctggttgcagcgaccagacaccggcaataatcagcaataacaggatcatcattttaatgccgacgaggatcacttccagccgccctaccgcatggttgcttaaggagttgaaaagcgtcatcaccgcaatgatccccaacgcgtagagcaaaataaggtgctcctcctggctgccttcatgcaaaaactgcacggcataagcgccaaaagcacgggcgaccatggcgatgctcaccgccagcgtcaacaggtacagtaacgagagcgccagcgaaaagacgccgttgcctaatccgcgacgaaagaagtcgataatgccgccattgctgggatagctcgcccccagacgcgcataggcataaccggaaaacatcgccacaataccgccaaaagcaaaggcgacccaggtcgaggcttccattagcaatgcagcctgccccagcagcgcgaagatccccgcccccaccattgccccaatgccgatggaaacgacgttccatagaccgagaggtttgttaccgttattaccttccgtgttcatcatgatcagcccttaaacacgttatagccgagttgcttagcgaccgatgccaccattttttgaccgcgaacactgttgccttcttcgtccagcggtggtgagaacgcggcaattcccatcacgccagggacgaccgccagaataccgccacctacaccgcttttgcccggtaaaccaacgcgatacgcccagtcaccggagcgaccatacagcccttccatcatcatttcggccagaatgtacggcacgttgtcggcctgaagaacgcgttcatgcgtcagcggattcacaccccccgccgccagcgtcgcgccaagtgttgccagttcaacagtattgaggagcgtggagcactgacgggtgtacacgtcacaggcttccattgcatcacaatagagatatccggcggagtacagcagccaggcaatggcccggttatggaagttggttgtttgttccgactggttgacttcgtcagagagcgctacctgctcaccagccagttgctgttggatatgtaaaattcgctgccagcgttgttcaacattttcagcgttaatcaggctggtggtggcaatggcgccagcatttaccagtggcgaaagcggtttgccgccatgcaactctaaggcgataactgagttaaagggcaatccggtcgggtcagcgccaattttgtcctgtaccgcctgcgggccgacatcctctaacgcaagggctaacgtacagactttcgagatggattccagcgcaaagcggtaatcactgtcacccgcactatagaccttgccatcgcaggtcacgatagccactgccgccagttgaccaggcacattcgccagaaagggaatgtagtcggcattttgaccgccgttaagtgagtgaaattgggtgtaagcctgatccactgcctgctgtaatttgtttgcatctaacatcttttgttaactcctttttatagatgcgggaggtaattcctcaccccggtgccgattttgaggcatcctgatttaacttagcacccgcaacttaactacaggaaaacaaagagataaatgtctaatcctgatgcaaattgagccaattttttaatctttacggacttttactcgcctggtttattaatttcttgaccttccccttgctggaaggtttaacctttatcacagccagtcaaaactgtcttaaaggagtgttttatgtcacaaattatcgacctgaccctggacggcctgtcctgcggtcactgcgttaaacgcgtgaaagaaagtctcgaacagcgcccggatgtggaacaagcggatgtgtctatcactgaagcgcacgttaccgggactgccagtgcagaacagctgatcgaaaccatcaaacaagcgggttatgacgcatctgtaagccacccaaaggctaaaccgctggcggagtcatcaatcccgtcggaagcactgacagcggtttctgaggcgcttccggcagcgaccgccgatgacgatgacagccagcagttgctgctgagcggcatgagctgcgccagctgtgtcacccgcgtacaaaatgcgctgcaaagcgtaccgggcgtcactcaggcacgggtaaacctggcggagcgtactgcgctggtgatgggcagtgcctccccacaagatttagtgcaggcggtggaaaaagcgggctacggcgcggaagcgattgaagatgacgcgaaacgccgtgagcgccagcaggaaaccgccgttgctacgatgaagcgcttccgctggcaggcaattgtcgcactggcggtgggtatcccggtgatggtctgggggatgattggcgataacatgatggtcaccgctgacaaccgcagcctgtggttggttatcggcctgataaccctggcggtgatggttttcgccggcggccatttttaccgcagtgcatggaaaagcctgctgaacggtgcagcgacgatggatacgctggtggcgctgggtactggcgtggcgtggctctattcgatgagcgtcaacctgtggccgcagtggttcccgatggaagcgcggcatctttactatgaagccagtgcgatgattatcggtctgattaatctcggccatatgctggaagcgcgcgcacgtcagcgttcttctaaggcgctggagaaattactcgatttaaccccaccgacggcgcgagtggtcaccgcagagggtgaaaaaagcgtgccgctggcggaagttcagccagggatgttactgcgcctgacgaccggcgatcgcgtgccggtagatggcgagattacccagggcgaagcatggctggatgaagcgatgctgacgggcgaaccaatcccacagcaaaaaggcgaaggcgaaagcgtccatgccgggacagtggtacaggacggcagtgtgctgtttcgtgccagtgcggttggcagccataccacgctgtcacggatcattcgcatggtgcgccaggcccagagcagcaagccagaaatcggtcagctggcggataaaatctcagccgtatttgtacctgtggtggtggtgattgcgctggtcagtgcggcaatctggtacttctttggtccggcaccgcaaattgtttataccctggtgattgccaccacggtactgattatcgcctgtccgtgtgcgctggggctggcgacgccgatgtcgattatttccggcgtcgggcgggcggctgagtttggcgtgctggtgcgggacgccgacgcgctgcaacgcgccagtacactcgataccgtcgtgttcgataaaaccgggacgctgaccgaagggaagccgcaggttgtcgcagtgaaaacgtttgctgatgttgatgaagcgcaggcattgcgtctggcggcggcactggagcaaggttccagccatccgctggcacgggcgatcctcgataaagcaggtgatatgcagctgccgcaggtcaacggtttccgcacattgcgcgggctgggcgtgagcggtgaagctgaaggtcatgcgttattgctgggcaatcaggcgctgttaaatgagcaacaggttggtaccaaagctatcgaagcggagattactgctcaggcatcgcaaggagcaacgcctgtgctgctggcgattgacgggaaagcagtagccctgctggctgtacgcgatccgttgcgtagtgatagcgtggcggcgctgcaacgcctgcataaagcgggatatcgtctggtgatgttgaccggggataacccaaccaccgccaatgcgatcgccaaagaagctggaattgatgaagtgattgccggagtgctgccggacggtaaagccgaagcgatcaaacgtctgcaaagtgaaggacgtcaggtggcaatggtgggcgacggcattaacgacgcgccagcgctggcccaggcggatgtcggcattgcgatgggtggcggcagtgatgttgccattgaaaccgcggcgattaccctgatgcgccatagcctgatgggcgttgcggatgcgctcgcgatttcccgcgcaacgctgcgcaacatgaagcagaacctgctcggtgcctttatctacaacagcatcggtattccggtcgccgccggtattttgtggccgtttactggaacactgcttaacccggtagttgccggagcggcaatggcgctctcgtcgattaccgtagtgagtaacgccaaccggttgctgcggtttaaaccgaaggaataagtacgtcattgcggatgcgctgctttagggcggcgcatttggcatcgacgcatgactgccggatgcggcgtaaacgccttatccggcctacgagatgaagcgatgttttggccttacgcgaccttttttgcacgctcttcacggcgtgccaaatattcagccactgtttcaatccgtcccaattcttcctgggtgcgcatgttgttttcaacttcccaaaaatcaactgccgcctggaggtttagcctaaaatcgactgtggtatcaaaaactttcgccagacggaatgccatctcagtggtgaatttacgattgttattgatcagtgcactgacgctattacgatgaacatgcagcaactctgctaactcattgattttcaaatcgagcggttccagatattcatagagaagaatatctccgggtgtcgtcggttttcttgttgcctgtttcatggtttttaactgttgcttccctgtgaatagcgatgcaagaacatactgaatcatacaaacacattaaacaagtccccaactccatttgcgccatccctcaccgcgcgctagcatgatatttcacaaagggaggtcgtatggatctgttgtaccgggtaaaaacgctttgggccgcgctgcgcggtaatcattacacctggcctgccatcgatatcacccttcccggcaatcgccattttcatctgattggcagtattcatatgggtagccacgatatggctcccctgcccacccgtttgctcaaaaagctcaaaaacgccgatgcgctgatcgtcgaggcggatgtttccaccagcgatacgccttttgctaatttgcctacttgcgaggcgctggaagagcgcattaacgaggagcaactccaaaatctgcagcacattagccaggagatgggcatttctccgtcgctcttttctactcaaccgctgtggcaaatcgcgatggttcttcaggcgacgcaggcacaaaaactggggctgcgggcagaatacggtatcgattaccagttattgcaggcggcgaagcaacaacataaacccgtgattgaactggaaggggctgaaaaccagattaccatgttgctccagctccctgacaaaggactggcgctgctggacgatacgctgacccactggcataccaacgcacggttgctgcaacaaatgatgagctggtggctgaatgcgccgccgcaaaataatgaaataacgctgcccaatacgttcagtcagtcgctgtacgatgtgctgatgcatcagcgaaatctcgcctggcgggataaattacgcgccatgccgccggggcgatatgtggtcgcggtcggtgcactacacctgtatggagaagggaatttgccgcaaatgttgcgctaaaaaaatggccaatatcgctattggcccgtcaaagaggaatttcatttttttattattatgccgtcactttaagctacggtgtaactcgattgtcgctcaatctcaccatcctgccaatactcttaggcaagatgactcttttttttggaccgccatcaggcgtatgcttgcttcgtttttttgtttaaggcaggaaaattaccatgacacccgcagttaaattactcgaaaaaaacaagatttcgtttcaaatccatacctacgagcacgatccggctgaaaccaattttggcgatgaagtcgtcaaaaaattaggtttgaatccggatcaggtctacaaaacgctgctggtggcagtgaacggtgatatgaaacatctggcagtggccgttacgccggttgcaggtcaactggatcttaaaaaagtagcaaaagcgctgggtgccaagaaagttgagatggccgatccgatggtcgcgcagcgttcgacgggatacctggttggggggattagcccactggggcagaaaaaacgtctgccaacgattatcgacgcccccgcacaagaatttgccactatttatgtttccggcggcaagcgcggactggatatcgaactggcggcaggcgatctggcaaagatcctcgatgccaaatttgctgatatcgcccgccgcgattaagcattgtgccggatgcgaacatccggcactttcggattactgccagctcacctcacctttcggttcataaacactcacatccagcggcgagcttttctggatatacgctttcagcacttcggcatcaataaagccggtattcacatagcccggtttgttatcaaggcgcggatagccatcaccgccggtggcattgaagtttaatgtcgccatacggtaagttttcgctggatcgaccggttcgcctttgattttaaggtcgttcagtttgccgtctttcgacacaaagctaacgttggcaaattgcgggtaggcacctgaatctggcttcatctgcgcgacggcggtcaggtaatcaatcacctctttaccggtcatgtcggcatacaccaccacattgccgaatggctgcactttcagcacgtttttatagctgatatcgcctgcttcgatagaatcacgaattccgcctccgctcatcaccgcaaagtcggcaccagtgcgatccatttgtgctgccagaattaaccgccccatattggtctgtacaaaacgcactttgtcacgatcgccttccagacgaccattggtttcgcctattttcacttccagctgcgctttgcctttgttctggaacggtgataacagcgagatcatttgctggttttcagcgatttcaggagtgtaaagcacgcgctcgcttttcccgtcttcccaggtcactttcttcttcaggttcaccggaatcagctggtagttaaccattttcatttcgccattacgaaactcaaaatcagcccgtcccacgtatttgccccactcatgcgcctgcacaatccagatgccgttttgttgatctggtttgcatggcgtacccggcacgtaatcgacctgttttttgttttctgccgccatgcagaccggatcttgcgagtgaccaccgacgatcatcgccagcgatccggcaggcagcgcgcgtgccatctccacatcgcccggtgcgttagagccgtgctcaccattatcgtaatgccccatatgggtcgccgcgataataatgtctggcttttctgtctgttgcagctcctgaatcaccagcttcgcttcatcggcgggcttacgaaattcgacatcagtgaagtattccgggttaccaatttttgctgtgtcatcggttgtcagcccaatgacggcaattttcagatcctgacgcttaaacagcgcccacggtttaaacaggcgctcgccagtacttttctggtagatattcgcggaaagcaacgggaacttggcccacttttcctgctggcgtaatacggtgagcggattatcaaattcatgattaccgatcgccatcgcgtcatagcccaccagattcataccgcgaaaatcaggttcggcatcctgtaagtcagactcgggcacgccagtgttaatgtcgccaccggaaagtagcagcacgctaccgccttcagccgcaacctctttgcggataccatccaccagcgttttttgcgccgccagaccatattcgccatattcattgcgccaaaaatgcccatgatgatcattggtatgcagaactgtaattttgtaggttttatcctgctcatacgccagagcagtttcactcgccagtgtaaatgtggttaacagcgctaacgccacgccccgctgcaataatttcatacttctctccctgacctgatttcaacgtgttgaaaaatagtatgacgcgacatcatagacaagtctgcgtccggtgaagataaatctgcatccagattagaaattctgtattcggcgttgagacttccttcaggcgacgcatacaggtatgttagtcgggtaataatcacaaataagatcattctttacatcgcaaccctgaaaaagtgactttcctatggcaatgagtgaacaaccccagcctgtggcgggcgcggctgcgtcaacgaccaaggcccgaacatcgtttggtattttaggtgctatcagcctctcacatctgctgaacgacatgatccaatcgctgattctggcgatttatccgctgcttcagtcagaattttctctgacatttatgcagattggcatgataaccctcaccttccagctcgcctcttcgctactgcaaccagtggtcggctactggaccgataaatatccgatgccgtggtcgttgccaattggcatgtgctttaccttaagtggtctggtgctgcttgcgctggcgggcagttttggcgcagttctgctggcggcggcgctggtcggtaccggttcatcggtctttcatccggaatcttctcgcgtagcccgtatggcttccggcgggcggcatggcctggcgcaatctatctttcaggtcggcggcaactttggcagttccctgggacccttgctggcggcggtgattatcgcgccttatggcaaaggcaacgttgcctggtttgtgcttgcggcactgctggcgatcgtggtgttggcgcaaatcagccgttggtactcggcacagcaccgaatgaataaaggaaaacccaaagcgacgattatcaatccactgccgcgcaacaaagtggtactggcggtcagcattctgttaatcctcattttctcgaaatatttctatatggcgagcatcagcagctattacaccttttatctgatgcaaaaattcggattatctatccagaatgctcagcttcatctgtttgccttcctgtttgccgttgcggcaggtacggtgatcggcgggcctgtaggggataaaattgggcggaaatatgtgatttggggctctatcctcggcgttgcgccgtttacgctgattttaccctacgccagcctgcactggacgggggttttaacggtgattattggatttatcctcgcttcggcattctctgccattctggtttacgctcaggagctgcttccgggacgtatcggtatggtttctggactctttttcggttttgcttttggtatgggaggtctgggagcggcagttctggggcttatcgccgatcacaccagtatcgagttagtctataaaatctgtgctttcctgccactattggggatgttgaccatattcctgcctgataaccggcataaagactgatttcattgcagccaaaggcaaactttggctgcatcgttttacagtcgccataagcctttcctctgttaaaccgccttctgttttccgatccgtgctttttttgcagctaattccatttttctgcaaaattcaataattattcatgaacatcatcaatgaaattgtcataaactattacctgtaattttggtttccccggccaaaaatggacaataaccaccaggaaaaggagacggaatgcatcacgccaccccgcttatcaccaccattgttggcggccttgtgctcgcctttatcctcggcatgctggccaataaactacgtatttctcctctggtgggatatctgttagcgggtgtgctggcaggaccattcactccgggctttgttgccgataccaagcttgcgccggaactggctgaactgggcgttattttgctgatgttcggcgtcggtttgcatttttcgctgaaggatttgatggcggtaaaggccatcgccattcccggtgcgatcgcccagatagccgtggcgacgctgctgggtatggcgctctctgccgtgctgggctggtcgttaatgaccggtatcgtgttcggtttatgtctttccaccgccagtaccgtggtgttactgcgcgcacttgaagaacggcaattaattgacagtcagcgtgggcaaatcgccatcggttggttgattgtggaagacctggtaatggttctgacgctggtgttgctgcccgcagtggcaggaatgatggaacagggcgatgtgggctttgccactcttgcagtcgatatggggatcaccatcggcaaagtgatcgcatttatcgccattatgatgctggtaggtcgccgtctggtgccgtggattatggcacgcagcgcggcaaccggttctcgcgagctgtttaccctgtcggtgctggcgctggcgttagggattgcctttggtgcggtagagctgtttgatgtctcctttgcactcggtgcgttctttgccgggatggtactgaacgagtctgaactgagtcaccgtgccgcccacgatacgctgccattgcgcgacgcgtttgcggtgctgttttttgtctccgtcgggatgttgtttgatccgttaattctgattcagcaaccgctggcagtgctggcgacgctggcgattattctgtttggtaagtcgttagccgcatttttcctggtgcgactgtttggtcactcccaacgtacggcattaaccatcgccgccagcctggcgcagattggtgagttcgcgtttatcctggcgggactgggaatggcattgaatttactgccgcaggccggacaaaacctggtactggcaggggcgatcctgtcgattatgctcaacccggtactgttcgcactactggagaaatatctggcgaagaccgaaacgctggaagagcagacgctggaagaggcaatcgaagaagagaaacagatcccagtggatatttgcaaccatgcgctattggtgggttacggtcgtgtaggcagcctgctgggggagaaattgctcgcctctgatattccgctggtggtgattgagacgtcacgaacccgtgttgatgagctgcgagagcgtggggtccgcgctgtattgggcaatgcagcgaacgaagaaattatgcaactggcgcatctggaatgtgcaaaatggctgatcctgacgatccccaacggttatgaagcgggtgagattgtggcgtctgcccgcgcgaaaaacccggatattgagattatcgcccgcgcccattatgacgatgaagtgacgtatatcaccgaacgtggcgcgaatcaggtagtgatgggtgaacgtgaaattgcccgtactatgctggaactgctggaaacgccaccggcgggtgaagtggtgacggggtaaacggtggttgccggatgtaaaatatgaaaaatatgtaggcatgataagacgcgccagcgtcgcatcgggcatcgagagccaaatgccagatgcggcgtgaacgccttatctggcctacgaaccgacgataacttaacgatcccagtaagactcttccaggctgtcttcacgctccggcaagccgcgcgttaaacgaggtgaatgctggttcagtacctgatagctcacacggttagcatatttacacacctgcgctaacgatgaataagttaaccaggtgaatttatgtttgctggagtttggtacgttgctacgatggtagctgttggcggtaatgtcatgcagcaacgctgccaatgcgccatcccccgctccattagtgttcatgattttttccggcccgcccatgtacggcgcaatgtgcgaatatacacgcagcggattctggcaatccttgtggcgcatggcgcggctaaactcatactggttgaattccgctatagcgcccggcagcagcggatgctgggttttacgtttcgcttcgtcttcggtaaagcccgccatatacaagccgattggcccggcggtgcacagcaccagatctacccagtccagcgccttgtcagatgccaacaacggatcgctttctccggtcaacgcttcggcttcatcttcgttcatcgcaaggatagaaacgtggtctttgaggaattgctgccaccactgcggattctcggcaatgacaaacttggtgcccagcgtcagcaccaccggtacgttatatttcttcgcgtactcaatggctttcatggttgcttccggcatgggttcacccggtttgcaacgcaccagataagaggtgagaaccagtgccgaggctccggcaatcacatcttccggaatgctttcagcccgcagctggttcatgtggcctggactgatagcaaaggtacgttccccggactcgccaatcagcgtaaagcaacgaccaatcgggccatccacgccttgtagatagttaagatcggtacggctggaagtgttacacaggtaacgataggcataactgccaatttcaatattgctgcacatgacgcccagcagcaccgaacggtcgtccgcgagcaccgagtagttgtgcatggtgttaccaatggtgccacccgcaaactgatgggtaatcaggtttttctgttttagctcctgataaagcgcttcggctacgtcatcctcaatcaccagtgaatgcccggcgcttaatccataacgctcaatgaattcatcatccactttcgcttcaatatcgaccagcgtctggtcaatacctacgacccaggcggcgctggtttcgttttctggctggaattgctgaagcagcggatcgcgtgcatttacagggaagtaatgtttggatttacgtttaccgggaaatttcatggttgtttttacgggtggttaactgagcggcgaatgttaacacaatctgacgggagcgcgcgagacgcagccagtttcaatatcagcaggcgggatcgcattttcatggcagtggttccttacaatgacgtaatttgaaaggagtttttgtatgaagccggaaaacaaactacctgttctggaccttatttctgctgaaatgaagaccgttgtgaatactcttcagccggatttaccgtcctggcccgcaacgggaacgattgctgagcaacgacagtattacacgcttgagcgccgattctggaatgcgggcgctccagaaatggcaaccagagcttacatggttccaacaaaatatgggcaggtggaaacacgtctcttttgtccgcagccagatagcccggcgacgctattttatttgcatggaggcggttttattctcggcaatctcgatacccacgatcgcatcatgcgcctgctggcaagctacagccaatgtacggtgattggcattgattacaccctttcacctgaagcgcgttttccgcaagcgatagaggaaattgtggctgcttgttgttatttccaccagcaggcggaggattatcaaatcaatatgtcccgcattggctttgccggtgattccgcaggtgccatgctggcgctcgccagtgcgttgtggttgcgtgataaacagatcgattgcggtaaaattgcgggtgttttgctgtggtatgggctttacggattacgggattccgtgactcgtcgtctgttgggcggtgtctgggatggcttaacgcaacaggatttgcagatgtatgaagaggcgtatttaagcaacgacgcggaccgcgagtcaccgtattactgtctgtttaataatgatctcactcgcgaagttccgccctgttttattgccggggcggagttcgatccgctgctggatgacagccgtctgctttaccagacgttagcggcgcatcagcagccctgtgagttcaaactctacccaggtacgctgcatgcctttttgcattattcacggatgatgaaaaccgccgacgaggctcttcgcgacggcgctcagttctttaccgctcagctttagcgatacgcggcaacaagattggccatcatttcgatatgttccggcgtggcattaagcgccggaatatattcatattttttcccgccggcaccgaggaagacctcacggttttgctcggcaatctcttccagcgtctccagacaatccgcagcaaagcccgggcacatcacctgaatatgacctacgcctttttctccgagcattttcagcgtttcgtcggtataaggcatcagccagggttcccggccaaagcgcgactgaaaggtcatcatcactttttccggtgccatccccagtgcggaagccagttcgcgagtcgttgtgcggcaacgttgcgggtaatcatcgccttcatctgcataacgctgaggaatgccatgataagagagcagcagcagatccggttcgccatgtttggcaaaagaagcgcgtacgctgttcgccagtgcattaatgtaatcgtggttatcggcgtaatcacgaataaacgatatccccggaatgctacgtttgcgcgccagaatgcgtgccagttcatcccataccgcaccgaccgtagaacaggagaattgcggataaagcggcagcaccacaatatgatctacatgctctgccaggagttcatttacggcgctttccagtgatggcgagccgtagctcattcccagcgctacgggcgtctccggtaaacgttgtgccagcgcctgctgttgctggcggctgtaaaccatcagcggcgagccaccttccatccagacagaggcatacagcttcgccacacgcggcgagcgcagcggcaaaatcacgccgcgcagcaatggccaccataacaaccgtgaggtatcaaccacgcgtctgtcgcttaaaaattgtttcagatagcgttttaccgcttcaggtgtgggggcatcgggcgtacccaggtttgccagcaggataccggttttagtctgacgcattaccgcctcttatcgattcaacttgttgataattgtagcggaaaagtgaagaagaagaactaattgctgtaagaggtattgcctgaggaggatgagcagacctgcccgaaagcagatctgctgcggcttgattagccgaggattttttccagatcagcgcgaacttcagcaaccggcttggtgccgtcaactttcgcgtatttggtattacccgcttccgcttctttggagtagtagccgatcagcggtgctgtcatctgatggtattcaaccagacgtttacgtacggtctcttcctgatcatctttacgggtagtcagttcttcaccggtaacgtcgtctttgccttctactttcggcggattgaatttaacgtgataaacacgaccagacggcgcgtgaacgcggcgaccgacgatacggtcaacgatcagttcgtccggtacgtcgaattccagaacgtaatcaacattgatgcccgcttctttcatcgcgtctgcctgcggaatggtacgcgggaagccgtccaacaggaaaccattatggcagtcttcctgagcaatgcgctctttaaccagcgcgatcaccagttcgtcggtgaccagtttgccagcatccataatgtcttttgcttgtttacccagctcggagccagatttgaccgcagcacgcagcatatcgccagtggagatttgcggaataccatatttctccatgatgaactgagcctgagtccctttccccgcgcccggagcgccaagcagaatgatacgcattgcgaaaatccccttaaaatgtgtcgaattttttgaaaaagcgataaacgataccaccatcaggcgattgcctcaagaaaggcaccaggggctgaaacggttaatggcgagataatttgcggaaagtgcagataatgaaaagaaaaatgccggatgacacaaaggtcatccggcatgacatcaggaaaccagcagctggttcatacgacgaataaacaggttcggatcttccagcgtgccgcgttctgccagcagcgcctgatccagcagcagttctacccactcgctgaacttggcttcatcttcagtatctgccgcacgtttcaccagtacgtgatccgggttcagttcgaagatgtatttcacttctggcactttctggcccgccgcagcgaacagtttcgccatctgagtgctcatttcgtccgcgtcggtcgaaacgatcgctggcgtatcggtcagacggtgagtcagacggacatctttcacgcgctcgccgagcagggctttcacacggtcgatgaacggagtcagtgctttctccgcttctttcgcgctctcatcaacttcgtcagccagtttttccagcgactcgtcaactttagacaccgactggaacggtttaccgtcgaactcagtcagatagttcatcatccactcatcgatgcggtcggaaagcagcagaacttcgatgcctttcttacgcagcagttccaggtgcgggctgctcttcgctgccgcatagctgtctgcagtgatgtagtagattttctcctgcccttctttcatgcgggaaacgtagtcttccagagacacggtctgcgcagaagaatcggtatgagtagaagcaaaacgcagcagtttggcgatcgcttcctggttagcgaaatcttccgccggaccttctttcagtaccaggccaaactgttgccagaaggtctggtatttttccgcgtcgtctttcgccagtttttccagcatttgcagcacacgcttggtcagcgcattgcgcaggttacgcgttaccgtgctgtcctggaggatttcacgggaaacgttcagcggcagatcgctggagtcaatcagaccacgcacgaagcgcagatagttcggcatgaactgttctgcgtcgtccatgatgaacacacgctggacgtacagtttcaggccgtgtttatgatcgcggttccacatatcccacggagcctgggacggaatgtacagcaggctggtgtactcctgcttaccttcaacacggttgtggctccaggtcagcggatcgttaaagtcgtgggcgatgtgtttgtagaactctttgtactcttcatcggtgatttccgacttgttacgagtccacagcgcctgcgctttgttgattttttcccaggagataacggtttcgccgtctttctcttcgcgtttttcgatctctaccggcagcgcgatatggtcggagtatttgctaatgatggaacgcacgcgccagtcatcgaggaactcgtcttcgccttcacgcagatgcagggtgatttcagtaccacgatcttctttggtgatgtcggcaacggtgtattcaccttcgccagccgattcccagaacacgccattttctggtttttcgcctgccgcgcgagtacgcacggtcactttgtcggccacgataaacgcagagtagaaaccaacaccgaactgaccgatcagctggctgtctttcgcctggtcagaacccagggattcgaggaatgatttggtaccggatttagcgatagtccccagatggtcaatcacttcgtcgcgggtcatccccacgccgttatcggagatggtcagcgtgcgcttgtctttatcgaaagagacacgaacgcgcagttcgccatcaccttcgtacaggtccgggttagatagcgcacggaaacgcagcttgtccgccgcatcggaggcgttagagataagctcacgcaggaagatttctttattggaatagagagaatggatcatcaggtgcagaagctgtttcacttctgactgaaaaccacgagtttcttgtcctttcatgtaggtctacctcaataatgccattttaaggttaaaaacaggatgagggagagatggggacaagggagaataatttcaagcgagagcaggtgatcctgctctcgtttgcttaaaaacgaatcttatgacgcccggcaagggagtgtgacagcgtggtgccatcgaccatttccagttcgccgccaaccggtacgccatgagcgattcggctggcttccacgtcatattgcgcgcaaagctcggcaatgtagttagcggtagcttcaccttcaaccgtgggattggtggcgaggatcacttcagtgattttttcctctgccagacgctgttccagacgatcaagcccgatatcatccggaccgatgccgtccagcggtgacaggtgccccatcaacacaaaataacgacctgaaaactgccccgtctgctcaatggcgtaaatgtccgccggactctccaccacacagatttgaccgttttcctgacgacgcggattcgaacagatgttacagacttcctgttcggtgaaagtgcggcaatcggcgcagtggccgatttccgacatcgcccgggtgagcgcctgcgccagacgcatcccgccgctacgatcgcgctgaagcagcgtgaacgccatacgctgcgccgacttcgggccaacgcccggcagacagcgcagtgcttccataagctgtgttaacagcgggctggtttgcatcagaacggcatcttaaagccaggcggcagctgcattccggaggatacagaggccattttttctttctgcgtttcttcaatacgacgtgctgcgtcgttgaatgctgcagccaccaggtcttccagcatctctttgtcgtcttccagcaggctcgggtcgatctctacgcgacggcagttgtgtgcaccgttgatggtcacttttaccagacctgcgccagattcgccggtgacttccagctgcgcgatctcttcctgcattttctgcattttttcttgcatctgctgggcttgcttcatcaggttacccagaccgcctttaccaaacataggtttctctctcaatcacgttaaggatgacgaacgtaagctgtgcttacgatcaaatggggcggatactttcttcatccagctccgcatcgaagaaccgacgcagggtctgaatattattatccgcaataatggactcgcgcgcctgcgcaagtttttcttcgtatatcgcctgacgccactccagcggcgtacgcaccgcgggattatcatcttcaacgatagtcagttcaaccgttgaaccttttaacatgctcaacgcttcagccagtttttgctgtgcaccgcggttgttcaaatgccgctgagaggagcgcaaatgcagacatactgcgttgtcgctctcctctttccaggcatttaaggccacctgttcgaccagttttggtagcgaaagttgactcacctgtgccgcccacgcgtcgcgctcaatggcttctgccgccagcttcgccgccagttccggcgttttttcatgttccagcgcttttttcagcgccttcggcgtggcgaccacttctttttgctgcatcactggagtggtagccttccagcgatacgcttcttttttggctggcgctttttccagcgccgatggcaccggacgcgcctgaacgcgatcggtgaccgaagccagtctttccagcgcagcgttattcaccggccgcgcgcgggtagcggctgccggttcactcttttttgctttggttgctccctgcacgcgctgcaactgctggcgcgccgccagcacctggctggtggtttccgggagcggtacagtcggtgcctgctgcggcgctgattgcggttgcggcggcacctgggttggcgtcattactgccgttggcgcgacgggcgcaaaggactggcgtggcacttctggctcaggcagaggcatacgtggatggaacgccagcgcgcgcagcagcgtcatctcaacgcccatgcggcggtccggcgcatacggtaattctttgcgaccaatcaacagcgtctgatagtaaagctgaatatccgtcggcggtatggtgcgcgccagttcacgcatccgcagctcaatggcggccatgtcgttgccaagtgcagcaggcgaaagttgtaccatcgcaatacgatgcaacaggccgagcatttccaccagcaacgcttcccactcgataccacgggcagcggcttcattaatcagcgccattacgcgctcgccgttggcctcgaccatcgcttcaaccagcgacagcgcctgatcgtcgtcaagcgtacccagcatcgcactgaccgcctgggttgaaacctggccgtcaccactggcaatcgcctggtcggtcagacttaaggcatctcgcaggctgccttcagcggcgcgtgccagcaattgcagcgcccgcggctcgtgagcgatatgttcttcgttgaggatgtgctcaagctgatggcgaatttgctcgacatccagcgccttgagatgaaattgcaaacagcgcgacaaaatcgtcaccggcaatttctgtggatcggtcgtcgccagcagaaacttaacgtgctccggcggctcttcaagggtttttaacagtgcgttaaagctgtggcgcgacagcatatgcacttcgtcgatcagataaactttgaaacgaccacgcgccggagcgtactggacgttatccagcaggtcgcgggtatcttcaactttggtgcgcgaggcggcgtcgatttcaatcagatcgacaaagcgcccctgctcgatttcacgacagttatcgcacacgccgcacggcgtcgcggtaatgccggtttcgcagtttagccccttcgccagcagtcgggcgatagaggtttttccgacgccacgggtaccggaaaaaagataagcatgatgaatacgccctaacgacaagccgttcgccagtgcggtcagcacatgttcctggccgacgacgtcagcaaaggtttgtgggcgccattttcgggctaagacctgataactcattggcaggctctgaaacgctggaaggtggattcacgaaggggtaatgctaacacagccccgtcagaacggcgaggctgaatgcacatcttgtgctgtccgtagcgtgggcagcacaagactggcgataattaatggcccgggaacgggacaaggctgtagctggtaatgccctgtttttcgagacgctgttcgccgccgagatcgaacaggttgataatgaacgcagcgtcagccacttcaccacccagacgacggatcagtttaacggtcgcttcgatagtgccgccggttgccagcagatcgtccaccaccagaactttgtcgcccggtttgatggcatcaacgtggatctccagctgatcggtgccgtattccaggtcgtaagtttcactgatggtttcacgcggcagtttgcccggtttacggaccggtacaaagccaacgcccagacccagagctaccggagcgccaaacaagaagccacgcgcttcggtgccgacaactttggtaatgcccgcatttttgtaacgctcaaccagcaagtcgatgctgagagcgtaagctttcgggtcttccagtaagctggtgacatcgcggaaaaaaatgccgggttttgggtagtcctgaatgcttttgatgctatttttgagatactcaagctgctgtgcagtcgcggtcataagtgtatgcctgcttgttacggtggtactcacggcgcgttttaaacgtatcaaaagtaacagttgtttaacctttgaccgcctgcgcctgtgctcgaaaacgccagaatgtactggctgtacgcaataattgcaactgcgattgttgtgcttcagtgcttttcttgcttttcatcaatcaccggaattcgccacatatagaaaagcaaacaggcgagaattaccagcaacatgatgcgcacccatggcatctggacgaaccacagagaaatggcaaacgtgagcaaaataagcaaaatcgcccgcggtttgacgccgcgcggcatcgcatgatgtttctgccagaaacgtagatagctgccaaaccatgagcggtacagcaaccaggcgtgaaagcgcggggaagaacgggcaaagcaccaggccgccagcaggataaacggcgtcgtcggtaataccggtaataccacgcccagcgtacccagcactaccgccagccagccaatgatgattaaaatgattcgttgcatattgagtgttgtcagcttacagagtggctactttagcataacaattatcattttcattgaggtcttatcgtgaaaaccgccctgctgctggaaaaactggaaggacagctcgctacgctgcgtcagcgttgtgccccggtagcgcaatttgccacgctaagtgcccgttttgacagacacctttttcaaacccgtgcgacaacactgcaggcttgtctcgatgaggcgggcgataatctggctgcgcttcgtcatgcagttgagcagcaacagctgccgcaagtggcctggctggcggaacatctggcggcacaactggaagccatcgcgcgtgaagcctccgcctggtcattgcgcgagtgggacagtgcgccaccgaaaattgcccgctggcagcgtaaacgtattcagcatcaggattttgagcggcggctacgtgagatggttgccgaacgcagagcccgcctggcgcgggtgaccgatctcgtggaacagcaaacgctgcatcgtgaagtggaagcctatgaagcgcgcctggcacgctgccgccatgcgctggaaaaaatcgaaaacaggctagcgcgcttaacccgctagcaatggagagagtatgtcactggaaaatgcccctgacgatgtcaaactggctgtcgatttgattgtgctgctggaagaaaatcagatcccagcccgcaccgtgctgcgcgcgctggatattgtaaaacgcgattatgaaaagaaattaacgcgcgatgatgaggcggaaaagtgagaaataaatggggccgctaaatgtcccctaagattgtgggcaaacgcaaaactgcctgatgcgctacgcttatcaggcctacaccgctcctgcaatacattgaattcttgcggtttcgtaggccggataaggcggtcacgccgcatccggcatgaacaacgcgcactttgtcagtaatctcggggcaactaaatgtcgccccctttggttattaccctaccgctggcgtcgggtcatcgcctttgtagtcgcgtttgacttccgtcacctcatcgcccttctcgttgtgcagatgcacttcaagctggttaaaggcaatgttgatgtcgttttcacggcacagctgatcgatagtacggttcagctcatcgacagtacgactacggtcacgcagttcacgcacatacagacgcagctcatgatccaacgtgctggcaccaaacgccgtaaagaagacttccggcattggttcgtgcatcacccttgggtgctcagtcgccgccttcagtaacactttacgcactttttccagatcggagccataggccacgccgagacggatcaccagacgcgtagtagtgtcagtcaacgaccagttgatcagacgctcggtaacaaacgctttgttcgggatgatcacttctttgcgatcgaaatcggtaatcgttgtcgcacgaatacggatcttacttaccgtccccgagaagctaccaatggttaccgtatcgccaatacgcaccggacgttcgaacagaatgatcaaaccggagacgaagttaccgaaaatttcttgtaaaccaaaaccaagacctacggataatgctgcggccagccactggagtttatcccaagagacgcccagcgatccgaacaccgtcatcgcaccaacggcaataatgatgtagttaaggatggtagtaatggcatacgacgcgccctgacgcatattcagtcgcgagagcaccagcacttccagtaaaccaggcaggttgcgaatcaacgcccaggccaccattgaggcgataatcgcaaacaacagactgcccatggtgacgtttttcaccaccgcagcgccagcttcagtgccgttgtaatgccagagcgtgatgctgtcgagatagctgaacacggtgatcaaatcggaccaaattgcccagaacatgacaccgaacagcgcaaacatcagcaacatggtaatacgcagcgtctgctggttaacctgttccagtgcaatggtgggttcttccggcggttcggcaccttctgcgccctctttcaccagattctgccgacgcgccagcgcacgacgccaggcgatacgccgcgccgctacgcttaagccgcgcaataccgtctggtagagcaagttccagatgatcaccagataaacggtttcaatccaacgcccggagaggcgcagcgtggtgtagaaataacccgtggcagtcagcaccatcaatgcaatcgggataatcgacagcacggtaatggtgaccagtcgcatggtgtgcgactctttatcacgccagctttcgcggcacattggccataccaggaaggcaatcagcagcaggttgaagaaaatcatcgcctgccccagcacatcatccatcagatgcagcggggaaagttctgccaccacagaccagaaatggataggcagcaacgcgagactgatgcggacaatttgccgacgccagtggctggtctgctgctccggcatgccgaagtgacgcacggcaacgccgtttttctccagtaccttccagcacaggccaaacaccagccagaaaatcgccagttttttactgaacgaccatagcagttcgctgatgttgagctgcatggtcaacagaatcaggccaaccgcgagaataatcaggcacaccggcagcgcgcggatcaggtcgataaggatcgcttttggtgtgttgagctggctatcgttacgcagggaacccacagcggaagccagtttctgttgatacgctttcagccagcccagacgccagtggatcagcccggcaatcaacagcagcggcaaaccggcgaggaaagcgataaaaacggcaggccaggctttttcccagttcaccgtgattttcatcgacttaaattcatctttcaggctttgcgggaacgctttgatccagtcccagtccattggacggttactgttcacccaaaagatttgctgagtcaggatggatttcaggtttttcgatacgctcattaactgctgctggttgatttgcaggttaatggccatcatcagctggttacccaactgtttgttgagttgatccagcaattcgcgacgcatatcaaccacttgcaataacgcatcgtgaacttcgctgttgacttcgttggtgtgaccttcttccagtttgttgacgaacgcatcgctctggaagagtgcatcacgctgctggttaacttcaaactgttcgagacgcaaatccgcgatgcggttggtcatgttttccagttcatccgccgagggcagcgtttgttgttgctggtaaagaatacgagacaacagcaggctgcccttcaggacggcaatctgctctttaatattgcgttccgattgcagcgcccgctccagccagtttttgactttaatgttttgctgcatcaactgattaccgttttcagtcgcggtaatcagacgctgacttaactgctggttaatttccagttcctgtttcaccagcggattagcctgaatacgcgcggcttcatccggggagacggcttcctgcgccgttttttcagttaaagtcaggcgcttgctgtttaccgcttcttgcaacagctgcaactggtgctccagacgggcgctgttcgccgtcacgtaatcacgttgcttttgcaaggtatcctgcaagacggtgttcccttccaggcttttacgctgctggtcaatctccgcattcagcaacgcctgctgagcctgcattaacactttctggctgggacgtaaggcagtctcgccgacatcagtcccatccagacgactgcgaatttgttgcagctgctgcgaagcgttatacatcgcattttgcacgcgttcgggctgcgtctgtaacgaaaccagctggctgttataagacgccagatcgttttgtgcgttttgcaaatcgtccagcgcctgggcaacgcgagtttccagctggcgcaacgaaagcgtactcagaattttgcgcgtttcttcgtcgttatcgacatcgctaagtgctgttaacgccgcggtcgcctggcgcattttttccggcgcttcagcgactttttgccgtagctgaactgtctcttcttttatgcgatcgattttatcgagggtggctaatgtatctgtcagatcctgctgcaccagtttgtcctgagcagaaagatctttttgtttatttagtgagtcaagttgcgcctgcaggtccgcttttgtcggcagatcaccattcgatgacgcccgcgcaaacgccgtgttctggcataacaagacaaaaacaaaagcaataaatgctgaaaaaacaaaatgccgtgatcgtttgtaatactggaacatagtcatgatgaatgaaggtttctgaacctgaagaacgacctgaaaaagtcaaaccgcaagaatatcacgacgcagtgaaccagaatagcaacgacgaaaatgtccaggaaaaatcctggagtcagattcagggttattcgttagtggcaggattacgaagcgtggggcacaggagatacatctccagtaagatggcgacgtaatcgcgggcttcttttttaagatcaaaagattgcggggcaaagagccagttttccatcaggccggaaatatagccgcgcataataattgctgcccgacgcgtcattaaatccgcaggcaacattttcgcttcaatacaatgttttaacgtttgttctatacggtcataactttccagacagagattacgttgtgcctgttgcacaacagccatttctccgacaaattcgcatttgtggaatataatctccatcaataatcgacgccgttcttctgtcaccgtggattcaagaacatgaattaatatctctcttaatactgagagtggatcgccagggaattttgcctgatactcaagctctagttcaccaatattggattctgacagttcccagatctcactgaacaaatccgacttgtctttaaaatgccagtagattgcaccgcgcgtaacgccagctgcttttgcaatctcgcccagcgaggtggatgataccccctgctgtgagaaaagacgtagagccacatcgaggatgtgttggcgcgtttcttgcgcttcttgtttggtttttcgtgccatatgttcgtgaatttacaggcgttagatttacatacatttgtgaatgtatgtaccatagcacgacgataatataaacgcagcaatgggtttattaacttttgaccattgaccaatttgaaatcggacactcgaggtttacatatgaacaaaaacagagggtttacgcctctggcggtcgttctgatgctctcaggcagcttagccctaacaggatgtgacgacaaacaggcccaacaaggtggccagcagatgcccgccgttggcgtagtaacagtcaaaactgaacctctgcagatcacaaccgagcttccgggtcgcaccagtgcctaccggatcgcagaagttcgtcctcaagttagcgggattatcctgaagcgtaatttcaaagaaggtagcgacatcgaagctggtgtctctctctatcagattgatcctgcgacctatcaggcgacatacgacagtgcgaaaggtgatctggcgaaagcccaggctgcagccaatatcgcgcaattgacggtgaatcgttatcagaaactgctcggtactcagtacatcagtaagcaagagtacgatcaggctctggctgatgcgcaacaggcgaatgctgcggtaactgcggcgaaagctgccgttgaaactgcgcggatcaatctggcttacaccaaagtcacctctccgattagcggtcgcattggtaagtcgaacgtgacggaaggcgcattggtacagaacggtcaggcgactgcgctggcaaccgtgcagcaacttgatccgatctacgttgatgtgacccagtccagcaacgacttcctgcgcctgaaacaggaactggcgaatggcacgctgaaacaagagaacggcaaagccaaagtgtcgctgatcaccagtgacggcattaagttcccgcaggacggtacgctggaattctctgacgttaccgttgatcagaccactgggtctatcaccctacgcgctatcttcccgaacccggatcacactctgctgccgggtatgttcgtgcgcgcacgtctggaagaagggcttaatccaaacgctattttagtcccgcaacagggcgtaacccgtacgccgcgtggtgatgccaccgtactggtagttggcgcggatgacaaagtggaaacccgtccgatcgttgcaagccaggctattggcgataagtggctggtgacagaaggtctgaaagcaggcgatcgcgtagtaataagtgggctgcagaaagtgcgtcctggtgtccaggtaaaagcacaagaagttaccgctgataataaccagcaagccgcaagcggtgctcagcctgaacagtccaagtcttaacttaaacaggagccgttaagacatgcctaatttctttatcgatcgcccgatttttgcgtgggtgatcgccattatcatcatgttggcaggggggctggcgatcctcaaactgccggtggcgcaatatcctacgattgcaccgccggcagtaacgatctccgcctcctaccccggcgctgatgcgaaaacagtgcaggacacggtgacacaggttatcgaacagaatatgaacggtatcgataacctgatgtacatgtcctctaacagtgactccacgggtaccgtgcagatcaccctgacctttgagtctggtactgatgcggatatcgcgcaggttcaggtgcagaacaaactgcagctggcgatgccgttgctgccgcaagaagttcagcagcaaggggtgagcgttgagaaatcatccagcagcttcctgatggttgtcggcgttatcaacaccgatggcaccatgacgcaggaggatatctctgactacgtagcggcgaatatgaaagatgccatcagccgtacgtcgggcgtgggtgatgttcagttgttcggttcacagtacgcgatgcgtatctggatgaacccgaatgagctgaacaaattccagctaacgccggttgatgtcattaccgccatcaaagcgcagaacgcccaggttgcggcgggtcagctcggtggtacgccgccggtgaaaggccaacagcttaacgcctctattattgctcagacgcgtctgacctctactgaagagttcggcaaaatcctgctgaaagtgaatcaggatggttcccgcgtactgctgcgtgatgtggcgaagattgagctgggtggtgagaactacgacatcatcgcagagtttaacggccaaccggcttccggtctggggatcaagctggcgaccggtgcaaacgcgctggataccgctgcggcaatccgtgctgaactggcgaagatggaaccgttcttcccgtcgggtctgaaaattgtttacccgtacgacaccacgccgttcgtgaaaatctctattcacgaagtggttaaaacgctggtcgaagcgatcatcctcgtgttcctggttatgtatctgttcctgcagaacttccgcgcgacgttgattccgaccattgccgtaccggtggtattgctcgggacctttgccgtccttgccgcctttggcttctcgataaacacgctaacaatgttcgggatggtgctcgccatcggcttgttggtggatgacgctatcgttgtggtagaaaacgtggagcgtgttatggcggaagaaggtttgccgccaaaagaagctacccgtaagtcgatggggcagattcagggcgctctggtcggtatcgcgatggtactgtcagcggtattcgtaccgatggccttctttggcggttctactggtgctatctatcgtcagttctctattaccattgtttcagcaatggcgctgtcggtactggtagcgttgatcctgactccggctctttgtgccaccatgctgaaaccgattgccaaaggcgatcacggggaaggtaaaaaaggcttcttcggctggtttaaccgcatgttcgagaagagcacgcaccactacaccgacagcgtaggcggtattctgcgcagtacggggcgttacctggtgctgtatctgatcatcgtggtcggcatggcctatctgttcgtgcgtctgccaagctccttcttgccagatgaggaccagggcgtatttatgaccatggttcagctgccagcaggtgcaacgcaggaacgtacacagaaagtgctcaatgaggtaacgcattactatctgaccaaagaaaagaacaacgttgagtcggtgttcgccgttaacggcttcggctttgcgggacgtggtcagaataccggtattgcgttcgtttccttgaaggactgggccgatcgtccgggcgaagaaaacaaagttgaagcgattaccatgcgtgcaacacgcgctttctcgcaaatcaaagatgcgatggttttcgcctttaacctgcccgcaatcgtggaactgggtactgcaaccggctttgactttgagctgattgaccaggctggccttggtcacgaaaaactgactcaggcgcgtaaccagttgcttgcagaagcagcgaagcaccctgatatgttgaccagcgtacgtccaaacggtctggaagataccccgcagtttaagattgatatcgaccaggaaaaagcgcaggcgctgggtgtttctatcaatgacattaacaccactctgggcgctgcatggggcggtagctatgtgaacgactttatcgaccgcggtcgtgtgaagaaagtttacgtcatgtcagaagcgaaataccgtatgctgccggatgatatcggcgactggtatgttcgtgctgctgatggtcagatggtgccgttctcggcattctcctcttctcgttgggagtacggttcgccgcgtctggaacgttacaatggcctgccatccatggaaatcttaggccaggcggcaccgggtaaaagtaccggtgaagcaatggagctgatggaacaactggcgagcaaactgcctaccggtgttggctatgactggacggggatgtcctatcaggaacgcctctccggcaaccaggcaccttcactgtacgcgatttcgttgattgtcgtattcctgtgtctggcggcgctgtacgagagctggtcgattccgttctccgttatgctggtcgttccgctgggggttatcggtgcgttgctggctgccaccttccgtggcctgaccaatgacgtttacttccaggtaggcctgctcacaaccattgggttgtcggcgaagaacgcgatacttatcgtcgaattcgccaaagacttgatggataaagaaggtaaaggtctgattgaagcgacgcttgatgcagtgcggatgcgtttacgtccgatcctgatgacctcgctggcgtttatcctcggcgttatgccgctggttatcagtactggtgctggttccggcgcgcagaacgcagtaggtaccggtgtaatgggcgggatggtgaccgcaacggtactggcaatcttcttcgttccggtattctttgtggtggttcgccgccgctttagccgcaagaatgaagatatcgagcacagccatactgtcgatcatcattgatacaacgtgtaatcactaaggccgcgcaagcggccttttttatgcataacctacgaacattaaggagtaattgaaccaccaactcaggatctcatacgaaaaccagtattaaccacggataaaattcataaaaaatactgattgttagttaatttatattaagtagcgctaatagatttaataatccataatcatttagaggctattcttaattatttgcggtaattctttattcattcctcggttattacgtcatattcagagcaatcctggtattagtgtcaccaatttcatctggcgataatcctgaaatgttatgaacagttcgagcaaactgcttttacctgctgcgggttagtgctagtatgaaaaagtgagtcctgtcccgattccttcctaattgtaatttttcgtaataatgcgatgaaaacctgcaaagagtggcttatagttaagctaacaaacgagagggcaagtccaggtcagtaagttttttccatcccgaaaggtgtccgttagttcaaccgctaagaaggggacgcgttatggatgaatactcacccaaaagacatgatatcgcacagcttaagtttctctgtgaaaccctgtatcatgactgccttgcaaaccttgaagaaagcaatcatggctgggttaacgacccaacctcggcgatcaacctccagttgaatgaactgattgagcatattgcgaccttcgcacttaattacaaaattaagtataatgaagacaataagctcattgagcagatcgacgaatatctggatgacacctttatgttgttcagtagttatggtattaatatgcaggatcttcagaaatggcggaagtcaggtaatcgactattccgttgttttgtcaatgcgacgaaagagaatcctgcgagtttatcttgttagaattattacaaccatgggtagaagtatgtccgaaaaacctttaacgaaaaccgattatttaatgcgtttacgtcgttgccagacaattgacacgctggagcgtgttatcgagaaaaataaatacgaattatcagataatgaactggcggtattttactcagccgcagatcaccgcctcgccgaattgaccatgaataaactatacgacaagatcccttcctcagtatggaaatttattcgctaataaataattcgctttcggagctataaccggctgtttattaagaattttatactttttcaccatgaagacataccctatgtgatctttatcacacagatgtaatgggaacgttctcttcactgacttttcgtcttactgtgttgccgcattttcagcaaccggaggtcagtaatgagcacagaaaaagaaaagatgattgctggtgagttgtatcgctcggcagatgagacgttatctcgcgctcgtcagcttattcaccgatacaatcattccctggcggaagagcacacattacgccagcaaattctcgctgatctattcggtcaggtgacagaggcttatattgagccaacgtttcgctgtgactatggctataacatttttctcggtaataattttttcgccaacttcgattgcgtgatgcttgatgtctgccctattcgcatcggtgataactgtatgttggcaccaggcgttcatatctacacggcaacacatcccatcgaccctgtagcacgtaatagcggtgctgaactggggaaacccgtcaccatcggtaataacgtctggattggcggacgcgcggtcattaaccctggtgtgaccattggtgataacgtcgtggtagcctcaggtgcagttgtcacaaaagatgtcccggacaacgttgtcgtgggcggtaatccagccagaataattaaaaaattgtaatcggtttttcgcaactgttatgcaaaattgtggtaaatctgttacttcccctctactattcccacgttaaaatagggtgttccctggaaagttgcagataccacgaaggcaaacgatgaccgaaatacaacgcctgctgaccgaaacgattgagtctctgaatacccgcgaaaaacgcgacaacaaaccccgctttagtatcagttttatccgtaaacatccggggctgtttatcggtatgtacgttgctttttttgccaccctggcggtgatgttgcagtccgaaacgctgtcaggctctgtctggctactggttgtattatttatcctgcttaatggtttcttctttttcgatgtctacccacgctaccgctatgaagatatcgacgtgctggatttccgcgtttgctataacggcgaatggtacaacacgcgctttgtacctgccgcgctggttgaagccatcttgaactctccgcgtgtcgcggatgttcataaggaacaactgcaaaaaatgatcgtccgtaaaggtgaactgtctttttacgatatttttaccctcgctcgcgccgaatcaacatcttaagttagggttacataccaggcgtaaagctctgcgcctggtcaaatgacaatgatcgtttccacccatcacttcatgaaataccagctctacctccttatctcctgccagcctttttccacaatcagatatactttccctacactgtgttaataaggatatgctggtgagaacacgacatctggtcggccttatttcgggagtactgattctttcagtattgctgcctgtcggcttaagcatctggctggcccatcagcaggtagaaacatcgtttattgaagagctggatacctattcctcccgcgtcgctattcgggccaataaggtggcgacacaagggaaagatgcgctgcaagagctggaaagatggcaaggcgctgcctgtagcgaagcccatctcatggaaatgcgtcgggtatcttacagttatcgctatattcaggaagtggtttatatcgataacaacgttccccagtgttcgtctctggagcatgaaagtccgcccgataccttccccgagccaggtaaaatttcgaaagatggttatcgtgtctggttaacatcgcataacgatttaggcattatccgttacatggtcgccatgggaacggcacattatgtcgtcatgatcgaccccgcttcctttattgatgtcattccctatagctcatggcaaattgatgccgccattattggcaatgcccataacgttgtcataaccagcagcgatgaaattgctcagggaattattaccaggctacaaaaaacacccggtgagcatatcgaaaataatggaatcatttacgatatcctgcccttcccggagatgaatatttcgatcatcacctgggcttcaacgaaaatgttgcagaaaggctggcatcggcaagtctttatttggttaccgctcgggttggtgattggcctgctggcagcgatgtttgtgctgcgtattttgcgccgtatccagtcaccgcatcatcggctgcaggatgctatcgaaaatcgtgatatttgcgtgcactatcagccgattgtctccttagccaatggcaaaattgtcggtgctgaggcactggcgcgctggccgcagacagacggtagttggttgtcaccagatagttttattccgctggcacagcaaacgggcctttctgagccattgacgctactgattataagaagcgtctttgaagatatgggcgactggctgcgtcagcatccacagcagcatatttcgatcaatcttgaatccaccgtgctcacctcggaaaaaatcccgcaattgctgcgtgaaatgatcaatcactatcaggttaatcccagacagatcgcgcttgaactcactgaacgcgagtttgccgatccgaaaaccagcgccccgataatttctcgctaccgggaggcgggccatgaaatttatcttgatgattttggtacgggatattcaagtttaagttatttacaggatctggatgtcgacattctgaagatcgataaatctttcgttgatgcgctggaatataaaaatgtcacgccgcatatcatcgaaatggcaaaaacactgaaactgaaaatggtagcggagggaatcgaaaccagtaaacaagaagagtggctacgccagcatggcgtgcactacggtcagggctggctctacagcaaggcattaccgaaagaagatttcttacgctgggccgagcaacatttgtgaatttttgggctgacggcacgccgcacagcccgtcacgctacctattcgtcgatgattgactcgaatccgccatagatcattcgcttgccgtcaaacggcatggactcgccgaactctttcatccgtgggtccgacatcatcttttgagtagcagcgtcgcggacctcttttgaagggtattcaatccagctaaagacaacctcttcattctcttccgctttcaccgccatacgaaaatcggtcactttgccatccggtacatcgctggcccagcattcgacaatacgaagcgcgccaaactctttaaacaatggcgcagccttagcggccatttcccgataggcatcctttttatcggcaggaacggcaaccacaaaaccatcaacatacttcatcagacatacctccgaagcgtactgcgcagccagacaattcttgcgacgtcagttgtggttaaagtttagccatgttggggttttttgacgaaacggtgggaggcagaaatgggtgggggccctgccagctacatcccggcacacgcgtcatctgccttggctgcttccttccggacctgacctggtaaacagagtagcgttgcgggagaaccaacagagcccccattgagagcgttgagaaccaacgcgcaggcgcattatcactgctgccccggctaattgcaacccatcgcgtgccagatgctggtttcttgcgcaatgcgacttcactcgggcgtttttccagattatgctgaaaaattacctcaggaagaaaagatggaaaaagaagattcatttccccaacgcgtctggcaaatcgtcgccgctattcccgaaggctatgtcaccacttacggtgatgtggcgaaactggcgggatcgccccgcgccgcgcgccaggtgggcggtgtgttaaagcgtctccctgaaggcagcaccttaccctggcaccgggtggttaatcgccacggcacaatttcgctaaccggaccggatttacagcgtcagcgacaggcattactggcagaaggtgtgatggtatcgggaagcgggcaaatcgacttgcagcgttatcgctggaactactaaccctctccgggcggagagggttaacgtcgcttaatattgcgtaggagctggaactgccgaagacggattcacctgagttggtgaagtcgaaggtacggtagtcgttgcaccaccgctggcctgaaccggcacggcggtttgctgcaccggcaccaatgtcaggtcggctttagttccgcccttgttgatcaccggctgaacggtatcggtaataaataccagtttgtcattcacggtaatcgccgcactcaacagaatacgcgcgttcggctgaacatctgccgggttaaatggcagaacaaagctgaatggtgactgtttaccttcagtacgcaccgctttctgcgccagcacttttgacggtgcatcggctaacgacgcgtcagaaagtgtcacggtcagcacagcatcaggcggcagtgcgactttctgacggatccagacggtaccggagacattcggttgctggatagcaggttgttgtgttgctgaaatagacgtatttgcagccggggctggcgtctgaatatccgcgcttttatctgcgcaagccgccaacgcaatcgcaaccgctaaaccactggccatgtgcacgagtttcattcatttctccttattatcaatgcaccagcgggctaactttcctcgccggaagagtggttaacaaaatagtaacgtcaacaagtgtggcacacatcacgcatttctgcctgtaattagcccgtaattcagaccattgcacccatcggaccagtagcaaatttgcgttatactcaactcactttggcttgctgcggcagctttgttactggagagttatatgagtcaggcgctaaaaaatttactgacattgttaaatctggaaaaaattgaggaaggactctttcgcggccagagtgaagatttaggtttacgccaggtgtttggcggccaggtcgtgggtcaggccttgtatgctgcaaaagagaccgtccctgaagagcggctggtacattcgtttcacagctactttcttcgccctggcgatagtaagaagccgattatttatgatgtcgaaacgctgcgtgacggtaacagcttcagcgcccgccgggttgctgctattcaaaacggcaaaccgattttttatatgacggcctctttccaggcaccagaagcgggtttcgaacatcaaaaaacaatgccgtccgcgccagcgcctgatggcctgccttcggaaacgcaaatcgcccaatcgctggcgcacctgctgccgccagtgcttaaagataaattcatctgcgatcgtccgctggaagtccgtccggtggagtttcataacccactgaaaggtcacgtcgcagaaccacatcgtcaggtgtggatccgcgcaaatggtagcgtgccggatgacctgcgcgttcatcagtatctgctcggttacgcttctgatcttaacttcctgccggtagctctacagccgcacggcatcggttttctcgaaccggggattcagattgccaccattgaccattccatgtggttccatcgcccgtttaatttgaatgaatggctgctgtatagcgtggagagcacctcggcgtccagcgcacgcggctttgtgcgcggtgagttttatacccaggacggcgtgctggttgcctcgaccgttcaggaaggggtgatgcgtaatcacaattaaaaaaatagccggaggtaaaaccgtccggctattttttgcagtgcttgttacgcgttataggcattctcgccgtgactgttgacatccagcccttctcgctcctgctcttccggtacacgcagaccaaccgtcagatccgccagtttgtagccaataaatgccaccacaccggaccagacgatcgtaatggcgatgctttccagctgtaccagcaactgatggcccatcgtcacaccttcagcgaagcccacgccacccagcgaactggcggcaaaaatcccagtcatgatacagccgacaatgccacaaacgccgtgcacaccgaagacatcgcagggatcatccacccgcagcaagcgtttgagcatagtaacgccccacaagcccgccagaccagctaccacgccgataatcaacgcgccgccaaccccaatgtagccacacgctggcgtcacgccgaccagaccggcaatcgcgccagaacacgctcccagcagagaaggcttaccacgcagcgcccattcaccgaagatccagccaagaattgccgccgccgttgcgaccacagtattcacaaatgccagtgccgcgatttcattcgccgtgcccgctgacccggcgttaaagccaaaccaaccaatatagagaatggcagtaccggtgaagaccattggcaggttgtgcggtttaaacgcctctttgccgaagcccacgcgtttgcctatcagatacgcgcccaccagaccggcgattgcggcgttaatatgcaccaccgtgccacccgcgaaatccagcgcaccgtgagaagccagcaaaccaccgccccacaccatatgcgcaatcggaatgtaagagagcgtcagccataccaccacgaaaatcaacacagctgagaagcggattcgttccgccagcgccccaacgatcaagccgacggtaatgcaggcaaacgagccctgaaacgccacgtggatatactgataaatgctgcccatcaccgccgtcagttcgatgttttttagcatcaaccagttaatgttgccgaagaagttgttgccctcaccaaacgccagcgagtaaccgtaaaccacccagagaatacagaccagtgcaaacgtcaccgtcacctgcgtcagcatcgacagcacgtttttgccgcgaatcaacccaccgtaaaacagggcaatccccggaatagtcataaacagcaccagcgcagtacaaatcatcataaacgcattgtcggctttatcggccaccgcaggtgcagccattaccagtcccggcagcatcgccagtgaagcaagcccagtttttatcgtcgctatcttcatttttcgttcctgttgctgtgtgccagagattacagcgccgcttcgtcggcttcgccggtacgaatacgaatgacgcgttgcaattcagcgacgaagattttgccgtcgccaatttttccggtgtaagccgccttactgacgatatcgatcacttcatcgagttggtcatcagcaatcgccacatcaatttttacttttggcaggaagttgacgctgtattccgccccccggtacagctcggcatgccctttctgacgcccgaaacctttcacttcggtgacggtcaggccctgaataccaatggaagataacgcttcacgaacgtcttccagcttgaatggtttgattatcacggtcaccagcttcatagatcccctccggtcagaattcggtaatggttctgctacacgaagaaggtattgcaagcggtgtgccagaaatgaaaaacgagaaagagagcaggaagttaagaagattgaaaatgaaaacgcactatgacagtgcacagtgcgttacatttttgcaccaacgatgaaatattgcgctattcaggcgctcaatgattcttcttcacgcacgctggctgccagctcttcgcccgcaagttgcagttgatacatctgccagtagcgtccctgggccgccagcagttgctggtgagtgccctgctccacggcttgcccacgatgaagcaccagaatggtgtcggcatcaacaatggtcgataagcggtgagcaatcaccaccagcgtggtatgttcacgcaccgccgccagagcatgttgaatcgcctgttcagtcccggagtcaatgctggcggttgcctcatcaaggatcaggatttgcggcgtctcgaccagcacgcgcgccagtgccagcagttgcttttgcccaactgagagattattcccctgctcgcccagcggcgtgtaaataccgtcgctcatgctacgcgccagctccgccagttgcacagtttccagcgcctgccagacgcgttcttcggagatatcccgccccagcgtcacgttggcgaggaaggtatccgccagcaccaccggatcttgctgcaccattgccacgccctggcgcagcgcgctgtgacttagcgaacttaatggacgaccatcaaggcgaatctcaccttccgttagcgggtaatagcccatcaataaactggcgagggtgcttttgccactgccggtatgcccgaccagtgccacaaagttacgcgaaggcacagagagattaatgttctttagcaccagattgtcatcgcgataagcaaatgacacgttatcgacttcgatggtgccactctgtaacgggcgctcatcattgccatattgctggcgcggtccgtccatcagttcaaacacgcgctcaccagcaacaacagcctgttgcagcatcgcctgttgcgtggtcagttcgattaatggttcgttaagtcgcccaagatagctgataaacgcatacagcacgcccacttcaatggtgccgctagcggagaagccaaacagcatcaacaagccacaaagaatgagcgatgaaaacagactcagcagcggacgcagcagaaaaccgtcgaggcgcagggtttgcatcctggccatatagtgtgaacgactggcctcccccatacgttcgccaaatcgcgcctgctgacggaactgctggataacgctcatgccattgatgatttcgttaaagccgtcgttgatatccgctagataggcgcgcacacggcggacaatcggcgtgctgtaacgctggtatatcaccattaccaccagcaccaccgggaaaatcattatcgccaccagcgccattcgccagtcgaggctgaacatcgccaccagcatcgcgcccaccagtgcggcgctacgcaggacagttgccactacggtaacgtagagatcgcggatcacttcagtgtcattagtgacgcgggaaatcacctgcccgacgggttgggtatcaaactcgcttaatggctggcgcaatgcggcatccatcacgtcggtacgcaactgttgcactacgcctactgccgcccgattaaacagcagcgactgcgcgtaatgtagcccggcggcaaacagttgtagcccaacatacgccgcagccagccctgcaaccattttcaacggcaggttatttttcgctaccatattgtcgataaaatagctgataagcagcggcccactgacttctgccgctgccgcaacccacatcatcaggaccgcaatccccagcggtttacgccacggcgaaccgtacgctaacagacgcttgagagtcggccacagttggctaaaactacgcatcgacggcctcctcgcgaatttccggagcgtcgtcgagcgccgcctccagttgttgatagcgatacatatcgcgataccagccgctttgttgcgccagctcatcatgattgccacgctgggcgatatgtccgtgctgcatcacaataatttcactggcttccgtcagtgccgaaaggcgatgggcactgatgattaccgttcttccctgtccccactgacgcaggttatgcaggatctggtgctctgtgcgtccgtccaccgccgaaagcgcatcatcaaggatgaggatttccgcgttgactaataacgctcgagcaatggagatacgctgtttttgcccaccggaaagcatcacgccgcgctcgcccacttctgtatcgtaaccttgcggtagacgcaaaatatcgtcatgtacgctggctaaccgcgcgacatgctcaatctcttgctgggtggcattcgggcaacccaacgcgatgttgttcgctacggtgtcggaaaaaaggaacggtgtctggctaactaccgccaggcggctacgccagctatcgagttgtaacttcgtcagaggaatatcatgaaagcgaatatccccctcgctgacgtcgaaatgacgctgaatgagcgacaacagggtacttttgccggaaccagtcggcccgcagatacccagcatctgaccgggtttcagggcgaaattgacgttttccagcgcaggatggtcagtctgcggatacgtgaactggtgaatatttacatcaagttcgccacgcccttccggcacgggttcgctaccatcgttcaccaccggcgcttccgccagcatcgcacgaatacggctgtacgcagcactaccacgttccacaatgttaaacatccatgccagcgccagcattggccaaatcatcagacctaaatacatcataaaactggtgagctggcccagcgttaaactgccctgcgccaccatccaactaccgccgccaatcgccagcaagttcgccataccaatcgcgatatagatggttgggtcgaaacgagcatcaatacgcgccacccgcatgttttttttgccggtatcttcggcatccgcggcaaataacgccgactggcgatcttccagaccaaaggctttgatcatgcggatactggtgaggctttcctgggtgcggtcattaagactagaaaacgccgcctgtgccagcttaaagcgttcatgcaaggcatcgccgttgcgcttgatcatgatcgccatcactggcatcggcaacagggcaaataaggtcaactgccagctaatttgcgtagacatcataatcaacacagcgcagcccatcaccagtgaatccaccagcgtcagcaccccttctccggcggcaaacacgacgcgatcgacgtcattggtcgcacgagccatgagatcacccgtgcgatgacgcaggtaaaactcaggatgctgccggcttagctgacggtaataatcttcacgcagttcaacagccagttgataagacgcaccaaacagcaatacccgccagacgtaacgcaggagataaaccacaacggcaatcagcaccatggtggcgatccacatcaggatctgcccggtagtaaagtgttgttctgtcacgccatcgacaacaataccaaccacttttggcggaaccagttgcagcatcgcgataatgacaagcaaggcgacagccccgagatagcgacgccattcccgacggaaataccagcttaattgagcaaataatcgcacgcgttgtgtcctgacctgattctggatatttattcgatgggtaaagaagtggtgtatttaatctgttccatcgcgaagctggaagtgacgtccgacagccccggcacgctgtttaccagacgcttataaaactcgtcgtagcgtttcatgtcggcaacctggacgcgcatcagataatcgtattcaccagccatgcgccagaaccccagcacttctggcatttcggtaaccaccgtgacaaagcggcaataccattcgctgctgtgatgttgcgtttttatcagcacaaaagcggtcaggccgaggcctattttttccggatccagcagggcgactttgccgataaggataccgtcgtcctccagccgtttcaggcgcttccagcaaggggtggttgtcagattaacggcttcagccagtgcctgcaaagagagggtgcaatcctgctgcagtaaggccagcagcttacggtcaattttatctaacatagcccttccacagagaatttttttctcttttaattctattttaaaggtgaaatcacgacaatttattctgtgcggtttaaacaccacggcacaaaatgacaaattcaacgcaaaaaaaaccgggcaattgcccggtgctggaagggatctcgttattcgggggaataaggtagatgtggatagtccagccagtgcgtcaaatagtgagagacagcctgatttcggcaatgtccaatcaccggtaaatgcgggagctccgcgcgcagttgcggcatcgcattgcccataataaacccgctaccgacgctgcctaacatttcgcgatcgttcatcgcatcaccaaaggccatgcaatcgcgcaacgataaacctaaatgttgggtcagcaccgtcaatgcagcgcctttattgcagcccaccggcagcacttcgaggcaatccgtggcggaaaaacacaaatgtgcacgctcgcctaatgcttcgtatagctggatctgcaagcgtgtaagatcgtcgtgatcgccacagaagcagatcttggtgacgctgccgagtggcatttttttgacatcgattatctgataacgaaaaccgctatagacaaatgcctgcaacaacgcagggatctctttcccggtaaaccaaccgtcgtcattgaagatatgcatgctggctcgggtatcccattgctgatacagcaccagctccgcgacatccgcaggtaaatcatcacgatgtaaaagttcaccttccagagaatgcacgcgcgttccgttgccggtaatcaaatatgcatccagcgatagcgccccgagaatatgctgcatctccagcgcatgacgccccgtggcaaaagtgagggtaatgtcgcgttcacgcagtcgcgccaaagtagagagggttttctcacctaaatgatggtcaggcatcaataaagtgccatccatatcaaatgctgccagacgagccatttctttctccactctgtgacacggttaatggtgattgagtatcacctgatatatacggaagtaatagtgaatagttaaataatattgttccgggtttatatgcgattgctcaaccgtcttaaccagtatcaacgtctgtggcaaccttcagccggaaagccgcaaaccgtcaccgtcagcgaactggccgaacgctgtttttgcagcgaacgccatgttcgtacgctgttgcgtcaggcacaggaggcgggatggctggagtggcaggcgcagtcaggacgcggaaagcgcggacaattacgctttctggtcacgccggaatcgctacgcaatgcgatgatggaacaggcactggaaaccggaaagcagcaagatgtgctggagctggcgcaactggccccaggtgagctgcgcactctgttacagccgtttatgggcggacaatggcaaaacgatacacccacgttgcgtattccctactatcgcccgctcgaaccgctacaaccaggctttttgcccggccgtgccgagcagcatctcgccgggcagatattttccggcctgacccgcttcgataataatactcagcgcccgattggcgatttagcgcatcactgggaaacctctactgacgggttacgctgggacttttatcttcgttcaaccctacactggcataacggcgatgcagtaaaagcctcacacttacaccagcgattattgatgctgttacaactgccagcactggatcaattatttattagcgtgaagcgtattgaagtcacccatccgcagtgtctgaccttctttttacatcgccccgattactggcttgcgcaccggctggcgagctattgcagccatctggcgcatccgcaattcccactgatcggcactggtccttttcgcttaacacaattcacagcggagctggtgcgcctggagagccatgattattaccatttgcgtcatccgctgcttaaagcggttgagtactggataactccgccgcttttcgaaaaagatttgggaaacagttgtcggcatcccgtgcaaatcaccatcggcaaaccggaggagctgcaacgggtcagccaggtcagtagtggcatcagtttaggtttttgctatttaacgttgcgcaaaagtccccgactctccctctggcaggcgcgaaaagtgatctccattattcatcaatccggtttattacaaacgttagaagtcggagaaaacctgatcaccgccagtcatgcattactgccaggctggactattccgtactggcaagtaccggatgaagtcaaactaccgaaaaccttgacgctggtttatcacctaccgatagaacttcataccatggcagaacgcctacaggcgacactggcagcggaaggctgtgaactcacaattatttttcataacgcaaaaaactgggacgacacgaccctacaggcacacgcagacctcatgatgggcgacagattaattggcgaagcaccggaatatactctggagcaatggctacgttgcgatccactatggccacatgttttcgacgctccagcatatgcacatctgcaatcgacgctggacgcggtgcaagtaatgcctgatgaggaaaaccgatttaatgccctgaaagcggtttttagccagttaatggcagacgcgacgctgacgccgctgttcaactatcactatcgcattagtgcccctcccggcgtgaacggtgtgcgactgacaccgcgcggctggtttgaatttaccgaagcctggcttcccgcgccgtcgcaatgaatagctggtccgggttaatcgcaggcgttaccataacgcttttattgttcaagcaggattatctatgaaacgtgctgtcgttgtgttcagtggaggccaggattccaccacctgtctggtgcaggcattacaacaatatgatgaagtccattgcgtgacgttcgattacggtcagcgacatcgcgcagaaatcgacgtggcacgcgaactggcgctgaaactgggagcacgcgcgcataaggttcttgatgtaacgctgctcaacgagctggcggtcagcagcctgacacgtgacagcattccggtgcctgattatgaacctgaagccgatggcatcccgaatacgtttgtcccaggacgtaatattttgttcctgacgctggcggcaatatatgcgtatcaggtaaaagcagaagccgtaattaccggcgtctgtgaaacggatttctccggctacccggattgccgcgatgagtttgtgaaagcactaaaccatgccgtcagtttgggcatggcgaaagatattcgttttgaaacgccgctgatgtggattgataaagcggaaacctgggcgctggcagattattacggcaaactggatttagtccgtaacgaaacgttgacctgctataacggcattaaaggcgacggttgcggtcattgtgcggcatgtaatttacgcgccaacggtttgaatcattatctggccgataaaccgacggtgatggcagcgatgaagcagaaaaccgggttgaggtaattattccgggtgtcgccggatgcggcttgagcatccggcaccacaaaacgtttacttaaccatctgctccagcttttcgcgcaattccccttccagagctaatgctttctgcgttttaagatcaatacaaacaaacgtaataagcgcatccgctaccacctgcccttccggctccagtgtaatgacctggcttaagatgccgcttttaccgtttaattgctgcaactgactggtaatagttaacaggtcacttaataccgctgggcgacgatagttaatattgatattgaccacgacgaaggcgatgttatgggccgtcatccactgaaaactgtcgctattttccaacccatcccagcgggcttcttcgagaaattcaaggtagcgggcgttgttgacgtgctggtaaacgtcgagatgatatccacgaactttgatttgtgtttgcatagcgcaataaccttacgttgttgttataagtacagaggtcataactggtatgacctcttcagtctggcaaaaaattgccactatgcaaattaattacagggttaataccgccagattacgttccaccagcgaattgcccatccccggcacctgctttagatcctccaccgttttaaacggaccgtactcttcgcgataactgacaatcgcctgcgctttcttcaggccaacgccattcatcgcgcgggctagctcttccgcgctggcattattaatgctgacccgggtgccttcttcgtcactggctttcgccggtactgctgctttactttgtgctgcaggagcttccgctttggtttctaccgttgtcggtttcgccacagaagctgccgccagcgcgctatgagacattccggcacaggccagggacagggtaatgagcagtgctttaattccgtgtttcatactgttttctccttgtttgttaacagtggaatcaccttaacggcagtgaaaacagtaaacaaatggcaatgttcagaaatggaaaaggccgcgaaagcgaccttttcttgttacagttgcaacgcatttttttgcgaggcggcttcaggattattgctgttccagcgcatcgccaattttgattttcgcctctttacgcaggttactcatcagagcttcaaagacgatttgtgcgttgttctgggtgataccctgcaccatcgcttttttctgatcttccggcattgaaccttgtttcacttcatccagcgccagcagaaccacattaccttgcatatcggtcgccataccgtagctcggtttgtctttcgctggcagtggcagtgcaaacgccgcctggctaatcgggtcacgaccggaacggcttaaggttttcggctcgccaaatttcagaccggcagcctgcatagcttccgcacctttgccggctttcaaatcaaccagcagtttctcagcatccactttcgcctgttgttcagctttgttgtgctgaaccaatgccttaacttgttcctgaacatctgccaacggtttcaccgcttccggtttgtgctcgctgatgcgcagcacgaatgcgcggtcgccgtctacggtgatgatgtcagagttgatgcccggcgcgccgttttcacctaccagaccgccgttaaagatagcgtcggcaaccggcttgaagttcaactcttccggcaggttatctttgctgaaccaacccgtctgagtggctttaacgccggcagcttgctctgcaccggccagagactcggtgtcgttgcttgccgcatcgctcactttctgctgcagcgcatagtacgcatcgagggctttttcgtgtttcactttcgccgcaatgtcgtcacgtacttcgtctaacgatttcactttcgctggctgaatgtcgtccagacgtacaatcaggaaaccgaccgaagatttgatgacaccagacagttgccctttttctttcagaccagcatttttcagttcgtcggggatagtggcatcttctaaccaacccatatcgccgccgttacgggcagagataatatcggcagatttttctttggctaatgcagcaaaatcaccgcctttattcagctcatcaagtaccgctttcgcttcatcttcagttttggtctggatgatgctgtagcgggtacgctgcggctgggtgaattgatcctgatgctgatcgtagtagctctggatatccgcatcgctaaccggttgctgcatcgttgcggcatccagcttgatgtaactcacgcggaattgttccggcgtcatgaaattgtttttgttttgttcgtagtagctggcaatctcctgttcggtcacaggctgcttcgccgccagcgcgttaacatcgatagtcgcctcacgcaccacgcgttgttgcgcgaccagtgccgccagctcgtcggtttcacctttcagcataaaatcggtaccggcaacaccgttaatcagctgttgggtagtgagctggttacgcagcgcctgggcgtactgatcggcggtcatccccatctggttgaggataccgttatagcggctgttatcaaatttgccgtcaacctggaaggctggggtcgcgaaaatcgcctgtttaacctgctcatcactgatacccagtttcagctcacgagcgtactgatccaacagcgcctcgtcgatcagacgattcagcacctgttgacgcagggttttcatatagccttcgttcgctgccagctcggagtattgatcgcccagctgttgctgcatgcgattacgctcgctgttaaaggcgttctcgaactgcccacggctgatttcctggtcattcacttttgcggcgtagttattgcctccgccaatcaggtaaccactcacgccggtcaatatgaacgacacgataatgataccgaaaataatcttgagcacgagactgtttgcagccgtgcgtaagctgtccatcatggtgtaacaacactccgctgtagatgactgtgtacctcacgcaacgtatcgatgcgcgcaaaggcctattgtgacaagaaacgggggcaattgtcagcccacaagacacagaaagtcaccgaatacaaataaaaaaggcacatcagtagatgcgcccttgaacttcgtcacatccccactggggacaacgcttagtttaccgcgtctttcagtgctttacctgcacggaagctcggtactttagcagcagcgatggtgatctctttaccggtctgcgggttgcggccagtacgggcagcacgctctttaacggcaaaagtaccaaaacctaccagtgctacatcatccccttctttcagagattcagttacggaagcaataatagcatctaacgcacggccagccgcagctttagagatatcagcccctgcagcaatcttgtcgatcaattgagatttattcactcttctcttcctctttataatttatatcgcacttgaatccttcaaggtacgaacgcgcagcagttatatcaggccagccatccccttacaacaccccttaataagggcaagcccgatccgccatctaacttagcgagacaaaaaaaggctggcaagcccgaattagcctgccagccctgtttttattagtgcattttgcgcgaggtcactattttgcagtcacaacctgcatgccagacggttcattttgcagcgccagagtcagaacttcctcaatgcgcttcacaggatgaatgtccagatcggcaattacgttgtcaggaatctcttccagatcgcgtttattttcgaacggaattagcactgttttaatcccgccgcgatgcgctgccaggagtttttctttcaaaccaccgatcggcagtacctgaccacgcagagtgatctcaccggtcattgccacatcggcacgaaccgggttaccggtcaggcaagaaaccagcgcggtgcacatagcaataccggcactcggaccatctttcggcgtcgcaccttccggaacgtggacgtggatgtcacgtttttcgtaaaaatcagggttgatccccagtttttccgcacgcgcacgaaccaccgttaacgccgcctgaatagactcctgcatcacttcgccgagcgaaccggtataggtcagtttgcctttacccggaacacatgcggtttcaatggtcagcaagtcaccgcccacttccgtccacgccagaccggttacctgaccgacacggttttcgttatcagcgcgaccatagtcgaaacgctgaacaccgaggtagtcatgcaggttatcgccgttaatttcgatatgttttaatgacttatcgagcagtaactgcttaaccgctttgcggcacagtttggagatttcacgctccagaccacgcacgcccgcctcacgggtgtagtaacgaataatgccgataatggcgctatcgtcgacggtcagctcaccttttttcagtgcattacgttcaatctgcttcggcagcaggtgacgtttggcgatgttcagtttttcatcttcggtataaccggagaggcgaatcacttccatacgatccagcagcggtgccggaatgttcatggagttcgacgtcgcgacaaacatcacgtcgctgagatcgtaatccacttccaggtagtggtcgctaaacgctacgttctgctctggatccagcacttcaagcagtgcagaggccggatcgcctcgcatgtcagaagacattttgtcgatctcatcgagcaggaacagcgggtttttcacgcccactttcgccattttctggatcagtttacccggcatagaaccgatgtaagtacggcggtgaccacggatttccgcttcatcacgcacgccgcccagcgccatacggacatatttacgcccggtggctttggcaatggactgaccaagagaggttttacctacccccggcggccctaccaggcagaggatcggtcccttgattttgttgacacggctttgaaccgcaaggtactcaaggatgcgatctttcacgcgctccagaccataatggtcggtatcaaggatttcctgcgcctgacgcaggtcttttttgaccttgctgcgcgcattccacggtacctgtaccatccagtcgatataaccacgcactacggtcgcttctgccgacatcggagacatcattttcagcttctgcaactctgcttccgctttctcttttgcctctttcggcatcttcgccgcgtcgattttgcgcttcagggcttcgttttcgtccggcgcgtcgtccatttcaccgagttctttctgaatagctttcatttgctcgttcagatagtactcacgctgggatttctccatctgctttttaacgcggttgcgaatgcgtttctcaacctgcagcagatcgatttccgattccatcattgccatcagatattccagacgttcgttaacgtcggacatctccagaacggactgtttgtcagccagtttcagcggcatatgtgcagcaatggtatccgccagacgcgccggatcgtcgatgctattcagcgacgtcagcacttctggtgggatttttttgttcagcttgatgtagccttcgaactggctgattgcagtacgcaccagcacttcctgttcccgctcatcaatggtcggcgactccagatactccgccttcgcagaaaagtgttcgccattgtcagagagcgcagaaatacgcgcgcgctgtaacccctcgaccagcactttgacggtgccgtcaggcagtttcagcatctgcaatatagaggccacggtcccgacggtgaaaagatcgtttacacccggctcatccgttgaagcttctttctgcgcgaccagcataatttttttatcatggtccatcgccgcttccagacaacggatagatttttcccgcccgacaaataaggggatgaccatgtgcggataaaccaccacatcgcgcagcggcaatacggggatttcaatgcgttcagaacgctcaggattcatagagctctctcttagtttaatttccgccaggtaatcagatgacacgactgtgcttcacgccatctattaacatgtacgtcagtatatggggatgtttcccccacattcaacgccgagaatagaggaaaaattaaaggggagataaaatcccccctttttggttaactaattgtatgggaatggttaattattcaccagatgcctgttgcgcttccggcttaccataaatcagcaacggtttgctttgaccatcaattaccgactcgtcgataaccactttttcgacgtcttccatggacggcagatcgtacatggtatcgagcagtgcggcttctacgatggaacgcaggccacgggcaccggttttacgcgccatcgctttcttagcgatagcatccagcgcctcgtcacggaattccagatccacgccttccagattaaacagcgcctgatactgcttggtcagggcgtttttcggctctttgaggatctgaatcagagcttcttcgctcagttcattcaacgttgcgacaaccggcagacgaccaatgaactcagggataagaccaaacttgatcagatcttccggttcaacctgcgccagcagctcgccttcgcttgctttgtcggacttcgcttttaccgtcgcgccaaaaccaatgccggagccggtttctacacggtgggaaatcactttatccagaccggcaaacgcaccgccacaaataaacaggatcttggaggtatcaacctgcaaaaattcctgctgcggatgcttacgcccgccctgcggtggaacggcagcaacagtaccttcgatcagtttcaacagtgcctgctgtacgccttcaccggaaacgtcacgggtaatagacgggttgtccgacttacgagaaatcttgtcgatttcatcgatgtagacaataccacgctgtgctttctggacatcgtagtcgcatttctgcaacagtttctgaatgatgttttcaacgtcttcgcccacataaccggcttcggtcagcgtggttgcgtcggccatggtgaacgggacgtccagcaggcgcgccagcgtttcagccagcagcgttttaccggaaccggtcggaccgatcagcagaatgttacttttgcccaactcgacaccattgctggtatcgccgttgcgcagacgtttgtaatggttgtataccgcgaccgccagcacttttttcgcctgttcctggccgataacgtaatcgtccaggtggttgcgaatttcatgcggcgtcggtagcgcactgcgttcacgatgcggtgcaacttctttaatctcttcgcgaatgatgtcgttacataaatcaacacattcgtcgcagatatacacggatggaccggcaatcagcttgcgcacttcatgctggcttttgccgcaaaaagagcaatacagcaatttgcctgagccatctttgcgtttatctgtcatgggtcaaaacctcttctttgttctttgtgccgcacacgacgacgcaaatgccattctcaggcgcaagccgcttacagcgttgtgccgccctggataagtatagcggcacagttgcgcctctggcatcaattacgatgggtcagaatcgaatcgaccagaccgtattccaccgcttcaggggcggaaaggaagcgatcgcgctcggtatcacgttcaatctgttctaatgattgacccgtatgaagcgccataagttcattcatgcgccctttaactttcagaatttcacgggcatgaatttcgatatcggtcgcctggccctggtagccgcccaacggttggtgaatcatcacgcgcgaattcggcaggcaaaaacgtttaccttttgcccctgcggtcagcaagaaagcgcccatcgaggccgcctggcccatacagatggtgctgacatcaggcttgataaactgcatggtgtcatagatagacatcccggcagtgatcaccccgcctggggagttaatgtacagatagatatctttttctgggttttctgcttccaggaacagcatctgcgccacaatcaggttagccatgtggtcttcaacctggccagtcagaaaaatgacgcgttccttaagtagacgagaatagatatcaaaagagcgctcaccacgtgaggtctgttcaatgaccatcggcaccagcgccatatggggtgcaaagttatctcgttcgccgctgtatgacatttccgtctcctggataaaattgaaaaaacctgctgtaccgattgtaaccttatggacggattatcagctagtccctgtgttatgggtacggcatcaccatatttcaagcataacaatcttttgttgttacgctaacaccgaaagaggcttttcgcacggttccatgcaaaattcatgacaaaaaaaagcccaccacctggcggtgacgggcctttgtgcgaatttagcgcgttatgctgcgtaaattacgcctgctggttcatcagctcgttgaaagtggtttctttttcagtcactttcgctttcgccagtacagcttcaacagcctgttcttccagagcaacattgcgcatgttgtccatcagttctttgtttttgctgtagaactcgataacttctttcggatcttcgtacgcagaagccatctcttcgatcaggcctttcacgcgctcttcgtcagctttcagctcgttggtgcggataacttcgcccagcagcaggccaacaactacgcgacgtttagcctgttcttcgaacagttcgcgcggcagttccagagcttgtttttcgttgccaccgaaacgctgtgcagcctggcgacgcagaacgtcgatttcgctgtcgatcagcgcagccggtacgtcgatgtcgttagcttttaccagaccttcgatcgcctgagacttaacgcggttacggatggcgctcttcagctcgcgctccatgtttttacgcacttcagcgcgcagaccttctacggaaccatcttcaacgccgaaacgtttgatgaattctgcagtcagttccggcagttcacgctcttcaactttcttcaggttgatagcgaatttcgctgctttacctttcaggttttctgcgtggtattcttccgggaaggtcacgtcgatggtgaactcttcgccagctttgtggcctttgataccgtcttcaaagcccgggatcatacgaccctggcccatcgccagtacgaaatcagacgctttaccgccttcgaactcttcgccgtctacagaaccggtgaagtcgatggttacgcggtcttctgcttcaacagcgccgtctttttctttccaggttgcctgctgtttacgcagagtatccagcatgccgtcaacgtcagcatcggtcacttcaacgatcggtttttcaacttcgatcgcttccagaccctgcagttcaacttccggataaacttcaaactctacagagtaggtgaagtcttcacccagcttgtattcgcccggaacataagtcggtgcgccagccggattgattttttctttaatgatggcgtcaatgaagttacggctcatcaggtcacccagaacgtcctggcgtacagacgcgccataacgctgagcaacgatattcattggcactttgcctttgcggaagccgtcaatacgtacttttttcgcaacgttgaccagctcgcttttaacagcggtctcgatgctgtcagcagcgatagtaatcgttacacggcggccaaggccttgagtggtttcaactgaaacttgcatcttgttacctcaaaaaatcacagtgctcggtcaactcttaccccgcaagcacaggttgttggcttcgcggaaccgggatgttcttataatcaatcacattccctgttaccagaatcatcccgaaagcattcaaataggacgcggcattatagcggcatcacttttatgagtcgagaacggttattgcgcgctgtcgcgtattttttcacaattcccgggcaattttcgtctgaatgctgggcaaaaagcgcaaaatccagacaaaacaaaacggcccgcaggccgtttttcataaaatctttagcaacatactggaaaagcgccgacagttgcaaatgcgtttttacgcgatgcttcctgctccacgacagggaggagaggcaaagacggtgtcctgcaacccttcccactccttaatagtgtaagtatgcagagccagcgcatgaacggtagtagagagttcctccgctaaagtactgtaaatcattcgatgacgattcagaaaacgttcacccgtaaaacgatcgctgaccagcacaactttaaaatggctttcagagccggctgggacattgtgacgatagctttcatccactacttcgaggaatacgggttggaacgccgcccttaatttttcttctatccgctcacgtatcatcatgaaatatctcctccgacaacgctgagatgtcatccatccctttaaatactagccgcttttaccgtttccattgcagcttaacaacaaatatttaggtttcgtcctggtttttccgtcaagcgtatgaagtttactgatttaaagattgaaacacaggcctcgcatcagcgtttcttttaccaggggtgattatttcgtcaacatgatgaatttacatgccttacccacttcccctcgccgttggcaatgttatgatggcgggaatttttaccaaacacgcttaagagtctctgagagcccgaacatgttcaaaaaaatcctcttcccgttagttgctctgtttatgcttgcaggatgcgcaaaaccgccaacaactattgaagtttccccgacgattacactgccacagcaggatccaagcctgatgggcgtcaccgtaagcattaatggtgccgatcagcgtaccgatcaggcgctggcaaaagtcacccgcgataatcaaatcgttaccctgaccgcctcccgcgatctgcgtttcctgctgcaagaagtgctggaaaaacagatgaccgcgcgtggttacatggttggtccgaatggcccggttaatctgcaaatcatcgttagccaactgtatgctgacgtgtcccagggcaacgtgcgctacaacatcgccaccaaagcggatatcgccatcatcgctaccgcgcagaatggcaacaaaatgaccaaaaactatcgtgccagctacaacgttgaaggtgcgttccaggcctccaacaaaaatatcgccgatgcggttaacagtgtgctgaccgataccatcgctgatatgtctcaggacaccagcatccacgaattcatcaagcagaacgcgcgttaatttctgccctcgggcccggtgcaagccgggcctgtagacgcccatgtccagtcaatatttacgtatttttcaacagccgcgttcagccatattgctgatcctgggttttgcttccgggctaccgctcgccctgacatccggcaccttacaggcctggatgacggtcgagaatatcgatctcaaaaccattggtttcttctctctggtaggccaggcttacgtttttaaattcctctggtcaccgctgatggaccgctacacgcccccattttttgggcggcggcgcggttggctgctcgccacgcaaatcctgttattagtcgccattgcggcgatgggttttttcgaaccaggcacccaactccgctggatggcggcgctggcggtggtgatcgctttttgctctgcctcccaggatattgtcttcgatgcgtggaaaaccgatgtgctcccggcagaagaacgtggtgcgggcgcggcaatcagcgtgctgggttaccgtttagggatgctggtttccggcggcctagccctgtggctggcagataaatggctgggctggcagggcatgtactggttgatggcggcgctgttgatcccctgtattatcgcgacgttgcttgcaccagaaccaaccgacaccattcctgtgcccaaaacgctggaacaagcggttgttgcacctctgcgagatttctttggtcgcaataatgcctggcttattttgcttcttatcgtgctgtataagctgggcgacgcattcgccatgagcctgacaaccacgtttttgattcgcggcgtcgggtttgatgcgggtgaagtaggcgtggtaaacaaaacgcttggcttactggcgaccattgttggcgcattgtacggtgggattttgatgcagcgcctgtcgctgttccgggcgctgctgattttcggcattttacaaggtgcgtctaacgctggttactggctgctgtcgattactgataagcatctctacagcatgggcgcagccgtatttttcgaaaacctctgtggcgggatgggcacatcagcctttgtcgcgctgttaatgacgctgtgtaataagtcattttccgctactcaatttgccctgctctcagcgctttccgctgtagggcgagtttatgtcggccccgtggcgggttggtttgttgaagcacacggctggtcgacattctatctattctccgtcgccgctgccgtaccggggcttattttgctgctggtttgccgccagacgcttgaatatacacgagtaaatgacaactttatctcccgtaccgaatatccggcaggttatgcctttgccatgtggacactggcggcgggcgtcagcctgttggccgtgtggttactgctgttgacgatggacgcgctggatttgacgcacttctctttcctgcctgctctgctggaagtcggggttttagtcgccctttctggcgtcgtgcttggtggtttgctggattatctggcgctacgaaaaacgcatctgacgtaatctgtaaatattatttagctgtagtaatcactcgccgtaattattacggctaaataaacatcagtatcgcttaataatatttgttcttttgtgcggcttagcgtttggaaattattgacgcaatttatgaattctattttttcttacacgattcagctaatgagtctttattttccccccacccaattgtcaccataatgataattatttgttaaacaattgttttattccagattggttataccaattgcccgtccaaactccttctgcactcccctttcgttataacgcccttttgcaacagcttcttaaaatcaacttgatatgttttgcaacatatgtgacctgacagccaaatccaagtaacaggaatttaatcatgtttacagtaatgtaaccttcccgtaaaatgcccacacactttaaacgccaccagatcccgtggaattgaggtcgttaaatgagactcaggaaatacaataaaagtttgggatggttgtcattatttgcaggcactgtattgctcagtggctgtaattctgcgctgttagatcccaaaggacagattggtctggagcaacgttcactgatactgacggcatttggcctgatgttgattgtcgttattcccgcaatcttgatggctgttggtttcgcctggaagtatcgtgcgagcaataaagatgctaagtacagcccgaactggtcacactccaataaagtggaagctgtggtctggacggtacctatcttaatcatcatcttccttgcggtactgacctggaaaaccactcacgctcttgagcctagcaagccgctggcacacgacgagaagcccattaccatcgaagtggtttccatggactggaaatggttcttcatctacccggaacagggcattgctaccgtgaatgaaatcgctttcccggcgaacactccggtgtacttcaaagtgacctccaactccgtgatgaactccttcttcattccgcgtctgggtagccagatttatgccatggccggtatgcagactcgcctgcatctgatcgccaacgaacccggtacttatgacggtatctccgccagctacagcgggccgggcttctcaggcatgaagttcaaagctattgcaacaccggatcgcgccgaattcgaccaatgggtcgcaaaagcgaaacagtcgccgaacaccatgtctgacatggctgcgttcgaaaaactggccgcgcctagcgaatacaaccaggtggaatatttctccaacgtgaaaccagacttgtttgccgatgtgattaacaagtttatggctcacggtaagagcatggacatgacccagccagaaggtgagcacagtgcacacgaaggtatggaaggcatggacatgagccacgcggaatccgcccattaaaggggttgaggaagaataaagatgttcggaaaattatcacttgatgcagtcccgttccatgaacctatcgtcatggttacgatcgctggcattattttgggaggtctggcgctcgttggcctgatcacttacttcggtaagtggacctacctgtggaaagagtggctgacctccgtcgaccataaacgcctcggtatcatgtatatcatcgtggcgattgtgatgttgctgcgtggttttgctgacgccattatgatgcgtagccagcaggctcttgcctcggcgggtgaagcgggcttcctgccacctcaccactacgatcagatcttcaccgcgcacggcgtgattatgatcttcttcgtggcgatgcctttcgttatcggtctgatgaacctggtggttccgctgcagatcggcgcgcgtgacgttgcgttcccgttcctcaacaacttaagcttctggtttactgttgttggtgtgattctggttaacgtttctctcggcgtgggcgaatttgcgcagaccggctggctggcctatccaccgctatcgggaatagagtacagtccgggagtcggtgttgattactggatatggagtctccagctatccggtataggtacgacgcttaccggtatcaacttcttcgttaccattctgaagatgcgcgcaccgggcatgaccatgttcaagatgccagtatttacctgggcatcactgtgcgcgaacgtactgattattgcttccttcccaattctgacggttaccgtcgcgttgttgaccctggatcgctatctgggcacccatttctttaccaacgatatgggtggcaacatgatgatgtacatcaacctgatttgggcctggggccacccggaagtttacatcctgatcctgcctgttttcggtgtgttctccgaaattgcggcaaccttctcgcgtaaacgtctgtttggttatacctcgctggtatgggcaaccgtctgtatcaccgtgctgtcgttcatcgtttggctgcaccacttctttacgatgggtgcgggcgcgaacgtaaacgccttctttggtatcaccacaatgattatcgccatcccgaccggggtgaagatcttcaactggctgttcaccatgtatcagggccgcatcgtgttccattctgcgatgctgtggaccatcggttttatcgtcactttctcggtgggcgggatgactggcgtgctgctggcagtaccgggcgcggacttcgttctgcataacagcctgttcctgattgcgcacttccataacgttatcatcggcggcgtggtcttcggctgcttcgcagggatgacctactggtggcctaaagcattcggtttcaaactgaatgaaacctggggtaaacgcgcgttctggttctggatcatcggcttcttcgttgcctttatgccgctgtatgcgctgggcttcatgggcatgacccgtcgtttgagccagcagattgacccgcagttccacaccatgctgatgattgcagctagcggtgcagtactgattgcgctgggtattctctgcctcgttattcagatgtacgtttctattcgcgaccgcgaccagaaccgtgacctgactggcgacccgtggggtggccgtacgctggagtgggcaacctcttccccgcctccgttctataactttgccgttgtgccgcacgttcacgagcgtgatgcattctgggaaatgaaagagaaaggcgaagcgtataaaaagcctgaccactatgaagaaattcatatgccgaaaaacagcggtgcaggtatcgtcattgcagctttctccaccatcttcggtttcgccatgatctggcatatctggtggctggcgattgttggcttcgcaggcatgatcatcacctggatcgtgaaaagcttcgacgaggacgtggattactacgtgccggtggcagaaatcgaaaaactggaaaaccagcatttcgatgagattactaaggcagggctgaaaaatggcaactgatactttgacgcacgcgactgcccacgcgcacgaacacgggcaccacgatgcaggcggaaccaaaatcttcggattttggatctacctgatgagcgactgcattctgttctcaatcttgtttgctacctatgccgttctggtgaacggcaccgcaggcggtccgacaggtaaggacattttcgaactgccgttcgttctggttgaaactttcttgctgttgttcagctccatcacctacggcatggcggctatcgccatgtacaaaaacaacaaaagccaggttatctcctggctggcgttgacctggttgtttggtgccggatttatcgggatggaaatctacgaattccatcacctgattgttaacggcatgggtccggatcgcagcggcttcctgtcagcgttctttgcgctggtcggcacgcacggtctgcacgtcacttccggtcttatctggatggcggtgctgatggtacaaatcgctcgtcgcggcctgaccagcactaaccgtacccgcatcatgtgcctgagcctgttctggcacttcctggatgtggtttggatctgtgtgttcactgttgtttatctgatgggggcgatgtaatgagtcattctaccgatcacagcggcgcgtcccatggcagcgtaaaaacctacatgacaggctttatcctgtcgatcattctgacggtgattccgttctggatggtgatgacaggggctgcctctccggccgtaattctgggaacaatcctggcaatggcagtggtacaggttctggtgcatctggtgtgcttcctgcacatgaataccaaatcagatgaaggctggaacatgacggcgtttgtcttcaccgtgctaatcatcgctatcctggttgtaggctccatctggattatgtggaacctcaactacaacatgatgatgcactaagagcggcggttatgatgtttaagcaatacctgcaagtaacgaaaccaggcatcatctttggcaacctgatctcggtgattgggggattcctgctggcctcaaagggcagcattgattatcccctgtttatctacacgctggttggggtgtcactggttgtggcgtcgggttgtgtgtttaacaactacatcgacagggatatcgacagaaagatggaaaggacgaagaatcgggtgctggttaaaggcctgatctctcctgctgtctcgctggtgtacgccaccttgctgggtattgctggctttatgctgctgtggtttggcgcgaatccgccggcctgctggctgggggtgatgggctttgtggtttatgtcggcgtctatagcctgtacatgaaacgccactcagtctacggcacattgattggttcgctctccggcgctgcgccgccggtgattggctactgtgcagtaaccggcgagttcgatagcggcgcagcgatcctgctggctatcttcagcctgtggcagatgcctcactcctatgccatcgccattttccgctttaaggattaccaggcggcaaacattccggtattgccagtggtaaaaggcatttcggtggcgaagaatcacatcacgctgtatatcatcgcctttgccgttgccacgctgatgctctctcttggcggttacgctggatataaatatctggtggtcgccgcggcggttagcgtctggtggttaggtatggctctgcgcggttataaagttgctgatgacagaatctgggcgcgcaagctgttcggcttctctatcatcgccatcactgccctctcggtgatgatgtccgttgattttatggtaccggactcgcatacgctgctggctgctgtgtggtaacaaaacctctctattaaaaaggtgctacggcaccttttttattgtctgagatcagagatacggctaataaccgtatgtcttgacagagtgagcagatgaacataaattaatcatacggttgatagccgtattatgtatgagatcgactccctacgatttcattcagttaatcaaagaggtcataatgcctggaaaaacagccactctacccgatgtcgataaaacgctgaaaaatgcgcgggtcgaactcaaaactagtcccgacgccaaaaacaaacttcgtgaagctgcgcaagccgttggggtagatttaagcgcttttattttgagcgctgctatggaacgcgccgaaagtgtgcttgataaccaacgtcgccgtgagctttcgaatcaaagctgggaactgatgaaccaactcatcgctgaacctgctcaaccgacgctcgccctcaaggcgttaatgaaaaggaaaaacagcgatggtcgacaagcatgaagagattactctgcccatagtcctctcctgtaattatcagtctgatattacttatcctgggcaaaaacagtttgattgcggtaaccctgttatcgataaatttgtacgcgcatcgctaaagaaaagtgtgcgtaatagcgactgtgcggctaaagcacttattgacagacaaagtggtgaactgatcggcatctgtacttttacggcatattcgctggaaaaacaacgcgtttctggcgtccttcagggttcacaaccttcagaaattggtgttgtcagattagtcatgttgggggtagcacggaagtatcaaaagcggggctttggtcaggacctactatgtgatttttttgaacatgtaaaaataattcaccaggcattaccaattaaaggggtttatcttgatgctgaccctgccgccattaatttttatgctcgtctcggctttgttcagctttcagcgacaccaaatgcttttggtgctgtacctatgtttttggcgattcagcatattctcgcggcttagattattatcgccacccgccagggcaagttttgcctcagccgggggctgagcagcgttaccacttttgttcaattgcccccgctttcagcaactccacatccttgccgttaatggttgccgttgcggcaacgattgtggtccttacagttgcacaagattttcgctcaaattccggtttataaagaataagagacgaattactggtaaatgaaccaaataggtaatcagtaaagctaatattcagccggtttaaaccgaaaggcgcgaagccaaccgtttggttaatctccttaccggatgggcgacgaatgctgaatgtcacgcgaagattggccacttcgcctaatttattggtggtggcgaagaggctatccatgcaggaaaaacctttatctaaaaaattatctcgcatcccagaacgggtaaccgtaatcacgggtaacgtatcgtcaaccgtttttctgtcaatcatgtcttttcgacaagtagccagaaagtcttccgggccaccataaatgtggacacctttatcaagatattccttcgctttcttacaatctacctcaacatactgaccattggcgtacataatgcccaacctggaccatgctaaattcacaccgtgctgcgcggcctgattaaatagtgcatacgctttggcataatccacccgcacctgctcaccgtcgtagtagataccccccagcgctaacggagcttctctgtcaccttgtttagccgctaactcgaaccatttaatcgcttcctgaacatcaggtttggtatcataacgaggctgataatattcccagcctaacaggctctgcgcgtcgatatctcccgattcagccattttatgcagtgtatttataacatcgggagcaggtttaccaccgtatatgctgtcatacaattcatgcgctttctcgctggccaccacgcttggtgaaactatcagcattacagaaaataatattcttttagttaacatgtatacctttatgtcctcactgtcatatatttccataataattaaccaccaaatatccatttaatgaataaatacagtgccataaaggtccaagtaataagcacacatttagcctgaaacattatcatccatgtcaccaaatcgtttatttagtgagataaaactagcatattcgtaagataaaaaatgcacatggcaatcaagaaatgatattattacttttttgatgtaaaactatttagttttaaaattcattttttcaacatatagagcattcattttatgaatgcaaaaaaacatacctgacacacaaattactctcctctgtaatattttctcattaacactctgtttacccaacatgcgctccgcactacactatgtgggcatttttttaaggggtggtaatgaacgattataaaatgacgccaggtgagaggcgcgcgacctggggtttagggaccgtattctcgttgcgcatgctgggcatgtttatggttctgccggttctgaccacgtacggcatggctctgcaaggtgccagcgaagcattaatcggtattgccattggtatttatggtctgactcaggccgtttttcagattccgtttggcctgctttccgaccgcattggtcgcaaaccattaattgtcggtgggctggcggtgtttgccgccggtagcgttatcgctgcgctttccgactccatctggggaattattctgggccgggcgctacaaggctctggagcaattgccgccgccgttatggcgctgctttccgatctcacgcgcgaacaaaaccgcaccaaagcgatggcgtttatcggcgtgagctttggcattacctttgccattgcgatggtgcttggcccgatcatcactcacaaacttgggctgcacgcgctgttctggatgatcgctattctggcaacaaccggcattgcgttgaccatttgggttgtgcccaacagtagcactcacgtacttaatcgtgagtccggaatggtgaaaggcagtttcagtaaagtgctggcggaaccgcggctgctaaaactcaactttggcattatgtgtctgcacatgcttctgatgtctacgtttgttgccctgcccggacagctagctgatgcggggttcccggcggctgaacactggaaggtctatctggcgacgatgttaatcgcctttggctcggtcgtgcctttcattatctacgctgaagttaagcgcaaaatgaagcaagtctttgtcttctgcgtcgggttgatcgtggttgcggaaattgtgttgtggaacgcacaaacgcagttctggcaactggtggtcggcgtgcagcttttctttgtggcgtttaatttgatggaagcccttctgccctcacttatcagtaaagagtcgccagcaggttacaaaggtacggcgatgggtgtctactccaccagccagtttcttggcgtggcgattggcggttcgctgggcggctggattgacggcatgtttgacggtcagggggtatttctcgctggcgcaatgctggccgcagtgtggctggcagtcgccagtaccatgaaagaaccgccgtatgtcagcagtttgcgcattgaaatcccggcggacattgccgcaaacgaagcgttaaaagtgcgtttgctggaaactgaaggcgtcaaagaagtgttgattgcagaagaagagcattcagcttatgtgaaaatcgacagcaaagtgacaaatcgctttgaggttgaacaggcaattcgtcaggcataaaaaacgcggcgaattgcctgctgcgctacgcttaccaggcctacaaagttcttgagttacaaaccgttgtaggccgaatcaggcgttcatgccgcatctgacatgaacaaaacgcacattgtcgcgattaatcgcggaagtttttgaactggaacggctggccgagatcgccaccacgtaccatcgccatgacagcctgcaaatcatcacgagatttgcccgttacgcggatttcatcgccctgaatttgcgcctgcactttcagtttgctgtctttgatcatcttgacgattttcttctgggtcgcgctctcaatgccctgtttcagtttcgcttccacaaaccaggttttaccgctatgaacgatattttccggtacatccagtgaactgccttcaatgccgcgcttcagcagcttggcacgcagaatatccagcaactgattgacctggaagtcggactcgctcaacactttgatggttttgctggcgtcgttcagctcaaatgaggcttcaacgttacggaagtcaaaacgggactccacttcgcgactcgcgttatcgaccgcgttacgtgcttcctgaagatcaacttcagagacaatatcgaaagatggcatcttttcctctcccttcatttttgatgcgaagcataatacctgcaaagttaaataaccgacagtcctgcaccaggacgtatcccttaattgtgcatagtcgcaacagcatgcacaattaagggatagccttattgaacacccggagtggttgcgggtgaggaggaacaatgaaaattaccgtattgggatgcggtgccttagggcaattatggcttacagcactttgcaaacagggtcatgaagttcagggctggctgcgcgtaccgcaaccttattgtagcgtgaatctggttgagacagatggttcgatatttaacgaatcgctgaccgccaacgatcccgattttcttgccaccagcgatctgctcctggtgacgctgaaagcatggcaggtttacgatgccgtcaaaagcctcgcgtccacactgcctgtaaccacgccaatactgttaattcacaacggcatgggcaccatcgaagagttgcaaaacattcagcagccattactgatgggcaccaccacccatgccgcccgccgcgacggcaatgtcattattcatgtggcaaacggaatcacgcatatcggtccggcacggcaacaggatggcgattacagttatctggcggatattttgcaaaccgtgttgcctgacgttgcctggcataacaatattcgcgccgagctgtggcgcaagctggccgtcaactgtgtgattaatccactgaccgccatctggaattgcccgaatggtgaattacgtcatcatccgcaagaaattatgcagatatgcgaagaagtcgcggcagtgatcgagcgcgaagggcatcatacttcagcagaagatttgcgtgattacgtgatgcaggtgattgatgccacagcggaaaatatctcgtcgatgttgcaggatatccgcgcgctgcgccacaccgaaatcgactatatcaatggttttctcttacgccgcgcccgcgcgcatgggattgccgtaccggaaaacacccgcctgtttgaaatggtaaaaagaaaggagagtgaatatgagcgcatcggcactggtttgcctcgcccctggtagtgaagagactgaagccgtcaccactatcgatctgctggttcgcggcggtatcaaagtcaccactgccagcgtcgccagcgatggcaacctggccattacctgctcgcgcggcgtgaagctgctggcggatgcgccgctggtcgaggtggctgatggcgaatatgacgtgatcgtactgcctggtggcattaaaggcgcagagtgttttcgcgatagtaccctgctggttgaaaccgttaaacagttccaccgttccgggcgtatcgtcgcggctatttgcgccgcgccagccatcgtgctggtgccgcacgatatcttcccgattggtaatatgaccggcttcccgacgctgaaagacaaaattcccgctgaacaatggcaggacaagcgcgtcgtctgggatgcacgggtaaaattgctgaccagccaggggccggggacagctatcgactttggtctgaaaattatcgacctgctggttgggcgcgagaaagcccatgaagtggcatcacaactggtgatggcggcagggatttataattattacgagtagtgtcggatgcggtaagcgtcgcatctgaccagatgcgacgttacaaccacaaattacgggcgatataccttcacattgttaaagccctgctcgcgcagatagagcgcctgcagacggctcatcaccccgcgctcacaccacagtagccaggttctgttctggtcgagatcgccaaacttggtgctcagtttatagaacggcagagaaactacatcaatcccttcgactttcagtggcttatcttcctgttcatcgatagaacggatatcgaggatcacgtcgttcgggccgaagccattgacggtttccacttccaccacttcctgctcggtctgctgggcgatttcgcggatatcaacgttattcgcttcttcaaccactttatcgagaatgctgaagtcgaatttctcttcttccgcttcaatcttcgacttaaccgctttcaccgtcgggcttttggagataacaccgcaatattccggcatcgtgcgagcaaagtcttcggtgccaatctggcgagccaggttgatgatgtgctctttgtcgtaagaaatcagcggacgcaggatcagcgtatcggagacgttatcaatcaggcgcaggttggtcagcgtctgactggacacctggccgagcgcttcgccggtgaccagcgcctgtacgccgtaacgttcagccactttagacgcggcacgcaccatcatacgtttgaggataacgcccatctgaccgtcgtcgattttctcgagaatttccccgacgaccggttcgaaattaatagcgacaaaacgcacgcggtgggagctgccaaaacggttccacagataatgcgccacctgacgcacgccaatttcatgcgccgcgccgccaaggttaaagaaacagtaatgcacgcggcagccgcgacgcatcaacatataactggaaacaccggagtcgaaaccaccggaaatgagcgacagcacatcttcctgggtgccgatcgggaaaccgccaataccttcgtagcggcctttaatcagcaggagacgatcgtcttccacttccagatggacagtcacttccggattggtcagcttcacgcgcgcggactcaatatgctgatttaaaccgccgccgacgtaacgttccacatcaatcgagctaaaatcatgtttgccacggcgcttcacgcgtacgcagaaggttttgccttccagctgatcgcgatactgaaccaacgctttctcaaaaatatcgtgcatgtcggtaaacggcacgtcttcgacttcgagaatatggtggatacccggaatacgggtcagggcgtcgcgaatagccagacgctggttttcatcttttgcgcgaacttcgatgttatcccagtggcggacgacagcgagcgtctcatcatagtgctttaaaacgttacgaatgttcccggtaaggatttttataaagcgcaagcgcacagattggcttttgatggtgatttccgggaacaatttaatgataaacttcatggcggcaatggttcgttggcaagccttaagcgacttgtatagggaaaaatacagcagcccacacctgcggctgcatccaggcgcggaagtataccactaacatcgctttgctgcgcacatcaccttaccattgcgcgttatttgctatttgccctgagtccgttaccatgacggggcgaaaaatattgagagtcagacattcattatgccgaagaaaaatgaggctcccgccagctttgaaaaggcgctgagcgagctggaacagattgtaacccgtctggaaagtggcgacctgccgctggaagaggcgctgaacgagttcgaacgcggcgtgcagctggcacgtcaggggcaggccaaattacaacaagccgaacagcgcgtacaaattctgctgtctgacaatgaagacgcctctctaaccccttttacaccggacaatgagtaatggactttccgcagcaactcgaagcctgcgttaagcaggccaaccaggcgctgagccgttttatcgccccactgccctttcagaacactcccgtggtcgaaaccatgcagtatggcgcattattaggtggtaagcgtctgcgacccttcctggtttatgccaccggtcatatgtttggcgttagcacaaacacgctggacgcacccgctgccgccgtagagtgtatccacgcttactcattaattcatgatgatttaccggcgatggatgatgacgatctgcgtcgcggtttgccgacctgccatgtgaagtttggcgaagcaaacgcgattctcgctggcgacgctttacaaacgctggcgttctcgattctaagcgatgccaatatgccggaagtgtcggatcgcgacagaatttcgatgatttctgaactggcgagcgccagcggtattgccggaatgtgcggtggtcaggcattagatttagacgcggaaggcaaacacgtacctctggacgcgcttgagcgtattcatcgtcataaaaccggcgcattgattcgcgccgccgttcgccttggtgcattaagcgccggagataaagggcgtcgtgctctgccagtactcgacaagtacgcagagagcatcggccttgccttccaggttcaggatgacatcctggatgtggtaggagatactgcaacgttgggaaaacgccagggtgccgaccagcaacttggtaaaagtacctaccctgcacttctgggtcttgagcaagcccggaagaaagcccgggatctgatcgacgatgcccgccagtcgctgaaacaactggctgaacaatcactcgatacctcggcactggaagcgctagcggactacatcatccagcgtaataaataaacaataagtattaataggcccctgatgagttttgatattgccaaatacccgaccctggcactggtcgactccacccaggagttacgactgttgccgaaagagagtttaccgaaactctgcgacgaactgcgccgctatttactcgacagcgtgagccgttccagcgggcacttcgcctccgggctgggcacggtcgaactgaccgtggcgctgcactatgtctacaacaccccgtttgaccaattgatttgggatgtggggcatcaggcttatccgcataaaattttgaccggacgccgcgacaaaatcggcaccatccgtcagaaaggcggcctgcacccgttcccgtggcgcggcgaaagcgaatatgacgtattaagcgtcgggcattcatcaacctccatcagtgccggaattggtattgcggttgctgccgagaaagaaggcaaaaatcgccgtaccgtctgtgtaatcggcgatggcgcgattaccgcaggcatggcgtttgaagcgatgaatcacgcgggcgatatccgtcctgatatgctggtggtcctcaacgacaacgaaatgtcgatttccgaaaatgtcggcgcgctcaacaaccatctggcgcagctgctttccggtaagctttactcttcactgcgcgaaggcgggaaaaaagttttctctggcgtgccacccattaaagagctactcaaacgtaccgaagaacatattaaaggcatggtagtccctggcacgttgtttgaagagctgggctttaactacatcggcccggttgacggtcacgatgtgctggggcttatcaccacgctgaagaacatgcgtgacctgaaaggcccgcagttcctgcatatcatgaccaaaaaaggtcgtggttatgaaccggcagaaaaagacccaatcactttccacgccgtgcctaaatttgatccctccagcggttgtttgccgaaaagtagcggcggtttgccgagctattcaaaaatctttggcgactggttgtgcgaaacggcagcgaaagacaacaagctgatggcgattactccggcgatgcgtgaaggttccggtatggtcgagttttctcgtaaattcccggatcgctattttgatgtagcgattgccgagcaacacgcagtgacctttgctgcgggactggccattggtggatacaaacccattgtcgcgatctactccaccttcctgcaacgcgcctatgatcaggtgctgcatgacgtggcaattcaaaaactcccggtcctgttcgccatcgaccgcgcgggcattgttggtgctgacggtcaaacccatcagggtgcttttgatctctcttacctgcgctgcataccggaaatggtcattatgaccccgagcgatgaaaacgaatgtcgccagatgctctataccggctatcactataacgatggcccgtcagcggtgcgctacccgcgtggcaacgcggtaggcgtggagctgacgccgctggaaaaactgccaattggcaaaggcattgtgaagcgtcgtggcgagaaactggcgatccttaactttggtacgctgatgccagacgcggcgaaagtcgctgaatcgctgaacgccacgctggtcgatatgcgttttgtgaaaccgcttgatgaagcgttaattctggaaatggccgccagccatgaagcgctggtcaccgtagaagaaaacgccattatgggcggcgcaggtagcggagtgaacgaagtgctgatggcccatcgtaaaccagtacccgtgctgaacattggtctgccggacttctttattccgcaaggaactcaggaagaaatgcgcgccgaactcggcctcgatgccgccggtatggaagccaaaatcaaggcctggctggcataatccctactccactcctgctatgcttaacaaattattcatagactctaaataattcgagttgcaggaaggcggcaaacgagtgaagccccaggagcttacataagtaagtgactggggtgaacgaatgcagccgcagcgcatgcaacttgaagtatgacgagtatggcaggagtggcagcatgcaatacaaccccttaggaaaaaccgaccttcgcgtttcccgactttgcctcggctgtatgacctttggcgagccagatcgtggtaatcacgcatggacactgccggaagagagtagccgtcccatcattaaacgcgcgctggaaggcggcataaatttctttgataccgccaatagctattccgatggcagcagcgaagagatcgttggtcgcgcactgcgggatttcgcccgtcgtgaagacgtggtcgttgccaccaaagtgttccatcgcgttggtgatttaccggaaggattatcccgtgcacaaattttgcgctctatcgacgacagcctgcgccgtctcggcatggattatgtcgatatcctgcaaattcatcgctgggattacaacacgccgatcgaagagacgctggaagccctcaacgacgtggtaaaagccgggaaagcgcgttatatcggcgcgtcatccatgcacgcttcgcagtttgctcaggcactggaactccaaaaacagcacggctgggcgcagtttgtcagtatgcaggatcactacaatctgatttatcgcgaagaagagcgcgagatgctgcctctgtgttatcaggagggcgtggcggtgattccatggagcccgttggcgaggggccgtctgacgcgtccgtggggagaaactaccgcacgactggtgtctgatgaggtggggaaaaatctctataaagaaagcgatgaaaatgacgcgcagatcgcagagcggttaacgggcgtcagtgaagaactcggtgcaacacgagcacaagttgcgctggcctggttgttgagtaaaccgggcattgccgcaccgattatcggtacatcgcgggaagaacagcttgatgagctgctgaacgcggtggatatcactttgaagccggaacagattgccgaactggaaacgccgtataaaccgcatccggtagtaggatttaaataagagtccaggcctgatgagacgcaacaagcgtcacatcaggcatcggtgcacaactacgacagaatgcccagcggccagtgatgaccgataaagtacaggatacctgcggagatcaccccggcgacaatatcatcgatcatgatccccatgccgccatgtacattgcgatcaaaccagcggatcggccacggcttccacatatccagaatacggaaaatgacgaatccggcagtgacccactgccagtcattggtcggcagcgccatgagcgtgatccacataccaataaattcgtcccagacaatgctgccgtgatcgtgcacgcccatatctttcgccgtttgatgacaaagatagacgccgatacagatccccagcatcaccaccagcgagtagagctgccagggcaaaaaggtcatcagataccagaacggaatcgctgccagcgagcccatcgtcccaggaacgatcgggcttaatccacttccgaatccgacagcaagtagatgccacggattactcatcttcaggcgacttttcgcgacatctttatggcgtggcaaaatggtcatatcctttccagtctaacgtaacaggttcgccgtcacgaataaaacaaagcccttcgatatcggcggtcatttgcccgatacaggtaaacggtacgcccaggtgtccgagagccacatccagcgctccacggttcagttccggcaccgtgaaacacaactcgtaatcttcaccgccagagagcgcccagcgcagcgcctgttccggttcaacatggcgagaaagcgcatcagaaaacggcagcaatgccaggtcaatacgtgcgccgcagtcgctggctttcacgatatgcccgagatcggaaatcagaccgtcagagagatcgatagctgaatttgccagatcgcgcagtgcctgcccctgtaaaatacgcggcgatggacggagatgacgtttgatcaagtagtcagcatctttagcatcggcaacctgcaaacggttttgcaaaatcgccagcccggcggcgctatcgcccggtgtaccggtcacatagatccagtcacccggtttcgccccagagcgcgttaaggctcgtcccatcggaacaaagccgtggatacccaacgtcattgataatggcccacgcgtggtatcgccgccaatgagttgcatatcgtaataattgagaagatcaaacaaactgtcgctgaaggactcaagccacgcttcgtctacgtccggtaaggttaatgccagcgtcagccaggccggatcggcccccatcgctgccagatcgcttaggttcaccgccagtgctttatacgccagatcagcaggatcgatatcatggaggaagtggttgcccgccaccagcgtatcagtgctgatcgccagggtctgtttctcggggatattgagaagagcgcaatcgtcgccgatgcccagttcgacatcaagacgagaacttcttacacggtcaaaataacgggcaatcagggagaactcgccacatgccatacgttatgcctcagcaggtaaaaaagaaaaggccggcgatcgcggaacggtcttccgtgaatctaccggcctggatatcactttttgttagggcgaatcacaggtgctgctttatcgagtacgccgttgacgaacttatggctgtcttctgcgccgaacgatttcgccagttcgatcgcttcgttaatggccactttgtatggcacatcgctacgtttagacagctcgtacagcgcaatgcgcagtactgctttttctacctgtcccagttcttccagcaggcgggacaggtatggcttcatcagtccgtcgaggtatgcggtgttagtcgccaccccggccagcagctcacggaagtacaggacgtcaacgtcttttacatcctgttcagccaggaactggtattcaacatcagcgatgtcgttctgggacaactgccaggagtagagcgcctggacggcacactcacgagcgcggcgacgagcagcaggtttcacggatttccccttactaatttcaggccttgatggctttcaatacattaatcatttcaagcgcggtcagtgcagcttctgcacctttgttgccagctttggtgccagcacgttcgatcgcttgttcaatgctttcagtggtcagaaccccaaaagcaaccggaatttcgctgtcctgggcaacatgcgccaggccgttgcttgcaccaccagcgacatattcaaagtgggcagtgccaccacgaataaccgtacccagcgcaatcaccgcgtcgtatttaccggttttagccagtgcacccgccgccagcggcagctcataggcaccaggcacccaaacaacggtaatgttttcatcttttacctgaccgatacgtttcagtgcgtcaattgcaccttccagcaggctgtcattgataaagttgttgaaacgcgcgatggtgatggcgacgcgagcgtccggggtagcaacgttagcttcaataatgttcattttcttccttcgggttcgagtatggccccgcaggggggcggattttagcataatatttcgtgcgctgcttccctttcgagccgggagatcatgcacccactaaatgcaggcaaacatccgggcctacatgacgtatctctttgaatttaaattggggggcgtcggctaatttctcaagccctggcagcgtgcataatccgcgggcgtcgctgcctaatagtttaggtgcgatatagacaatcagctcatcgactaaacccgcctgcagcaatgcgccagcgagcgttggccccgcttccacccagatgctgttaatttgctgtttacccagttgcatcatcagtacaaccagatccagatgacctttatgctctggaatcagcaaggtacgcaccgtttccggccactcacgagaatcttcctgcgtacgcgcgaaccaggtttcgccgggctgctgcacaatgcgatgttccggcgtcacgcgattttggctatcaatcacaatacgtactggctggcggagattttgttgcgggtagagcgcctgagtttgttcatccagttcagaccaacgcactgttaaggctggatcatccgccagcaccgtggcgctgctggttaaaatggcatgactttgtgcgcgctgtcgttgtacgtcgcgccgcgcctgaggcgaagtgatccactggctttcgccgctcgccatcgccgtgcggccatcaagcgatgcgccaagttttaactgaatataaggaaagccggtgcgcatccgcttgagaaagcctttattcaattgctcggcttcactcatcatcagcccgtggctgacgtcaatgccagcctgttgcagacggtaaagtccacgcccagcgacctgcgggttaggatcttgcatcgaggcaaccacgcgcgctacgccagcggcgatgagtgcgtcacagcacggtggcgtacgaccatgatggctacagggttcgagtgtgacataggcggtcgcacctttggctttttcacccgccatacgcaacgcgtgtacttcggcatgtggttcacccgcacgttggtggtaaccttcaccgacaatttcgccatctttgacaatgacgcacccgacattcgggttgggatgcgtggtaaaacgtcctcgttgcgccagctttagcgcccgcgccatgtaatactcgtcctgcacggcttagtcctccaggcgcgcgatctcttcgccaaattctttgatatcttcgaaactgcggtagacagaggcaaaacggatataggcgactttatcgagctttttcaattgctccatcaccagattgccaatcatcttgctcggcacttcgcgctcaccggtggcgcgcagctgcgatttaatatgattgattgccatttcgacgtcatcggaactcaccggacgtttttccagcgcccgcagcattccgctacgcaatttctcttcattaaacggttcacgcacgtcgttgctttttacaacacgcggcataaccagctccgccacttcaaaggtggtgaaacgttcattacacaccagacactgccgacggcggcgtacggatgaaccctcgcccacgagacgagagtcaattaccttagtgtccacggcgaaacagaatgggcaatgcatacggcgtcctgaccaggtggttaacagaaatctattttaccctgaactgacgatacaacaaaggcgcaacgcttttgagataaaggatcgatgctttcgctgcttttaccctctaccattaggctaattgcgacgagaaagggacgacctatgaatactaacgtttttcgactgctcctgctgggaagcctgttcagccttagcgcctgtgtgcagcagagcgaagtgcgacagatgaaacacagcgtcagcacgctgaaccaggagatgacgcaactcaataaagaaacggtcaaaatcactcagcaaaacaggctgaatgcaaaatccagcagtggggtttaccttctgcctggagcgaaaacaccggcaagactggaaagccagatcggtactttacgtatgtcgctggtgaatattacgcctgatgcagatggcaccaccctgacgctacgtattcagggcgagtcgaatgatcccttgcccgcattcagcggaactgttgaatatgggcaaattcagggaacaatagacaactttcaggaaatcaatgtgcagaatcaattgattaatgcccctgccagcgtcctcgcccccagcgatgttgatattccgttacagttaaagggtatttctgtagaacagttagacttcgtacgtatccacgatattcaacctgttatgcagtaaacgtatttcggggcgattttgtgcgtcccgcaacatctttccccgtcattttgttactccgcttacatcacccagattgatagtaaaagtttgcaacaagggtgaaagtcagtacaatccctgcccgaatgtgtgtaaacgtgaacgcaatcgattacgtaaatgatagaactgtgaaacgaaacatatttttgtgagcaatgatttttataataggctcctctgtatacgaaatatttagaaacgcaatttgcgcctttttcactcccgcaagggattttcaaacagtggcatacatatgaaaaaaacattactggcagccggtgcggtactggcgctctcttcgtcttttactgtcaacgcagctgaaaacgacaaaccgcagtatctttccgactggtggcaccagagcgttaacgttgtcggaagctatcacacccgtttcggaccgcagatccgcaacgatacctaccttgagtacgaagcattcgctaaaaaagactggttcgacttctatggttatgcggatgcgccggtattcttcggcggtaactccgatgctaaaggtatctggaaccacggttctccgctgtttatggaaatcgaaccacgtttctccatcgacaagctgaccaatactgaccttagcttcggtccgttcaaagagtggtacttcgcgaacaactacatttacgacatgggtcgtaataaagatggtcgccagagcacctggtacatgggtctgggtaccgacatcgatactggtctgccgatgagcctgtccatgaacgtctatgcgaaataccagtggcagaactatggcgcagcgaacgaaaacgagtgggacggttaccgtttcaaaattaaatactttgtgccgattaccgatctgtggggcggtcagctgagctacatcggcttcaccaacttcgactggggttccgatttaggggatgacagcggtaacgcaatcaacggtattaagacccgtaccaataactctatcgcttccagccatattctggctctgaactacgatcactggcactactctgtcgtagctcgttactggcacgacggtggtcagtggaacgacgatgcagaactgaacttcggcaacggcaacttcaacgttcgctctaccggctggggtggttacctggttgtaggttacaacttctgattatgaaaatgccgggatttattcccggcatttcagattgttaacaacgtgcgctttgttcatgccggatgcggcgtaaacgctttgtccgacccacaaaagcacgtaaattcaatatattgctgaaataacgtagtcctgataagcgtagcgcatcaggcaattttacgttttaatcacttcttcttgttcatcatcgctttcaggtcagcgaatgggttgtacttcgcttcaccgacatctttctgcgcatcttcccctgcgataacggtcgtaccatactgatccgcttcggtatatttcgaatgctcatgatcgtggcaatagagacaaagcaattcccagttactgccatcttccgggttattggtatggtcgtgatcaatgtggtgaacagtaagttcacgcaggttggaataaacaaactcgcgggaacagcgaccgcagacccacggatatatttttaatgctttttcgcgatagccgctttctaaccgcgcatagttttttgggatgatagccatgaagagttacctggatgaaatgtagggttacgcgcagtttcccaagatgcggggattttcgcaatctccatacatcaaaaaaaatcccgatcttctgaccgggattttcaacatcaacgggaacttgattacggcagaattgacggctgatccgccccttctttttccactttctgctgcaacatgtgttcgcgcttcatacccagtttcagagccaacgcagatgccacatagatggaagatgcagtaccgatggaaacaccgataagcatggtcagcgagaagccttccagtaccggaccaccgaagaggtacagcatcaggataaccatcaaggtagtaccggatgtgatcaaggtacggtgcagcgtctgggtcaaggacacgttaaagatttcgtaaggcgtaccgcgacggatcttgcggaagttttcacgaatacggtccgataccacgatactgtcgttaagcgagtaaccgataacagacatcaacgatgccacaatggtcaggtcaatctcgatatggaataacgacaaaatacccagcgtaatgataacgtcgtgcgccagcgcaataacaacccctgccgccagtcgccactcaaagcgaaaacctacgtacacaaggatagacagcagcgccgccatcaacgccatcgcaccggtttgcgcaaggtctgcccccacgctcggaccgacgaactcaatacgcttcactgctgcattctgattggtggattcgttaatcaccttcagaacctggctgcccagcacctgaccgccggtttcgccttcagcaggcggcatacggaccatgatgtcgtggctgctaccaaagttttgcagcattggctcttcaaaaccggctttttgcaatgcatcacgcattacgtcaatttcagccggtttttcgagcgtaatttcgataaccgtaccaccggtaaaatccagcccccagttaaagccgcgcacgcccataataacgatagcagcgattaacagcagaccagagatgccgaaagcccagtagtcccagcgcataaagtcatagactttacggccgtggtttagttgttcaacagtatattcctgtgccacatcgcactcctcagattgacagcttcttgacgcgcttgccgccatatagcaggtttacgatggcacgcgtaccgacaatcgcggtaaacatcgacgtcgccacaccgataccggtagtaatcgcgaaccctttaattgccccggtacccactgcgtacaggatgatgactttaatcagcgtggtgatgttcgcatcgaagatagaactgaatgcgccacgataaccttcatcaattgcctgttgaacagtacgtccgttgctcaactcttctttaatacgttcgttgatcagtacgttcgcatcgaccgccaccgcaagggttaagacgatacccgcgatacctggcatactcagcgttgcgcctggcaacagcgacataatgccgacgattaagatcaagttggcaatcagagcactggtcgcaatcagaccaaacttcttatagaagatgatcatgaacagaatagaaaccagcagaccggcaaggcaagcctccagcccctgttcaatgttctgcatacccagggttgggccaatggtacgttcttcaacaatctgaatcggcgcgatcaacgcaccggcacgcagcagcagtgacagctgacgggcttcgttcgggttgttgatgccggtgatacggaagctgttacccagacgagactggatgttggcgatgttaatcacctcttcctgtttcaccagaaccgcacgaccatttgcatctttcttaccgctgtctttgtactccacaaacagggttgccatcggtttgccgatgttgtccttagtgaagttagacatgatgttaccaccagcgctatcgagcgagatgttaacctgcggttggttgtattcgtcctggctggaagtggagtcggtgatatggtcaccggtcagaattacgcgtttgtacagcacaactggctgaccttcgcgggtctgtttcacttcagagtcgcccggtacgcgaccggatgccgcagcggcctggtcaacgttggtgtttaccagacggaattccagcgttgccgtcgcacccagaatctctttcgcacgcgcagtgtcctgaatacctggcagttcaacaacgatacggtcagcaccctgacgctgaaccaccggctccgccacgccaagttggtttacacggttacgcaggatattgatgttctgctgcaccgcatattcacgcgcttcactcagacgagcatcgctcattaccgcacgcagctggttgctgccctggctactaatcaccaggtccggatggcgcttgctcagatacgcaatggcttcatcacgagctttagcatcgcggaaagtaatgctcaggccgtagttgttttctttacgaacggtggtatacgggatgcccttttcacgcagatcgctgcgcaggctatcgatattttgttcctggagtttgccaagcgcggtgtccatatccacttccatcaggaagtgaacgccgccacgcaggtcaaggccgagcttcatcggctcagcgtgaatagctgccagccagcgcggcgttgccggggcaaggttaagcgccacgacgtatttgtcacccataacgcccattaatgcttcacgagcgcgcagctgggtgtcagtggagtcgaagcgcgcaagaatagcgccctcttccagtgccacagacttagcagttattttttcttcttgtaacgttttctggacctggatcagcgtttgctcactggcggcgactccgcgcgcaccagtgatctgaacagccggatcctcaccaaacaggttgggaagcgcatacagcagaccgatgacaatcaccacgatcagcatgacgtacttccacaaaggataacggtttaacacggcaattcccttagggaaaaattttaattacagcgccttcatggtgcctttcggcaggacggcagctacgaagtcacgtttaataactacttcagtggtgtcattcagcgcgatagcaatgtagccgttttccgctactttggttacgcgaccaaccaggccaccgttcgtcagaacttcatcacctttggcaatggagtccatcagctttttgtgttctttggtgcgcttctgctgtggacgcaggatcatgaaatagaaaatcagaccgaataccaccagcatcaaaatcaaagacatcgggctaccttgcgccggtgcacccgttgccgctaccgcatcagaaataaaaaagctcattaaatttccctcattattaatattaatcaacgttcaaaggtggtacttctcgcccctgacgctggtaaaaatcagttacgaagctctctaatttaccctcttcaatagccttgcgtaaacccgccatcaaacgctggtagtaacgaaggttatgaatggtgttgagtcgcgcgcctaatatttcgttgcaacggtcaagatgatgcaagtaagcgcgtgaataattgcgacaggtgtagcaatcacactcaggatcgagtgggccagtatcgctcttatacttcgcattgcggattttcaccacgccatcggtcacgaacaaatgaccatttcgggcgttgcgggttggcattacgcagtcaaacatatcgataccacgacgtacgccttcaaccaggtcttctggtttaccaacgcccatcaggtaacgcggtttgtctgccggaatttgcgggcatacatgctccagaatgcggtgcatatctgctttcggctcacccacagccagaccgccgacagcgtagccatcaaaaccgatatctaccagacctttaacagaaatatcacgtaaatcttcgtaaacgctgccctgaatgataccaaacagcgcatttttgtttccgagactgtcaaaacgctcacggctacgcttcgcccaacgcagagacatctccatggagcgttttgcgtaatcccagtcagcaggatacggcgtacactcatcaaagatcatgacgatatccgaaccaagatcgtactgaatctccattgatttttcaggatcgaggaaaatcggatcgccgttgatcgggttacggaagtgcacgccctgttcggtgattttacgaatatcgccaaggctgaagacctggaagccgccggagtcggtgaggatcggccccttccactgcataaaatcgtgcagatcgccgtgcagtttcatgatttcctggcccgggcgcagccacaggtggaaggtgttgccgaggataatttgcgcgccagtggcttcaacttcttccggcgtcatcccttttacggtgccgtaggtgccaacaggcataaaacaaggcgtttccactacgccacgatcaaagaccaggcggccacggcgtgcgcgaccgtcggtggtgtccagttcaaatttcattttttctccactacgtcagaaaaacagtccaacgttttaaaccagcgccgcggaattactccccgacgcgctcattaattgcctgcggattgtacgtgataaacatcgcatcaccgtaactaaaaaagcgatatttctcttctaccgctgctttataggcgttcatggtgtgttgataaccggcaaaggccgaaaccagcataatcagcgtcgactctggcaagtggaagttcgtcaccagcgcatcgaccactttgtactggaagcccggatagataaagatttgggtatcgtcgaagaacggttcaatgagatcgtttttcgctgcctgagccgcgctttccagcgaacgtactgaagtggtgccaaccgcaatcacccggttaccgcgcgctttcgccgccagtaccgcgtctaccacatcctgcggtacttcagcgtattccgagtgcatgatgtgatcttcaatggtgtcgacgcgcaccggctggaaggtgcccgcaccaacgtgcaacgtcacaaacgccatctccacgcctttggcgcgcaatttttccagcaaaggctcgtcaaaatgcagaccagcggtcggggctgcaaccgcgcccggtttttcgctataaacggtttgataaagttcgcggtcagcgtcttcgtccggacggtcgatatacggcggcagcggcatatggccgatactgttgaggatatccagtaccgaacgatcatcattgaattcgacttcaaacagtgcgccgtggcgcgcggtcattgttgcgttaatactttcgtcatcgcccagcagcagttctgcgccaggttttggcgctttcgaggcgcgaatatgcgcaagaatgcgtttgtcgtcgagcatccgttcaaccagcacttcaatcttgccgccgctggctttacgcccaaacaggcgcgccgggatcacgcgggtattattaaaaaccagaagatcgccggggttgagcttatcaagtaaatcggtgaaagtaccgtgcgtcagcgcgcccgtcggcccgtctagcgacagtaaacgacagctactgcgttcaggcatgggatagtgggcaatcagggattcgggcaattcaaaggagaaatcggtaacgcgcatgacactgactcagactaaaataagaggcgggtagtctagtgccggggcgctctccctgcaacctttacccccttttggatagaatataatcgatgaattttttagctcacctgcatttagcccatctcgcggaaagctcgctttccggcaatttactggctgatttcgtacgcggaaatcctgaagaaagttttccgcccgacgtcgtgactggcattcatatgcatcgacgtatcgacgtattaaccgacaatctgccggaagtccgcgaagcacgggaatggtttcgtagtgaaactcgccgcgttgcgcctattacgctggatgtcatgtgggatcactttctttcccgccactggtcgcagctgtcgccggactttccgctacaggaatttgtctgttatgcccgcgagcaagtgatgacgattttgccggactcaccgccacgttttatcaatctgaacaattacttgtggtcagagcagtggctggtgcgctatcgcgatatggatttcatccagaacgtgttaaacggcatggcaagccgccgcccacgtctggatgccctgcgtgactcctggtacgatttagacgctcattatgacgccctcgaaacccgcttctggcagttttatccgcggatgatggcgcaggcgtcacacaaggcgttataaaacgttagttcatccataccgtagccgaaatggcaggcaaagccagaatcccgtcagtcagttgcccatgcccttctttgcattgccattgcacggcattgagcaacggtgacgcgggtagcacgacttcacaagcttcgccacggttgattgccaccagtacacgctgctgattcagcacgcggacaaataccaccacgttatcttccgcatacagcacctgacagccgccatgacgtagcgcctgacttttcttacgcagcgcaatcattcgctggtacagcgcgaataacgccgtatcctgcttttccacctgccaggggaacggtttacggcaaaacggatcgtttttgccatccagtcctacttcatcaccgtaataaatgcacggtacaccaggccaggtgaacagccagaccaccgccagcggcaggcgcgcaatatcccgaccgagcagcgttttaaatcgcgcagtatcgtggctgtcgagctgattaaacatacgtaattgttgttgatgagaaagccctgcgcggtaattatccatccaggccatacaggtttgggcatcaatttgctgcggatcgtaagagatatcggtattggcaagaaatccccacaacgggaatgtgaagccacgatagttcatggcggcatcttccacatcggcctgtaaccattgccgtgcatcgccaaaatgttcgccgacaatatacgcttccggctgggtttctttcgccgcttcggtgatcccagcaacgtgctgcatattattgcgcgccccacccgcctcccccagcatatgcaccacatccagccgccagccgtccatactccacggcgctttcagccaatggcggacaatactgtcttccccgcgataaatttcattcaccagactttccgactgataatccagcttcggcaagctggcatagccaagccagtcgagcgccgtgccatcatcactaaacgagtaccagtcgcgccagggcgattcagggttgtgacaagctccccccgtgccacgattgtgcctgtcaaaccaggcatgggaatcgccactgtggttaaacacgccgtccagcaccagccgcattcccagctgctgcgtattgtgtcgcaaacgcagcaacgccccatcaccgccaaactgcggatcgacatggcgataatcctcggtatcgtatttatgtacgctgggagctttaaacaccggattgagatacagcgctgtcacgccaagctttttcagatacggcagtttttcgcttatcccgtccagatcgccgccatagaacgttgatccgcccgcctgcgccgtgaccggttcatcccagtcacgcaagatgatctcttgtccggctgcatgatggtaatagacatgatcctgttcagcttcacgaggaagactacgcgcaaaacgatcagggaagatctgataaaaaatctgatccgcagcccattgtgggccgatatccggtacatcgacggcaaactgctccagtcgtgccggcggcattcggctgaagccctgcggtgtaaaccaacgctggggatcgtgccacagcagtttgaaactgtaacgccgccggggttgtccgctggagagatcaatcgccgcacgccatgcggtgacgcctggctgcggctgactgcgctgcttatgcattggtactgacatttcttcgttatcgtgttctgtacgcagcataatgcgctgcggtgggtcttcgcccgtcagccacagtgttatgagcagttgatctttgctttgtttaacaaatgggggcaccggcaggtgccatgcatttaacatcataattcccctgtgatgaaaatctgatcaccttgccatagcctaatgcaggatcactcatcatctgaaggatatttgggggaggaggacgggggcggataactttcggaatagccggatcaggatttcctcctgaaccggcttacagaacgcaagtattattggttttcagccagctgacgatcgtggcgacgcttaaacatccagccaatcaacagcacaacaatccacgcgaaaccgacatacagcgagatacgcgtatccgggtgataaccaatcaacccgataataaagagcaggaaaatcagcccgccgatggtcgttgctaccccacccggcactttaaatttcagcgccttaacttcttctggcggcaaacggcgacggaaggcaatttgcgacagcaggatcataatccacacccacaccgtggcgaaggttgccagcgaagcgatcaccaggaagacgttttccggcatgatgtagttcagatacaccgcaaacagcagcgcggtagtcatcaccagcaccgtaacccacggaataccgcgacgcgacgttttgctgaaaattttcggcgcgctgccctgctctgccataccgtggagcatacggcctacgccaaatacatcactgttaattgccgacagcgaagcagtcagcacaacaaagttaagaatgctggcggcaaaggtaatgcccatatgctggaacgtcagcacgaacgggctaccggcagtgccaacctgattccacgggtagatagacataatgacgaacagcgtaccgacgtagaacaccagaatacgcatcggcacggagttaatcgcacgcggtatcgatttctcaggatctttcgcttcaccggcggtaatcccgataatttcgatcccaccgtaagcaaacatcaccatttgcaacgacattaccatgccaagccagccgttactgaagaagccgccgttgctccacaggttatgaataccggtcggttgcccgccgttgccaatcccccagatgatgatgccgaaaccggcgacaatcatgatgatgatggtggcgactttaaagaacgagaaccagaattccagctcaccgaagaccttcacgctcatcaggtttacggcgcaaatgatcagcaccacgctcagtacccaaatccagtgcggcaccgtcgggaaccagacacccatatagataccaaaagcggtcacatcggcgatggcgacaataaggatttcaaagcagtaggtccatccggtaatgtaacctgccagcgggccgaggttttcctgcgcataacgcgagaaagagctggcggccgggttatgtaccgacatttcccccagcgcacgcataatgatatacgccgcgataccaccgataatataggccaacaacacgctcggaccggccattttgatggcgtctgccgaaccgtaaaacagcccggtgccaattgctgaacccagtgccataaagcgtatgtggcgggtacttagcccacgctttagcttgttcttactttccatcaattcctaacccatcaacacaataaaaaaccacggggcatcgcagccccgtggttaaaacaaatgttcagtgatttagtgagcgctggaggtcacctgacgacctgccgcgcgatcccagataatggccagaaccaccatcaccactgttggcattaaccacgccagaccttgttcggccagcggtaaacgctgcgcccaggacggtaagatatcgctgaatgcagatgctttgatcccgtcgagaataccaaaaagcaggctgataaacatcggcggagcaatcacgcgggacgaattatgccaccatgagcgtgtaaaacttaatacaaccagtgcgatacacggcggataaatagcggtcagcaccggtacggagatctggatcagctggcttaagccgaggttagaaaccaccatcgagaagccgccgaggataaacaccagcgtacgataagagagcggtacgtactgggcaaagaattctgcacaagcacaggtcaggccaactgccgttaccaggcaggcgatgaagattaacgccgccagcaggaagctaccgccgccgccaaaggtgtgctgaacgtaagcatgcagaatagcagcgccgtttgcagactgatcgaccagcgacgcgctgtctgaacccagacggaacagcgccaggtacagcagagtcagaccaacacccgccatcaggccagcccagacggtataacgggtcagcagacgcgcttcggtaacgccacgagaacgcgccgcgttaacaataacgataccaaacaccattgcgcccagcgtatccatggtcagatagccgttaacgaagccgttagaaaacgcagcgttttgataagcctcagtcgccgtgctgatagaacccgccggccagacaatcgcggcaacagacaggatgaccagcgcgataattttcagcggcgcaaggaagttgcccacggtatccagcagcttgcccggatagagcgaaaccagaataacgatagcgaaatagaccaggctgtagataaacagcggcagcgcggaatcacccgtcagcggcgcaatccccacttcaaaggaaacggtagctgtacgcggcgtagcgaaaagcggccccaccgccaggtaacaaaccgttgccagcagcacgccagcaactttaccgattggcgtgctgaggctgtcaacaccgccgccaacttttgccagcgccactaccgttaataccggcaggccaacggcagtaatgaggaagccgaatgccgcagtccagacgtgttcgcctgcctgcaagccgaccattggagggaaaataatgttacctgcgccgacgaacaacgcaaatgtcataaagcccagagcgatgatatcgcgcgatcttaattgatgggtcataaatcatactgcctgtggatgtggtgttgtaacgttaaatttttgtgccaatccctggggatgatacagcggtatatttaaacaattttagcgggaaatactcccaaccaggcgcggcgaagaatagtttttcgatttaccgcgttaatgcagtcagtatgacagcacctgaagcgcaatttaaacgcttataacgttttaaagcaaggagggatctaaaaaccagaggtatatagcgataagaaatcaccaaccagtataaaacactatttccgtgaaaaagacatggctaatcatgcgaacaaaaaatcaccaaccgttgtaaaatctaacgcccgtattttgactgcaaagaaaataagccagcatcgactggcttatggcaataaaagatgacaaaggcggattaatcgctgtttttggcaattaaacgttccgggataacaaaactgaaacgtgttccttttcctactgtactctcaatattcaggcgactttcgtgatgattcacagcatgtttcacgatcgctaaccctaatccgctaccgccggtttgccgggaacgcgctttatcaacgcgataaaaacgctcggtcaggcgcggaatatgctccggtgcaatgcccggtccgttatcttcaacgctaaattcggcaccgtgcggcactcgctgccagcgtacggtgatatgcgtgccttctggagtatgattcacggcgttatagaccaggttcgaaatcgcactgcgtagctgatcttcgttgccagacactttgaggccgttatctatctcaaaggtaaatgtctgttttttctgactcagagtctgagcctcacgctcaacaacgcgcagcatcatcggcacatcaaccttttcattgagcaaatgcgtcggtgcggcttctattttcgacagcgtcagcaactgcttcaccagcccttccatccgctgggtctgctcgcgcatggtgtgcaacgctttttcgcgtaccgcgccttccagcggctgctcatccatcatctccaggtaaccctgtaacacggtcaatggcgtacgtaactcatggctcacgttggcaaaaaagttacgccgcgccccttccagttgatgcatttgcgtgacatcacgcgccaccatcagcaactgtttgtgggtataaggcatgacgcgaatttccagatgccgcccggtgttgagcaccagattgagcgggcgagaaaaatcacgcgttttcagatattgcgtaaactccgggtaacgcagcaggttaaggatgttctgcccgttatcttccggccagcgcaaaccaagaatttgttgcgccagaccgttacaccagaaaataccgccctcttcagtggtcagcaccactgcgtcgggcagcgactccgcgccgctacgaaagcgtttaatcagattgcccagttcacggcggcgttttttatttcgcagctgcatctggtgtaagccgtatagtagcggttcccagctaccacgccccggtggcggggtcatactacgatccacccacagccaccatgaaaggcgcaataaattccagaaatgccagataagcagtcccgttaccgatgccagcaaaaaccagggcaggtaaccaaaaaatgcacccaggatgaaagccgggaagcagcaaagtagcagctccagcaccagccttttccacgacagccgttccagcacgtaagatactccagttaagaaatcataagccctgctctgcgtccgatgagcaaggcgttaaaagcgggttgaaaaacgatatcctgtaccgcgcacggtctgcaccatgcggtcatgcccgcctggctccagtgctttacgcaggcgacgaatgtggacatcgaccgtacgatcttccacatacacgttagttccccagacgtggtttaacagctgctcgcggctgtacacgcgctcaggatgcgtcataaaaaagtgcagcagtttaaattctgtcggccccatctccagcggctcttcgcccgccatcactcggtgagatgtcgggtcgagacttaatccctgcatctcaatcacctcttccaccgccattggcgaaatacggcgcattaccgctttgattcgcgccaccagctccttcggcgaaaacggcttggtgatatagtcatccgcgccggtttcaaggccgcgcacgcgatcttcttcttcccctctggcggtcaacatcaccactggaatatcccgggtcatcgactcgcgcttgaggtgtttgatgaactggataccggagccgccaggtaacatccagtcaaggagaattaaatccggccagggttcattcagttgattcacagcactgtcataatcttccgcttcgaccggctgaaagccattttgttcgagcacgaagcagaccatttcgcgaattggagcttcatcttctacgaccagaatacgtctcgccatgatttgccctgttgtaataaataggttgcgatcattaatgcgacgtcattatgcgtcagatttatgacagatttatgaaaagctcgtcgcacatatcttcaggttattgatttccgtggcgcagaaaaaagcaaatggcacatctgtttgggtataatcgcgcccatgctttttcgccagggaatcgttatgcgcatccttcacacctcagactggcatctcggccagaacttctacagtaaaagccgcgaagctgaacatcaggcttttcttgactggctgctggaaacagcacaaacccatcaggtggatgcgattattgttgctggtgatgttttcgataccggctcgccgcccagttacgcccgcacgttatacaaccgttttgttgtcaatttacagcaaactggctgtcatctggtggtactggcaggaaaccatgactcggtcgccacgctgaatgaatcgcgcgatatcatggcgttcctcaatacgaccgtggtcgccagcgccggacatgcgccgcaaatcttgcctcgtcgcgacgggacgccaggcgcagtgctgtgccccattccgtttttacgtccgcgtgacattattaccagccaggcggggcttaacggtattgaaaaacagcagcatttactggcagcgattaccgattattaccaacaacaatatgccgatgcctgcaaactgcgcggcgatcagcctctgcccatcatcgccacgggacacttaacgaccgtgggtgccagtaaaagtgacgccgtgcgtgacatttatattggcacgctggacgcgtttccagcacaaaactttccaccagccgactacatcgcgctcgggcatattcaccgcgcacagattattggcggcatggaacatgttcgctattgcggctctcccattccactgagttttgatgaatgcggtaagagtaaatatgtccatctggtgacattttcaaacggcaaattagagagcgtggaaaacctgaacgtaccggtaacgcaacccatggcagtgctgaaaggcgatctggcgtcgattaccgcacagctggaacagtggcgcgatgtatcgcaggagccacctgtctggctggatatcgaaatcactactgatgagtatctgcatgatattcagcgcaaaatccaggcattaaccgaatcattgcctgtcgaagtattgctggtacgtcggagtcgtgaacagcgcgagcgtgtgttagccagccaacagcgtgaaaccctcagcgaactcagcgtcgaagaggtgttcaatcgccgtctggcactggaagaactggatgaatcgcagcagcaacgtctgcagcatcttttcaccacgacgttgcataccctcgccggagaacacgaagcatgaaaattctcagcctgcgcctgaaaaacctgaactcattaaaaggcgaatggaagattgatttcacccgcgagccgttcgccagcaacgggctgtttgctattaccggcccaacaggtgcggggaaaaccaccctgctggacgccatttgtctggcgctgtatcacgaaactccgcgtctctctaacgtttcacaatcgcaaaatgatctcatgacccgcgataccgccgaatgtctggcggaggtggagtttgaagtgaaaggtgaagcgtaccgtgcattctggagccagaatcgggcgcgtaaccaacccgacggtaatttgcaggtgccacgcgtagagctggcgcgctgcgccgacggcaaaattctcgccgacaaagtgaaagataagctggaactgacagcgacgttaaccgggctggattacgggcgcttcacccgttcgatgctgctttcgcaggggcaatttgctgccttcctgaatgccaaacccaaagaacgcgcggaattgctcgaggagttaaccggcactgaaatctacgggcaaatctcggcgatggtttttgagcagcacaaatcggcccgcatagagctggagaagctgcaagcgcaggccagcggcgtcgcgttgctcacgccggaacaagtgcaatcgctgacagcgagtttgcaggtacttactgacgaagaaaaacagttacttaccgcgcagcagcaagaacaacaatcactaaactggttaacgcgtctggacgaattgcagcaagaagccagccgccgtcagcaggccttgcaacaggcgttagccgaagaagaaaaagcgcaacctcaactggcggcgctcagtctggcacaaccggcacgaaatcttcgtccgcactgggaacgcatcgcagaacacagcgcggcgctggcgcatactcgccagcagattgaagaagtaaatactcgcttacagagcacaatggtgcttcgcgcgagcattcgccaccacgcggcgaagcagtcagcagaattacagcagcagcaacaaagcctgaatacctggttacaggaacacgaccgcttccgtcagtggaacaacgaactggcgggttggcgtgcgcagttctcccaacaaaccagcgatcgcgagcatctgcggcaatggcagcaacagttaacccatgctgagcaaaaacttaatgcgcttgcggcgatcacgttgacgttaaccgccgatgaagttgctagcgccctggcgcaacattccgagcaacgcccactgcgtcagcgcctggtcgcgctgcatgggcagattgttccccaacaaaaacgtctggcgcagttaatggtcactatccagaatgtcactctggaacagacgcaacgtaatgccgcacttagcgaaatgcgccagcgttataaagaaaagacgcagcaacttgccgatgtgaaaaccatttgcgagcaggaagcgcgcatcaaaacgctggaagctcaacgtgcacagttacaggcgggtcagccttgtccactttgtggttccaccagccacccggcggtcgaggcgtatcaggcgctggagcctggcgttaatcagtctcgattactggcgctggaaaacgaagttaaaaagctcggcgaagaaggtgcggcgctgcgcgggcaactggatgcattaacgaagcagcttcagcgtgatgaaaacgaagcgcaaagcctccgacaagatgagcaagcacttactcaacaatggcaagccgtcacggccagcctcaatatcaccttgcagccacaggacgatattcaaccgtggctggatgcacaagatgagcacgaacgccagctgcggttactcagccaacgacatgaattacaagggcagattgccgcgcataatcagcaaattatccagtatcaacagcaaattgaacaacgccagcagcagctcttaacggcattgacgggttatgcactgacattgccacaggaagatgaagaagagagctggttggcgacacgtcagcaagaagcgcagagctggcagcatcgccagaacgaattaaccgcgctgcaaaaccgtattcatcagctgacgccgattctggaaacgttgccgcaaagtgatgaactcccgcactgcgaagaaactgtggtactggaaaactggcggcaggtacatgaacaatgtctcgcattacacagccagcagcagacgttacagcaacaggacgttctggcggcgcaaagtctgcaaaaagcccaggcgcagtttgacaccgcgctacaggccagcgtctttgacgatcagcaggcgttccttgcggcgctaatggatgaacaaacactaacgcaactggaacagctcaagcagaatctggaaaaccagcgccgtcaggcgcaaacgctggtcactcagacagcagaaacgctggcacagcatcagcaacaccgacctgacgggttggctctcactgtgacggtggagcagattcagcaagagttagcgcaaactcaccaaaagttgcgtgagaacaccacgagtcaaggcgagattcgccagcagctgaagcaggatgcagataaccgtcagcaacaacaaaccttgctgcagcaaattgctcaaatgacgcagcaggttgcggactggggatatctgaattcgctaataggttccaaagaaggcgataaattccgcaaatttgcccaggggctgacgctggataatttagtccatctcgctaatcagcaacttacccggctgcacgggcgctatctgttacagcgcaaagccagcgaggcgctagaagtcgaggttgttgatacctggcaggcagatgcggtacgcgatacccgtaccctttccggtggcgaaagtttcctcgttagtctggcgctggcgctggcgctttcagatctggtcagccataaaacgcgtattgactcgctgttcctcgatgaaggttttggcacgctggatagcgaaacgctggataccgcccttgatgcgctggatgccctgaatgccagtggcaaaaccatcggtgtgattagccacgttgaagcgatgaaagagcgtattccggtgcagatcaaagtgaaaaagatcaacggcctgggctacagcaaactggaaagtacgtttgcagtgaaataactattcagcaggataatgaatacagaggggcgaattatctcttggccttgctggtcgttatcctgcaagctatcactttattggctacggtgattggtagccgttctggtggttgtgatggtggtatgaaaaaagtcattttatctttggctctgggcacgtttggtttggggatggccgaatttggcattatgggcgtgctcacggagctggcgcataacgtaggaatttcgattcctgccgccgggcatatgatctcgtattatgcgctgggggtggtggtcggtgcgccaatcatcgcactcttttccagccgttactcactcaaacatatcttgttgtttctggtggcgttgtgcgtcattggcaacgccatgttcacgctctcttcgtcttacctgatgcttgccattggtcgcctggtttccggctttccgcatggcgcattttttggcgtcggcgcgatcgtgttatcaaaaattatcaaacccggaaaagtcaccgccgccgtggcggggatggtttccgggatgacagtcgccaatttgctgggcattccgctgggaacgtatttaagtcaggaatttagctggcgttacacctttttattgatcgctgtttttaatattgcggtgatggcatcggtctatttttgggtgccggatattcgcgacgaggcgaaaggaaagctgcgcgaacaatttcactttttgcgcagcccggccccgtggttaattttcgccgccacgatgtttggcaacgcaggtgtgtttgcctggttcagctacgtaaagccatacatgatgtttatttccggtttttcggaaacggcgatgacctttattatgatgttagttgggctagggatggtgttgggaaatatgctaagtggcaggatttcaggacgttattcaccactgcgcattgcagcagtgactgactttataattgtactggcactgctgatgctctttttctgcggcggcatgaaaacaacgtcgcttatttttgcttttatttgttgcgcgggattatttgccctttcagcacctctgcaaatattattactacaaaatgccaaaggcggagagttattaggtgccgcaggtgggcaaatagcgtttaaccttggtagcgccgtcggcgcatattgcggtggtatgatgctgacgctggggctggcatataattacgtggcgctgcctgccgccctgctttcgtttgctgcgatgtcgtcattgctgctgtatggtcgctataagcgccagcaagcggcggatagtccggtgctggcgaaaccactggggtagattgcagtcacgttgcgcgttgcttattgccggatgcggcgtgaacgccttatccgccctacgcggttccggcacattttgtaggcctgataagacgcggcaagcgtcgcatcaagcatgatgcgccaattgcctacgttttttactcttgtggccataaccacgcagcgccgcgtacgccgctggaatcaccgtgcttcgccttacgcaccggcgtttcacattcgccgccgaagacaaattgtttaatcaactgcccaaccgtttgatataaacggtctacattgctcatcccgccccccaggacaatcacatccggatcgagaatattcacgacatgtgccagcgattttgccagccgcagctcgtagcgacgcaatgccagttccgctaccggatcgctttcttcaaccaggcggataatttcactgcctttcagcgcatgtccgctcaaacgacgataatcagtcgcgaatcccgtgcccgaaataaaggtttcaatacaaccttgtttaccgcaataacaagggacttcctcgcgataacgcagttcgtcttcgtccatccacggtagcggattgtgtccccactcacctgccgtgccattgccgccgatatgcgcccgcccattgaatgccacgcccgcgccgcatcccgtgccgataatcacggcaaatactgtctgcgctcccgctgccgcgccatctactgcttctgaaaccgccagacagttggcgtcatttgccagccgcacttcccgctgcaacctcgcgcttaagtctttatcgaatggctgaccgttgagccaggttgaattggcattcttcaccacaccggtgtaaggcgaaattgagccaggaatgcccatacctaccgttccgcgctgccctgtcgcctgctccgccatatcaaccaacgtggcgatcgtttcaatagtttgccggtaatcatcacgcggcgtgggcagacgatggcggtacaactgctcccctgcatcgcccagtgcaatcacttcagttttggtgccgcctaaatcgatacctatacgcacggtactctccttatttttttcaatatcaatagcgtagagacggacaaccggattggcaatgcaaggccgccgacaattcgttatcatgcccgctaaatttaacgacaaggccgtggaaattatcatgctgtggttcaaaaatttaatggtttaccgtcttagccgcgagatttcgctgcgtgcagaagagatggaaaaacagctagcctcgatggcatttaccccatgcggcagccaggacatggcgaagatgggctgggttcctccgatgggatcgcacagcgatgcgttaacgcacgttgccaatggtcaaattgttatctgcgcacgcaaagaagaaaaaatcctcccgtctccggtgattaaacaggcgctggaagcgaaaatcgccaaactggaagcggaacaggcgcgtaagctgaagaaaaccgaaaaagattcgctgaaagacgaagtgctgcactctctgctgccgcgagctttcagccgttttagccagacaatgatgtggatcgacacggttaatggtttgattatggtggactgcgccagcgccaaaaaagcggaagatacgctggcattactgcgtaaaagcctggggtcgttacctgttgtaccattgagcatggaaaacccgattgaactgacgctaaccgaatgggttcgctccggtagcgcagcacagggcttccagttgcttgatgaagccgagctgaaatcgttgctggaagatggcggcgtgatccgcgcgaagaaacaagatctgaccagcgaagagatcaccaatcacatcgaagccggaaaagtggtgactaaactggcgctcgactggcagcagcgcattcagtttgtgatgtgcgacgatggttcgctcaagcgtctgaagttctgcgacgagctgcgcgatcaaaacgaagatatcgaccgtgaagatttcgcccagcgttttgatgccgatttcatcctgatgactggtgaactggcagcgttaattcaaaacctgattgaaggattaggtggcgaagcacaacgttaattgctgattttcctttaatgccggatgcgacgcctgccgcgtcttatccggcgtacgatgccacaccaggcatataattattcgctacggcgggcaataatttttagcgcagcaatattatgcgttttacgccgtaactgatctaatcgcctcatccctattcgcctgtcagcagcacgcagaatattcactaacccccatttatcgctggtaaattgttttgttaacaactccgcttttggggtgtcaatatattcacgcaataaatcagaaattgaacaaatatccgtcaggtaaggataccagcaagtttcaccgtgaaaattacgcactccaccgttacctgcaataaagtctttcgggtaatcccagatcacgtttttatccaacgtgatccaataacgcggtaaatcggtgcttccaccattttggctgcgcatgggataacgggtacagtgaatttgcaggttgatcgttggcgtcagtaagtcatagatctcccgctgtaacttgctccagggggcgttgtgtcatcagttccgcaaaaaatacctggagatcttcactgatatttatatcaaccttgatgaattatgaatatatcggaaattgaaaaaatcgaagcaaaggaaatattattatgggttaaagagaggatatttcagaaaaatgccctcccgttcaaggggaaggcgaggaattacagatagcggcacagataagaggtgggttcggcaacttgcagatgaaactcactgtgaccgggaacattaaacaccgaaccggcttcatacacttgccagtcggtcgcgtcaggcagtaacacattcagcgcgccactgattaccgtcatctcttccggctcagcggtgctgaaggtgtattcgccttcaaccataacacccacgctggcgcgaccagtgctgctgctggaaaagccgattgatttcactttgccggaaaagtactcattactttgaagcataaactggccctgtttggtagttgaacatctacttcactataggggccagaggcgctgactgtcacgcaaaattacaccagtaattccgcagccagccgtgcaatcaatacgttagacagcaagacaggaacatcgagctgtttttgtagtaaatcgcgatgacgttggtgaaatcctaaacaatccagcatgatgacatcagccccttttgccagtaattctttcccggcatcaatgattttttgttctgaatcatgaatggggttacccaatgaaaataccggcgatttctgcaaaatttgccatttttgcgcctgaacgggcagcatctcctcaaccggaacgataacccccacctgatgatcttcaacaatagaggaaaccagtggaggcaatattcgcgacggctcaagaaagatcgtattacgcgcagtcatactactaatgtttgctgtactcattaataaaatgacgtcataaccctgattatcgagcacttcaaccacaccttgcaggtctcgctccactttacgacgcgaaacatgggccagctggttgtcatttaataatgtgagaatggtgtcttcgcctgcttctggcgcgtactccgccatcacttcttcacgacttaacttccccagcaggctatgatgggaaatattatcttcgtcaatgtattccgtcaggagcggcaaaacctcctgcataggtacaatgccgatggtcaggatcgccaacgacgcactcattgttcatccaccttacttttctttcgtcgttaattaccgggcaagtgtgaagcaccactgctgacacttacttgtgctacaaatgacaaaaagcgtagcagcagacgtgcacggcataatgtaaagattccaaatgattccagtaatggattgttattgtttaatattctaattattagaaaaacatgaattatgaaaaatgtgacgcagatcccttgtagtggcactcagaatcccttccgagcagtctgatgcggtcactctttgtcagggtcctcatagcgttttttcgcatccatcgcttcctgagccgtcggatgttcactgatcaacgagtctggtttaggatgatcggctctgagttggtaccaggttaccgtctgtcctggctttcctttttcaatcgtcactatatatgcttcacgaggataaggcggtttcgttggcatcgttcttccttatttcacgggatgaacgttaagtataggcgctctaaaatcaacaattgatcgtctgtgccagggcgctacgaatttcagaaatcacctggctgggttcgtttgttgcgtcgatgataatatgcgcaacttcgcgatatagcgcatcgcgttcttccagcacttcctgaacttcttcgctcagcggttttcccgttaaggttggccgtaaatcttcttccggtgcagcttgcagtcggttaaccaggactgatactggcgcacacaaataaaccacgatcccgttattttgcataaagtgacgattaaattccgtcagaataatgccgccgcctgtagcgataacggtggatggcgcagttaccgcttccagcgccgccgtttctctggcgcgaaatcccgcccactcttccctttcgacgatctccgcgaccgtcatattgagctgtgattgcaaccactgatcggtatcgacaaaccgacggttaagcgaatcggcaagggccattccgaccgttgttttaccacagccccgaggcccgatcagaaaaagaggttgtgtcatcgtgggttttccccaataggtcgcaatgcggcgaaagccggtgtcatgagaatagcgatcataccatcaaactagtacaatttcgattgtaaagaaaaaattccacttaaagtgaaaatctcaatacatcccttactataccaataaatattcaagaatgaagtgtaaataataaattacatttagccacgactacgttgcacttccagccaccacttctccagctccgcggcaaaggcctggcggtcacgttgtgaaaggctatctggtccgccggtctggatcccactggcacgtaaggtatccataaaatcgcgcatcgtcaggcgctcacgaatggtcgctggcgtgtaacgttcgccgcgcggattaagcgccgctgcgcctttctcgatggcttcagcagccaaaggtatatctgcggtgatcaccaaatcgcccgcttcacactgccggacaatttcgttatcggcaacgtcgaaacctgccgcgacgcgcagcgtacgaataaatcgcgatggcggcacgcgtaaactctggtttgctaccagtaccagcggcatctgcatacgttccgccgcgcgatacaaaatctctttaattacattgggacacgcgtcggcatccacccaaattgtcataaagtcatcctttgttgggtaatcctctattgtgtcgcgcttttgccttccggcatagttctgtttatgcttctgccagcgattatcaaaacaatgaatttcacggcaggagtgaggcaatggaaaagaaaatcggttttattggctgcggcaatatgggaaaagccattctcggcggtctgattgccagcggtcaggtgcttccagggcaaatctgggtatacaccccctccccggataaagtcgccgccctgcatgaccagttcggcatcaacgccgcagaatcggcgcaagaagtggcgcaaatcgccgacatcatttttgctgccgttaaacctggcatcatgattaaagtgcttagcgaaatcacctccagcctgaataaagactctctggtcgtttctattgctgcaggtgtcacgctcgaccagcttgcccgcgcgctgggccatgaccggaaaattatccgcgccatgccgaacactcccgcgctggttaatgccgggatgacctccgtaacgccaaacgcgctggtaaccccagaagataccgctgatgtgctgaatattttccgctgctttggcgaagcggaagtaattgctgagccgatgatccacccggtggtcggtgtgagcggttcttcgccagcctacgtatttatgtttatcgaagcgatggccgacgccgccgtgctgggcgggatgccacgcgcccaggcgtataaatttgccgctcaggcggtaatgggttccgcaaaaatggtgctggaaacgggagaacatccgggggcactgaaagatatggtctgctcaccgggaggcaccaccattgaagcggtacgcgtactggaagagaaaggcttccgtgccgcagtgatcgaagcgatgacgaagtgtatggaaaaatcagaaaaactcagcaaatcctgatgactttcgccggacgtcaggccgccacttcggtgcggttacgtccggctttctttgctttgtaaagcgccaaatctgccgatttcaaccactcacgatagtgactcatttgtgggttcagcggcgcaacccccacactaatccgtaaagttacctgtggcgtattcggcaagcgtaacgtgtttagcccttcacgcacccgtaacatggcggtaatggcgctctcagctggcgtaccggacatgattactgcaaactcatcgccgccaaaccgaccaatcacatcgctaccgcgcagggtaatttgtaactgtcgggtaagcgccacaatcgcttcatcgcccacatcatgaccccaggtatcgttgatgctcttgaaatggtcgatatcgataatcagtaacgttgcatcgcgattatgccgccgacagttatcaaattcattgcgtaacatagtttcccaatgacgtcggttatacacgcccgtcatgccgtcgcgggtactcatgacctgcaacctgcgtttatgttccgccagtttggttgccgtctggtagctgacccagccaaacagcagaggatacacgacaataatgggaagggagagccaccattccagcggcgcactattgaacgacacggtaatgcccgtaagctcgagggtgacaaggcaggaaaccaccatcaacaccagacccgcgacaaacagacgggggccgcctgcccccatcaaattcagacacataatcatcaacatagcggtggaaggcagcacgtttacgcccattacgcctacccacattcccgctaatactgcatcggtttttaagttgtaaatttcccggctaagcggatcgacggccctgctcgctatctgccaggctaaatgcggccagacgaacgcccagccgaccaacaccagccaccaccagcccggcggcgggtgcgaaaccagcgttgaagcaatcggtaagaacatgccagccaggccaaccgcacggggtagtctgacgcgacgggcgaagcgcagcccggaccgctgatgttcgttttgaggagttaaaggaggttcctccccatgcgccgccgcttttttgaaaaagttttcatcattcattatttttgggaacattcagaaacaattttcccaaattatagagacggggctaaaggcagaagtatgaaatttcgggtgagccactttcgtagctcacccgttagcactatcaggtatcaggcggctttcttgaggcaggcactcataaacttattacgatcatcacctttcagagattgttgcgttgcttgattattacattcgcgcatcttttgctgctgtggcgtcaaacttttttcaccaggcgcagacttgctgttcttcaggcaatcactcatgtaggtcttacgagcatcccctttcaacgcctgcgccgtcgcctgctgattacaggaggtcatacgctgttgttgtggggttaaggttctctcggcagcgccgacggtggttaaaaaaaccagaccaaaaagcaaggtaaccagtaatgttattttcatagcaccatccctcttcatgttttaaccatgagcgtttgcgcccgtgatctgccattaagtctggttgctaacagcaaaaaaaccacccggcagcgaaaattcactgccgggcgcggttttatttcagccccagagcggctttcatggtgtagaagagatcggtctggtcggtcagtccaacaacattggcggcatgcgggccatacgccgcaatacgcaactgactgccggtatgttcttgtgaatcctcttcggagttcccgtagctcatcaccatcactgcgccatctttggtatttagcgcctgggtgaggcccggagctttggtatccggcgcgacaatctggctggcgtgggcgtgatcagcggtgactatgaccagcgtgttgccatcctttttagcgaattccagcgcccgttgtacggcttcatcgagatcgaccgtctcgccaatttgcccacaaggattcgcagcgtgatcctgtttatcgattgacgcaccttcaacttgcaggaaaaatcctttctcatttttactcaacaattcaatggctttgtcggtcatctgcgccagggttggtacactgtcattacgttgcggattaggcgtacaggtgactgcgggcttatcgatattgccgtggtacgttgctttcggtcctagccagcgcactggcatattgccgtcagcaaacagtccaagcagaggtttttgctgattcgcttccgtcaccgcatttagcgaggcggcatcgctgaccaactgataaccacgcgcctgtgcctgttcacgcagcgtttttccctgccattcaccggcggttgccgtttcagcaaaggtttttgcgccaccgccaagcgtaacgtcggcacgagcgttaagcagctgttcggtaatcgatccttttccgcctttttccagagcgttacccggacatttttcactggtcgcgctcggaccgtagcatttgcgcgaagtcacatgtgccaccagcgcagcgggcgtggcatcctgcaactctgcggtagaaacgttaccggtcgccagacctgcggcttttgccatttccagaatcgttgggtgatctttttcgtgaatatcgacgcccagcgcgccgttataggttttgacaccggttgaccaggcggttgctgatgcagccgagtcggtgacgtagtccggtttgccagtttttttattcagcgcatagtgagtgtattgcccggtaagcggtaaggcatcgatacctttaaaaaagccgcccgcaccttcggcataattacgtgcggcagtaatttccgaatcccccatcccatcgccaatcagcaaaataatattttttgcaggtttatcgctaagagaatcacgcagagcggcggtctgatcacccgttaagcggcgagcaccgccgggtgcagtaatatcgccctgagcagcccggttttccagaacaggcatttctggtgtccgggcttttgtcacaggggtaaacagtaacggtaagagtgccagtgcaatagtgctttgtttcactttattttctccatgtacaaatacattaaaaaataaaaacaaagcgactataagtctcggccgtgacaactttatgacagctgttgaaaagattaactttttactgacgaggatgcttcaataacttctttacgtaatcgcgcagcagctccgtatcgtcgtcaggaatgctggcatcgggctttacctcgtacagcgccccctctacctgatcaatcaaccgctgttggtcattttgcgccatattgcgaagcattgcagtgacgataatctccaaagcttctacctgcgcacacagttctttcgactcttcttctttttgggcaagcttaaataacaactcagcaatgagatttttcatgtctgtatttccttatccaaagtatggagaagttaacattatgtttcacaacttcatagtgtctggaagtattatttttatgacaaaggaaatactttgcgcaaatattttttgtttgattaccagcgaaacgtttctcttatttaaataattacccacacaaaatataggcttttaattatcaacctttattataaataaaagttatgaaatatattctcttcgttaacttataattaagagaaaaaaactcaccgcatggccatttaagccaggaataaattagcttcccgttcatcatttttgtgatcttgcgcacatctttgagataacgcactttcttcaccagtacgttgcacgcttcgtcagcagaagattgcaacaatctttcagaaggccgcgaatcccccgttttgtcgtggtaatgtatgcactttgtgttagacgggataggtttttaagatggaaaaactgcgggtaggaatcgtttttggtggtaaatcagcggaacatgaagtgtctctgcaatcggcaaaaaacattgtcgatgccattgataaaagtcgcttcgacgttgtgctgctgggcattgataaacaagggcaatggcacgtcagcgatgccagcaattatctgctaaatgcagacgatcctgcccatattgcgttacgcccttcggcgaccagccttgcgcaggtgccaggtaaacatgagcatcagcttatcgacgcgcaaaacggtcagccgttgctgacggtggatgtcattttcccgattgtccacggtacgctgggcgaagatggttccttgcagggaatgctgcgggtcgccaatttaccgtttgtaggttctgatgttctggcttcagcagcctgtatggataaagatgtcaccaaacgtctgctacgcgatgccgggctgaacattgcgccatttattactctgacgcgcgctaatcgtcacaacatcagttttgccgaagtggagtctaaactggggttaccactgtttgtaaaaccggctaatcagggctcttctgttggtgtcagcaaagtaaccagtgaagaacagtacgcaattgccgtcgatctggcgttcgagttcgatcataaagtgatcgttgagcaagggatcaaaggtcgtgagatcgaatgcgcagttctgggcaacgacaatccgcaagccagcacctgtggcgagatcgtactcaccagcgatttctatgcctacgacaccaagtacattgacgaagatggcgcgaaagtggtagttccggcagccattgcaccagagatcaacgataagatccgggcgattgccgttcaggcttatcagacgttgggatgcgcaggcatggcgcgtgtagacgtgtttttaaccccagagaacgaagtggtgatcaacgagatcaacacactgcctggcttcaccaacatcagtatgtatccgaagctgtggcaagccagcggtctgggttacaccgatctgatcacacgtttgattgagctggcgctggagcgtcacgctgcggataacgcattgaaaaccacaatgtaatattttaacgcccgataatattcttattgggcgttttcagtttcttcatcgcgacgacgaataatcaaccccgccagccagaaactaatcacccacgtcaccagaccgacggcataggtctgccaaccttttgcttcaaatcccagtagccccaccacgccattaagaatgaatataaggccaatggcgaacgcatagtagtgccagtcacggcggatttttacaggcagattcatggcagctccgttaacgaaaaacaacatccttgcatattctgtaacaaccgtctgtggtgtagacaacatttttgtaattgttaataaatttaacttaaggttgccattttgtgactcacaacgaagattcacgcttcgggaatattcccaacatcaatttaccatgattctgatattgacaatctaaatgacctgtcagacttgccataagccgctggtatcacaccagaagagaagcagatgacttccggaggtttttatggctgatttcaccctgtcaaaatcgctgtttagcggaaaatatcgcaatgcctcttcaacgcctggcaacattgcctatgcgttgtttgtgctgttttgcttttgggctggggcgcaattgctgaacctgttagtgcatgcgcccggcgtctatgagcgtttaatgcaggtccaggaaacaggtcgcccacgggtggaaattggtttaggtgtcggcaccattttcgggctgatcccgtttttagtaggctgcctcatttttgcagtggtggcgctatggctgcactggcgacatcgccgccagtaagatttacgttgccagatacggcctaaaacgccttatctggcatgacattcctgtttgatcactgtttcatacaacgcgcccgccgttcgtctacgcgcttcgcaaaccaggccgtagtcaggttgcgggtgattttcgggctttccagttgaatgccaggcaacatttcgcggggtagtgatttacccgttttcgcttcggcaagttgataaactttcttgtacagcgccgtctcctcaaaagagaagctgtcacctttctctaactgacggcgaatttcgctgtcgctcatccccagttttcccgccagtttgcgcgttgccagttcggttttcccgggttctttactgtcgtaacgaattaaatcaccgtccagtgccagcttcacgccgctggccttactgactgcgttctgaaacgcggcattacggctggcgtaccagccagcgttaaaatcagcaaagcggtatatcggtgcgctatagctggcgggataattcagtaaatggtaagtaccaaaccacaacccgccgcggcgactgaagacttcctgacgaactgtaccgtccattttccacggataccctttggtatgctgttcggcaaaagcaatgctgacctgcatcggcccaccggtgcgcaccggattaagcgaaccaaacagcgtctgccccattggtaccatgctgatcagatcgtcaaaaatcgcgctcaattgcttttctgtacgcaccgaatctaaccgttcgctataacttttgccgtttggcgatttgatttttagcgcggtatgaaccagaaaagcaggaatgtgcatccgttcagcacgacggtcaatctcttgccaggcgatcttgcttaagcccggaacggccggatctgcctgataatttgactcctgctgcgccaccgccagcaccgagcagacgttttccagcgtcggtgccagcccctgactttcaaaggtggtggcgagatctttcgcccaggcatcgcggtctttcacgctcgcaggcatcttctgccgcacgacgctcgctacatctatcgctttttcgccctttttcaacggttgcggagcctgactactacaccccgctaaaaccagaaccgccaacaatgacagcgaagatagatgattgacgcgcgacattacttctcctttttagctcaaggtatgggttacttcctgaattttgtcaccatccagctcatgttcaaagctgcgcagacgtttgtagatagacatcaactcaaccagtgtggtccatgagttaatcaggtactggaaagcaccgcgaacctgaccaaaaacgttggtaatctgcgtcatcaggccgagcgtaatcgtaccggcaacaattgacggaaacagcaagaacaaaccgaaaacgttatcgacctgcaaatagagaatgcgggcgatgttgaaatacatatagtgaaaatagaggcgaaaatagtttttccgtacggcgctaaacagctcgcgtaccgtaggcggcgtcgcgcgcgtggcatcgtcttcaccataaaccagctctttacggtaggcggcctctactcgctggtttttaaactccagccccggcagtttgatccctaccactgccagcaatccggtccccatcagcgaccagacgatagcggcaatcaccagaccatacggaatgtgcccgacaattggcagctccggcacatgtgcggagagcgttaccagcaccggcaggaaggcgatcaacgtcatgatggcgttgataaaactgacgcccatattctccagcgttgaagcaaaacgcatggtgtcttcctgcacacgctgtgcggccccttcgatatgacgcagttgttgccagttcgccatgtaatattcgttcatcgccgtacgccagcggaacacgtagtgactgacaaagaagttgttcagtacactgatcaccaccgcgatcagcgcaatccccagaaagacgcccacttcgcggtaaaattgttcgatagtgactttatgcggcgaacttagcgcggtttgaatcagatcatagaacggtgcataccaggcgttgacggcgaccccgacttccaccaaaaaccaggtgacgaagatgatcagtgcagtaccgagtattgaccagtattgccaacggtgcgggctgtagataaaccagaaaaatgcaaaaagtcctacgcaaacaatgtagtaagcgtaaaaaatcaggaaatccaacgaccagaaacgcgcggcgctaatcgggatctgcccggaagcgccggtgatacgcgccacccagtctcccccaccggcttgccagaagataacggcaatcaatgcccaaacaaaggccgagagaaaaaacgctcccggctttgggaaaaaagacttaaacatatgcactcctgctaacttcttatcgttttaacaactgctgtgtattaaccgcatgaccactacaaagcgtcagccaaatgaaaccgcccattgtgacccatagcaaggcgcttagttcgccagcctgaccataagaattgtttcgacggatttcacaaaccaaagattgtttacataagcggattaacacgcgcaggatcacaaatgcaggcattggcgagcaggaaaaagatcgtgtttacgcgccgttacgtttttaacactattattgcactaattcgccctttgcaatccatcaatgagtagtataaatacgctcagttaccttcattcaatctatggacaccaccgttgaaacgtagtctgcttttttctgccgtgctgtgtgcggcgtcattgacctccgtccatgcggcgcagccgatcactgaaccggagtttgcctctgatattgtcgatcgttatgccgatcatattttttacggcagcggtgccacggggatggcgctggttgttatcgacggtaaccagcgcgtctttcgtagttatggcgaaacgcgacctggtaataacgttcgcccgcagctggattcggtcgtgcgtattgcttccctcaccaaactaatgaccagtgaaatgctggtgaaattgctcgaccaggggaccgtaaagttaaacgatccgctaagtaaatatgctccgccaggcgcacgcgtgccgacctacaatgggacgcccattaccctagtgaatctggcaacccataccagcgccctgccccgtgaacagcccggtggcgcggcacatcgtccggtgtttgtctggccaacgcgcgaacaacgctggaaatacctttctacggcgaagctaaaagccgcgccaggcagtcaggcggcgtactctaaccttgcgttcgacctgctggcagatgcactggcgaatgcgtccggcaagccttatacccagttgtttgaagagcagattacccgtccattggggatgaaagacaccacctacaccccctcaccggatcagtgccgccgtttaatggttgctgagcgcggtgccagtccgtgcaataacacgctggcggcaattggcagcggcggcgtctattccacgcctggcgatatgatgcgctggatgcagcagtatttgtcatctgatttttatcagcgcagtaaccaggcagatcgcatgcagacgttgatttatcagcgcgcgcagtttacgaaagtgattggcatggatgtccccggcaaagcggatgcgcttggtttaggctgggtatatatggccccgaaagagggtcgtccggggattattcagaagacaggaggtggtggcggtttcattacctatatggcgatgatcccgcagaagaatattggcgcgtttgtggtggtcactcgttcgccgttgacgcgctttaaaaatatgagcgatggcatcaatgatctggtgaccgagctaagcgggaataaaccgttggttatccccgcatcctgattaatactctgaaggcaaacggttgatagcgaccagtttgcctttattcatttcgatatagccgcctttacgcaaagcagcgagaacttctgcgacgacagaacgcgatatgcgtgtacgttgatggatataattcatcacaccaatacgtgatcgcaattcttcattccagtcaatcattgataataatgttgcgcggatttgttcgtaggaattatgcccaatgagctgcacgtcgcgtaattccagaattctattttgccaggctaaccagtaaaaagcgtctcgccagagttgattttgttcaataagcgtaatggtttgtttggctggtagatgatatcccgtacaatttccttctgatattaatttgtatggtatatcgtttttcattaaaccatcagccagccccataatataaggagcctgggtaataccgataagtacgttttcttctctacgcagagagataacgccctctaaaataacgaaagtatcttcgctattgacatcactggaaaatataacttgcttttcattattaaactcgaagcgcgtaccgtatctggacaaacatttatcgagcttaccaaattcctgaagaggtttaactacagataacatttgcgcgtcctttgcagtaatgcccgtcaaatccttgacgggcattatttagattaaattaccagaatttcttcggagtgaagaatattaccaggtatatttaacacccacgttcgcggaccagtcttgatctacgtcaccaccaccgaggtagttagcatcggtataggcgctgaagttcttggtgaagctgaactgagtacccagaccaacacgtaccgcagacccttcagtaccgttatcgatggaatcaccgttcacatcgttatcgttgttagagtcgtcgtagacgtaagccagtttgaagtacggagtcagagcctggtcttcgctgtaggtgaaggtataacctgcatctacacccagttcataacgcatgctgtcgtaagactgaccgtcaactttcatgtcgttgctcagctggtagtcatcaccagactggaacagaccagaaatgctgccgtaaggagtcacgtaaccagcatcacccagtttgaagtcgtaaccggctttcaaaccgaagccccaagcgtcggagttggtgctaccgtcaacgtaagtaccgttgctcatggttgcagacaggtcgttgttgaagtgagagtaactcaagctaccatcaacaaagacgttgttcgcgaagtgagcagaagagtagatgtaggcagtctggctgtcttgatccacctgaccagaacggtcattcatgtcacctttagcgaagcctgcagccgcaccgacgatccacttagcgttgttaccgtcaattttggtatcaacaccgaccatgatgccgttaacatcctgatcatagttgatggtgccgttgtcgccgttgaagttaccaccgaagtagcttacccatgcgccgccgttatcagccaggccatgacgagagttggtcagacgagtaccaacggtgtcttgttccaggttccagatattggtgttcgcagacgggatgctcagcgccatgttagcgtagtcggtcagctccatctgttgcagaacaacggtgttaccgcgctgttcagcctgataggtgtatgcacccaggtcagctttgttagcagcagagaaggtcgcgttgctgtttttgtcgttgacgtagatcagctcgttgccgttgtagtcagcgatagaaccagcaccagtagcgttgtcgatacgaactttgtagttaccggttgcagctgcaacatggtcaccgttgttatcaacttcgttctgaccagcttcgatagaagcagtgttgtcgttatcgccgttaccgttaatggtcaggtgaccatcagagttcattgcgattaagccataaccgtagtttgacttggtagtatcgttggtacggtcgttggtcaggtctgcatcaagtacgaagcggttgctttcgatgttgaacacaccagcgtgaatgttaccactggtatcagtagtgctggtcaggttcagagtatcaacctgcagagcattcgccgcagtgttaccgacatccagaataccgtcattagtcactttgatgttgttggcatacagagcagcatcacctacagcccaaccagcagaaacttcatcagaaatggttacggtactgttgtcgacagtcagtgaatcagttgcaacatgaccatcttcgttgatgttcagcgcagaaagacctgtcagagagatagagtcagaaatcagcgttgaatcagcaacattaacagttgaaccactgttgatgctcagagtatcaatcagagaagttttggtggtatcccactgtgaaccggtattcagggtcacattgaacagaccgctctggtatacttcgttaccgatgatgtgatcaaattcgctgtattcagagtcgctgttttctacaccaacagttgatgaaggccacaggctgttagctgcgatgtcgatcagagttgcagttgcttcggtgcctgtactggtatcaataacaaccccgttgtcattgtaaacaggaccgtaagcatctggcacaccatcatcattggtatcaacagttaagtgcgcagacattgccgcaccaacccacttgctgccattgttcagggtcagatccaggcgatcagtaccatcccaaccgttagtatctacatcaccgtcagcatcacgatagctatcacgaccatgcgggaagaagttctcatcaaagttacttgagaagaatacatcgcccatcagtgtagaattatcgaatgttgcagtggtttgcattgcgttatcagcagcaggatgtgcaataacggctaatgcgatatcatctctattccagtcaccgccattgtaatcgctggcattgccggtattaccaaaccaaccactagtaccttcatcagaccatgaaccagaggtcacagtagagtctttaacagtgatggtgttgttaaacacttcgctgctgttaacaccagtgctaaccgtgttgtcgtcgatatcttcccactcataaccctgagtcaacgtaatacccgcaacgtgagagttattagtgatggacagatcaacttcctgatccagagtaatagccgtaccaatgttgtaaacgtctacaacatgagtatcagcggcattattgtaagtgccgttatatgtgtagtgttcgtagttgtcgtcgatcgttgaattatcaacagtcagcgccagacggtcatggtaataatcattcgcacgttcagcacaatcagttgtcatgcactcggaataaatcataccgtgaatagtgctgtttttgattgtcagactattggcgttggtattggtagaaataccgtcgtccagatagtaggtagaaatcacgccgttaacagtagcgttattaatgaccgggtagatatcgccgttgtaataactatcagcggcatagttgttccagcctacataaccatcatagtaaacgtcatcagcataggtggcgtcgttgtagtgatggaaagtattgtaagtttgaccagaaatatcgttggtcgctgcattagcctgagaggtgatagccagagtgcaagccaatgctaattgtgatactacaagtttctttttccaggagtgcatttgtcatccctcctcagggacgtaataagttgatccatcaattatcaatgcatagaaaacatattatgtttcgcgctaacgattatgctgcgttacagacgaatggttcaattattctttcccctaagtccgaatgtggacatatataatttatggagaaaaacacgcatcaaattgataaaaggacgatatttcaacatgttgcagataatgttatttttgatacatacgcgttataaatatcaaaaacacaaaccagataaatatcttatcaatatacaacaaagtttgaattattcaatttatagcagcacaaccaaaggccaaaaaataataaccaagagctataaataaagattaaaaatattttcagtgaatatgaaattattgctatttctattacaaagatgtcctggtctctctttcattctcttcttgtcaacatcacgacaactttcgtaaaacactcctgccccgcttcaggtatactgtgcaccttaattccacaaacatcaggcagaccatgacagacttaatccaacgccctcgtcgcctgcgcaaatctcctgcgctgcgcgctatgtttgaagagacaacacttagccttaacgacctggtgttgccgatctttgttgaagaagaaattgacgactacaaagccgttgaagccatgccaggcgtgatgcgcattccagagaaacatctggcacgcgaaattgaacgcatcgccaacgccggtatccgttccgtaatgacttttggcatctctcaccataccgatgaaaccggcagcgacgcctggcgggaagatggactggtggcgcgtatgtcgcgcatctgcaagcagactgtgccagaaatgatcgtcatgtcagacacttgtttctgtgaatacacttctcacggtcactgcggtgtgctgtgcgagcatggcgtcgacaacgacgcgactctggaaaatttaggcaagcaagccgtggttgcagctgctgcaggcgcagacttcatcgccccttccgccgcgatggacggccaggtacaggcgattcttcaggcgctggacgctgcaggctttaaagatacggcgattatgtcgtattcgaccaagttcgcctcttccttttatggtccgttccgtgaagctgccggaagcgcattaaaaggcgaccgcaaaagctatcagatgaacccaatgaaccgtcgcgaggcgattcgtgaatcactgctggatgaagcccagggcgcagactgcctgatggttaaacctgctggagcatacctcgacatcgtgcgtgagctgcgtgaacgtactgaattgccgattggcgcgtatcaggtgagcggtgagtacgcgatgattaagttcgccgcgctggcgggtgctatagatgaagagaaagtcgtgctcgaaagcttaggttcaattaagcgtgcgggtgcggatctgattttcagctactttgcgctggatttggctgagaagaagattctgcgttaatttttttcctctcagaaagggggagttaacctgttgaaagtacggtgaacgccccctcaccctaaccctctccccaagggggcgagggaaccgtccgcactcgtatcaccccgcccgataaaacggtttatccccaagaatcgtcgcccgatgcataatccgccgctgtggcaggtaatcggcattggcatagtgctgagtcacgcggttatcccaaatcgcaatatcattcggttgccagcgccaacgcacctgaaattccggtttagtgatatgggcgaataaaaagcctaacaaggcttcgctctctttctcgctgacatcgacaattcgcgtagtaaagccttcattcacaaacagcgcctgtttaccgctcaccggatgcgttcgcaccaccggatgtagcaacggaggatttttcgcgaccgcctcgcgccagcgttgatgttcctcctcggttttgcggtatttgtattccgggaacgatttacggaaatcatgctccgcacgcagcccgctcagcagctggcggaagggaacagagagcgcctcataggccgcaataccgctggtccagagcgtatcaccgccggtcgaaggtaattctttagctgccagaatcgcccctgcgggtggcgtttcaataaatgtcacatcggtatgccagttgtcgttatccggcggattatcgttatgggtatccagcacgatgatctcgtcaaccccttcggcatgagggtaaacagggtgaatatgcagttcgccaaaacgctgggccagcgcgcgttgctgctgcggcgtaatagtttgatcgcgcagaaacaccacctgatggcgcagcaccgcatggtaaagctgttcaaactgattatcgcttaacgggcgcgtcaggtcggcacccgaaatttgtgcgccgatatacggccccagcggggtaatgctcagacgttcactcattgtacttctccatgccagggcgtcagacggcgctgtaacgcgcgcaaacccagttctaaaagaaaggcgataatcgcaatcaccgcgatccccgccagcaccacgtcagtcgcgagaaattcacccgctgactgaaccataaatcctaaaccgcgcgtcgcggcaatcagctccgccgctaccagcgtagaccagcccacacccagaccaatgcgtaatccggtgaggatttccggcagcgcgccgggcaaaatgacaaaccacagcacctgcgcacggctggcacccagcgactgggcggcacgaatgcgaacctgctgcgcgcttttcacccccgccagcgccgacatcgccaccggtgcaaaaatcgctaaatagatcagtaagatcttcgaggtttcaccaataccaaaccagatcaccatcagcggcaaataagccagcggcggcaccggacgataaagttcgattaccggatccagaatgccgcgcaccgtcgggcttagccccatggcgatcccgaccggaataccgatcaccaccgccgcgagtagcgccagcacaatgcgcgtcaggctggctgccagatgctgccacagcgtggcgtccataaatccctgcggtccggcaatggtgagcagttttgccagtacttgttgcagcggcggcaaaaacagcgggctaatcagttgcagcgccgccaccgtccaccatacagtgagtaaaaccgctaacgtgccaatgcttaaggtcacctgacgcgagagcggccagcgccatttcagccgccgcgaatgcagtttttcattaatgagcacactcatgagaacgcctcccgttgctcaaatacgcggcttaaaacatattcgcgcatggcgatgaattgtggatcggacttgatgctgcggctcgactctcccgcaacaaagcggcgagcaaagttgagcggcagccgctccagcacacggccagggccggatgaaagcagaaccagttcagtcgccataaacaccgcttcttctatatcgtgggtaatcaacagcacctgcttgcccgtctcctgccagagtttcagcagcagagtttgcatctggtcgcgggtgaaggcgtccagcgcaccaaacggttcgtcgagtaataacagctggggattcgccgccagcgcgcgggcaatccccacccgctgaagttgaccaccggaaagctgccagatatagcgtttttctgcgccttccagccccacttttttcagcatctggtgcgcgatttccagtcgctgcattttctctatacctgccaattgcaggccgaacgccacgttgtcctgtacattgcgccacggtagtagcccttcattctgaaaaaccaccccgcgctctgctcccggtccctcaatacgcttacccgccagttgaatgctgccatgctgataaggcacaaaaccggcaatcagattcagcaacgtggttttaccgcagccggacggccccagcaccaccagtagctcgccgctttccagcgtcaggttgatatcttccagtgccggtttgccgccataatcggcatagagatgagagatttgcagcatctgcgcctccttttattgcacgaagcgcgaggtaacgtactggctgtaatcattcgctacagccgggaccttgccctgctctttcaaaaactgcgcggtgtcgatgattgctttgttcaccggtccggtcagttctgccgtttgttgctgcggcgtcagataggtatttcccttcaccagccccggaacgtcaccttcaggcacgccgcttaaacgcgccagtttgctgatgttttccggctgtttcagccacgcgtctgggttagcaatgtacggttgctgagcatcgatggcgcttttagcgaacgctttcacgacctcaggatgtttctcggcaaaatctttgcgcaccacccagacgtccagcgttggcgcaccccactgcccgacctgttcagaatcggtcaacaccttgccgtctttttccagggcgttaaccgccggtgcccagacataagcaccatcaatatctccccgctgccaggcagcgataatcgcgggcggctgcaggttcacaatctccacttgcccgggtttaatcccccagtgtttcagcgccgccagcaggctgtagtgggtggtggagataaacggtacggcgatgcgtttgccaatcagatcttccggtttgctgatagttttctttaccaccagcgcttcggagttacccagttttgacgccagcaagaagacttcaatcggcacctgttggctggctgcaaccgctaatgggctggaaccgaggttgccgatttgcacgtcgccagaagccagcgcccgcacgatgctggctccgctgtcaaacttacgccagtccacggttgctccgctttctttagcaaaggtgttgtcggcctgagccactttcgccggttcggctgaggtttgatacgccacggtgacgttcaccgcctgtgcctgaaaagcgatgaatgccagtgcggcaagaagtgtgttacgcgatgaaattgccatgattgtctgctcccctgtcttgttatgtgagcagtattcaggaataaaaacattcattaaaagaattagtcgttatcgcacagatgattttattcttagcaaaaaaacggcaaaggaaagattaaatatgcaattactccgttctaacaattgggaaaattactacacttcattttagtgatgcataaacaaccacattacgagatttattacttcattatttctatcaatatcaatacatataataaaactattatattcgcattgtatatatcactgtatcattctcaatcactcgcatattacattcacataatgtatataaacaatacttgttcacagaacatattttttaaatgcaattaattgacaaactaaatcacatctaaatacaatgtataaaacaaaataactatacataccaaacatacaaacacttaacatatgaattgcataaaaacattacccagtcgaacctccgggtctgaaagcccttgcttttcagttattagcaacatttaacatttataaattaacatctggctgcgccagagattacgtctctgagtgcatcgttgtgcttgtagtataataaataaaatggagtgtcattaagtggataaggttttagattcagccctcctttcttcggcaaataaaagaaagggtatccttgctattggcgcacatcctgacgatatagaattaggctgtggcgcatcgcttgctcgtcttgcgcaaaaaggaatttatatcgcagcagtggtgatgactaccggcaactctggtacagatggaataatcgatcgccatgaagaatcgcgcaacgccctaaagatattagggtgccaccaaactattcatcttaattttgctgacacccgcgctcatttacagctcaatgatatgatttccgccctggaagacatcattaaaaatcaaattccttctgatgttgaaatcatgcgggtatataccatgcatgatgccgaccgccatcaggatcatctcgctgtttatcaagcttcaatggttgcctgccgcactattccacaaattctcggctacgaaaccccaagtacctggctttcatttatgcctcaggtttttgaatccgttaaagaagaatatttcacagtcaaacttgctgcattaaaaaaacataaaagccaggaacgacgtgattatatgcgtcatgatcgcctgcgtgcagttgcacaatttcgcgggcaacaggtcaatagcgatctgggtgaaggctttgtaattcataaaatgattctttgagcaaattgcatgaaaacctggatatttatctgtatgtccatagcaatgttgctatggtttttaagtacgctaagacgtaaacccagtcaaaagaaaggctgtattgacgccattatacctgcgtataacgaaggcccgtgtctggcgcagtcactggataatctactgcgtaacccttatttttgccgggtaatttgcgttaacgacggctccacggacaataccgaagcggtcatggcggaagtcaaacgcaaatggggcgaccgctttgttgccgtcacgcaaaaaaataccggtaaaggtggtgcgctgatgaatggcctcaattatgccacctgcgaccaggtttttttaagtgatgccgacacctatgttccgcccgatcaagacggaatgggctatatgctggcagaaattgagcgcggtgctgatgccgtaggcggcattccctctactgcgttgaaaggcgcggggctgttaccgcacatccgcgcgaccgtaaagttgccgatgattgttatgaagcgcacgctacagcagctcctgggcggcgcaccgtttattatcagcggtgcctgcgggatgttccgtactgatgtattgcgtaagttcggtttctcagatcgtactaaagtcgaagaccttgatctcacctggacattagtggcaaacggctaccgtattcggcaggcgaatcgctgcatcgtatacccacaggaatgcaacagtccgcgtgaggagtggcgtcgctggcggcgttggattgtgggatacgcggtctgtatgcgcctgcataaaagacttttatttagccgcttcggtatcttcagtatatttcctatgctgttggttgtgatttatggcgttgggatttatctcactacctggtttaatgaattcatcaccaccgggccgcatggtgtggtgttggcaatgtttccgcttatctggatcggcgtagtttgtgttattggtgcttttagcgcctggtttcatcgttgctggttgttggtgcctttagcgccgctttccgttgtgtatgtattattagcttatgccatctggattatttatggacttattgccttttttactggacgcgaacctcagcgcgacaaacccacccgctattccgcactggtggaagcgtcaaccgcttattcccaaccttctgtcacaggaactgaaaaactatctgaagcttaatgttaaagagaaaaatattcagattgcagaccaggtaattattgatgaaactgcaggtgaagttgttatcggcgcgaatacccgtatttgtcatggtgccgttattcagggtccggtagtgattggcgcaaactgcctgataggtaattatgcgtttattcgtcctggcacaataatcagcaatggtgtaaaaattggttttgccaccgaaattaaaaatgcggttattgaatcggaagcaacgattggtccgcaatgttttattgccgactcggtagttgcaaaccaggcatatttgggcgcacaagtacgtaccagtaatcatcgtctggatgaacagcctgtgtctgttcgaactccagagggaattatcgctaccggatgcgataaattaggttgttatatcgggcagcgttcacgccttggcgtacaagttataattttgcctgggcgaattatttccccgaacacgcaacttggcccgcgcgtgattgtagaacgtaatttacctgccggaacttattcactccgacaagaacttatccgtacaggagattaaaatgataaaacggacgttattagcggcggccatttttagcgcattgcccgcttatgccgggttaacttccattaccgcgggctacgattttaccgattattctggcgatcatggcaaccgtaatttagcgtatgctgaactggtggcgaaagttgaaaacgcaacgctgctttttaatctttcccaggggcgtcgtgattatgaaactgaacatttcaatgccactcgcggtcagggtgcggtctggtataaatggaataactggctgacaacccgaacgggtattgcctttgcggataatacgccggtctttgcccgccaggattttcgtcaggatattaacctggccctgttgccaaaaacgcttttcacgaccggttatcgctacactaaatattacgatgatgtcgaagtcgatgcctggcaaggcggcgtatcactctatactggcccggtgatcaccagctaccgctatacccattatgactccagcgatgcaggtggtagttatagcaatatgatttccgtgcgtctgaatgacccgcgcggcactggttatacgcaactatggctaagccgcggaacaggcgcttacacctatgactggacgccagaaacacgctacggcagcatgaagagcgtcagtctgcaacgtattcaaccgctgactgagcaacttaatctcgggctgacggcaggtaaagtgtggtacgacaccccaaccgatgattataacggtctgcaacttgcagcccatctgacctggaaattctgattccttctgccgcccgctatccggggcggccttccctgccgattagcccccccctttcctctttgttttccgaccacattcaccggataaattttattctccagtgttatatactataggggggtatgcattgacatatagcatacccccctatagtatattgcgtgcagataatgaggtgcgaaatgcccagtactccggaagagaagaaaaaggtccttactcgagttcgtcgtattcgagggcagattgatgctctggaacggtcgctggagggtgatgccgaatgccgtgccatactccaacagatcgctgccgttcggggcgcggctaatgggctgatggcagaagtgcttgaaagccatatccgggaaacgtttgaccgaaatgactgctacagccgcgaagtcagccaatccgttgacgacactattgaactggttcgagcctatcttaaatagctgaatctattaccatattgaggaagagcgagagatgaaatcacgtgctgccgttgcatttgctcccggtaaaccgctggaaatcgttgaaattgacgttgcaccaccgaaaaaaggtgaagtgctgattaaagtcacccataccggcgtttgccataccgacgcatttaccctctctggggatgacccggaaggtgtattcccggtggttctcggtcacgaaggggccggcgttgtggttgaagtcggtgaaggcgtaaccagcgtcaaacctggcgaccatgtgatcccgctttacaccgcggagtgcggcgagtgtgagttctgtcgttctggcaaaactaacctctgtgttgcggttcgcgaaacccagggtaaaggcttgatgccagacggcaccacccgtttttcttacaacgggcagccgctttatcactacatgggatgctcaacattcagtgaatacaccgtggtcgcggaagtgtctctggccaaaattaatccagaagcaaaccatgaacacgtctgcctgctgggctgtggcgtgaccaccggtattggcgcggtgcacaacacagctaaagtccagccaggtgattctgttgccgtgtttggtcttggcgcgattggtctggcagtggttcagggcgcgcgtcaggcgaaagcgggacggattatcgctatcgataccaacccgaagaaattcgatctggcgcgtcgcttcggtgctaccgactgcattaacccgaatgactacgacaaaccgattaaagatgtcctgctggatatcaacaaatggggtatcgaccatacctttgaatgcatcggtaacgtcaacgtgatgcgtgcggcgctggaaagtgcgcaccgcggctggggtcagtcggtgatcatcggggtggcaggttctggtcaggaaatctccacccgtccattccagttggtcactggtcgcgtatggaaaggttccgcgtttggcggcgtgaaaggtcgttcccagttaccgggtatggttgaagatgcgatgaaaggtgatatcgatctggaaccgtttgtcacgcataccatgagccttgatgaaattaatgacgccttcgacctgatgcatgaaggcaaatccattcgaaccgtaattcgttactgatttcccgcaggtataccccgtccacttcagacggggttcttaatactctccctgggcagccgtccgggggattaaccgtgagataatgactgatggaactcattgaaaaacatgccagctttggcggctggcaaaatgtgtatcggcattattcccaatcactgaaatgtgaaatgaatgtcggcgtctatctcccaccaaaagccgcgaatgaaaaattgccggtgctgtactggctttcgggcctgacctgcaacgagcagaatttcattactaaatcggggatgcagcgttacgcggctgaacacaacattattgttgttgcgccggacaccagtccgcgaggcagtcatgtcgcagatgccgaccgttacgatctcgggcaaggtgccgggttttacctgaacgcaacgcaagcgccgtggaatgaacattacaaaatgtatgactatatccgcaacgagctgccggatttagtgatgcaacattttccggcaacgaccagaaagtctatctctggtcattctatgggcgggctgggcgcgctggtgctggcgttacgtaacccagatgaatatgtcagcgtctcggcgttttcgcccattgtctccccatcgcaagtaccgtggggacagcaagcctttgccgcatatcttggtgaaaataaagatgcctggttgaattacgatccggtgagtcttatttcacaaggtcaacgcgttgcggaaatcatggttgatcaggggttgagtgatgatttttacgcggaacagctgcggactccaaatcttgaaaagatctgccaggagatgaatatcaagacgttaatccgttatcacgagggttacgaccacagctattattttgtctccagttttattggcgagcatattgcctaccacgccaataaactgaatatgcgttgataatagtgcacgactgccggatgcggcgtgaacgccttatccgcctacatttcgcccgcaggccgtaggcatgataagacgcgcatagcgtcgcatcaggcatctgcgcacgacttatctatgtttaccacatcaaatcatcaggcactttgaagtcggcatatgggtcgtcttcatcctgctcttcggcgctgagcgcgctgtgcaacactatactgctggcatcacgctgagctattttatcggcaacgctggcgggaataatggcgtattcaccttcgctattgttatcgaccaacaagcgagcaatcgccagacgaccattaatcaactgcgcctgtgtgagcttatcgacaaaaatcttcttaatcagattgccgtcagtgaagttaaaaccaatatcgccattggcaatggtgattcggttcatttcaatgagctgcttcacctgagctttatattctttcgccaacgcagcttgtttttgttgctcgctaagctgtttatcacgctcaagctgtgcctttttattttcttctaccgccgcccgagcttcacgcgcctgaacgcgcgattttttcgccgttctctccaccttcgccgcttttttgctggtgactaatcctgctttgagcaactgctcttgtaaggtaagttttgccatctttgtttccaaacccgctgaataatttttagcgagtatacctgtaaacgccgtgggtgtattgggggcaactccctttcgcccctgcttaataaggcgcgtcaggcatcggcacacggctgcattcttgatctccgactcatcaaaataaacaccgccaacccagcaacaagaatacccggtgcagaagcggccattacgccgaccgtgccagtgcctaatgccagcattttcccggccagtaacggaccgctcatagcccccagacgccctaccgccacggctgttcccacacctgttgcgcggatctgcgaactgtaaaacaacggtgccagggcatacaaaacgctttgcccacctgtcgcaaacaaccccgcgacaaatcccgccagcaacataccgttaaatgacgacaccgttccaagtgccagcagcgaagctaacatgccgctataaatcagtagcgacatggtcactggacgcagcttatccatcaatgcgcccaacattaacgtcccgcttgccgcacccatttgcagggcaaacatcacccctgccgcctgcgatggctggaatccttgctccaccaaaagcagcggtagccagttgatcaacatgtagaccaccagcagagtgaagaaataacacaaccacagcagcagcgtcgcggttgccgtttctggcgcaaataaggcacgcagtggtggcgcagcctgtttatcgccagcgaaaaccgccgactccggcagccagcgcattaatagcggcaccagaatcaacggcaccacaccacctacccaaaacaccgtttgccatgctaagtttgcccccgcgaaacccagtgtcgccgccagcgccgcgccaatgggaacaccgcaatacatcaggctcactgctgtcccacgaaaacgtggacccgcggcttcagacgtcagggcgataagattcggcaacgccgcccccagcccgacaccggtcatcagccgcgcaaagaccagtgaggggaaatcccaggcaatcgccgttgccagtgagaacaaaccaaacagcgcaactgagccaatcaaaatactcttacgaccataacggtctgccagcatcccgccaaccaacgcgccgggtagcaaaccgagtattccggcgctaaatatccagcccatttgcattttatcgagtgcgaaagcctgggcgatgccacccgccgcaatgccagccgcctgaagatccagcccttccatcagagcgaccaaaaaacaaagcccgatggtcagcatcaggcgggatgaagatgatgaaggggtacgagtcgacataagatgaacctcattgcgagtgcaggtgaatcgcgactgatacattgccagccgcgtaatcagaactatttaatgactgcctacgggcgaaatgtaggccggataaggcgttcacgccgcatccggcagtcgtgctgggatgggcatacaaaatgcacgttctcggcagtcatcattatttgttgttgcgcagatccagcgccacgtcaacgatcatatcctcctggccgccaaccatccggcgtttgcccagctcaacgagaatatccaccgcacttaagccataacgcgccgccgccgtttcacagtgacgcaggaagctcgagtaaacaccagcgtatcccagcgccagcgtttcgcgatcgactcgtaccggtcgatcctgcaacggacgcaccaggtcgtcggcggcatccattaacgcatagagatcggtcccatgctgccagcccagtttatccgcggcggcaataaacacttccagcggtgcgttacctgcgcccgcgcccattcccgcgaggctggcgtcgattcggtcgcagccctcttccaccgccgcgatagagttcgccacgccaagactcaggttatggtgagcgtgcatgccagtttgcgtttctggtttcagctctgctttcagggcgcggaaacggtcacggatatcgctcatgttcatcgcaccgccagaatccaccacataaatacaggtcgcaccgtagccttccatcagctttgcctgctttgcgagattctccggcgtggtcatatggctcatcatcagaaaaccaacggtgtccattccgagctcgcgggcatactgaatatgctgggcggaaacatcagcttcggtacagtgcgttgccacacgaaccacccgcgcgccagcctgccaggcatttttcagatcgtgaatagtgccgattcctggcagcaacaacgtcgcgattttggcgtgcttcaccacatccgccgctgcttcaatccattcaaggtcgctatgtgcgccgaaaccatagttaaagctggaaccctgcaaaccgtcgccatgggccacttcaatcgaatccacgcgggcatcgtccagtgctttggcaatctggcgaacgttttccagcgaatactgatgacgaatggcgtgcataccgtcacgcaacgtgacgtccgagatataaagttttttaccgttcatgccgcttctcctgccttgcgcgccagtgactgggccattttttccgctgtcgccagcgcactggaagtcataatgtcgaggttgcccgcataggcaggcagataatgcgctgcgccttcgacttccagccagaccgctgttttcagtccgtagaattgccccacgcccggtaaattgaccggtttatcctgcgggataacttcaaactgcacgcgctgtttcaggcgataacccggtacgtaagcctgcaccgcctcagccatttcattgattgaggcttcgatatcatcttgtgaagcttcgtcgctcaatacatacaccgtgtcacgcatcatcaacggtggctctgctgggttaagcacaataatcgccttcccttttgccgcgccgcccaccacttcaatggctcgggaagtggtttccgtaaattcatcgatattggcacgcgtgccaggtccggcagatttactggcgatagaagcgataatttcggcgtaatgaacacgcgccacgcgtgaaactgccgccaccattggaatggtggcctggccgccgcaggtgaccatgttgacgttcagttgatcgacgttcgcctcgaggttaaccaccggcacgcagtaagggccgatggcagcaggcgtcaggtcaattaagcgaatatccggtttcgcttcgcgtaaagcggcatcgtttttcacatgcgcgcccgcgctggtcgcatcaaatacaatgtcgatatcagcaaattcaggcatgttcatcagcccgatcaccccttcatgggtggtggcgacgcccatacgtctggcacgcgccagaccgtcggactgaggatcaatgccgaccatcaccgccatctccagatgctgaccgtgacgcaaaattttaatcatcagatcggtgccaatgttgccagaaccgataatggcgactttacgcttactcatgacagacttccttttggggctgcgcttgaaaatgtcgcagcaactgaacctatgccttcaatatgggcttcaaaacgatcgcccgcattcactgccaccatcggacctaatgccccggtaagaatgatatctccggcgcgcagcggttcacccaggctggccattttgcgtgccagccagacggcggcattaagcggatgtcccaggcattcgctgccgcgcccgctggaaacctcttcgttattacgcgtcatcttcatggcgcagtttttcaggtctaaccccgccggacgttgcgccggaccgccgatgacatacaccccgcaggaagcgttatctgccacggtatcgacaaactgaatcgaccagtcgcgaatgcggctacccaccacctccagcgccggaagtacccattcaatggcgttatacagttcgtcgaaggtgatatcggttgcgggcaaatcgcggttcaacaccagtgcgatctccgcttcaatgcgggcttgcagaacacgggaaaaaggaatgatttcgttatcgccataacacatgtcggcaaataatgtcccaaaatccggttgatcaacgcccagttgttgctgcactttcggatgcgtcaggcccactttacgccctaccacgcgacgcccctgcgcaacgtcatattgcacatttatgtgctgaatggcgtaggccgcttcagcgttatcgataccaatcagatcgcgcagcggcgcaatcgcttcgccctgctctgcggcgcggcgtaaatccgccgccagttgctcaagagtatgcttcgtcatgaccattccttaagggcgtgcgaggaaattcagcaccaattgattgaaagcgtcggcatgttcccactgcgcccagtgaccacagtcgcggaagatatgcagttcagaaccggcaatgccggacagcagacgcagacccgcatccatcggcacaaagcggtcgttgcgcccccagacaatcagggtttgcgctttgatttccgccagacgtgggccaaaatccgggaactgtttcggattagcttccaggctcttaacgaagttttccaggtgatcgcggcgcgacagcatattattcaggcgcgcttcaaacagggcgtcggtcaaatcgctggtatcgaaaacgaagatatccatcatcagcttcaggttttcgatagtcggctgacgataaagctgattcagtcgcttaataccttcggttggcatcggcgtaaacaaactcatgccgcccgtaccgccgcccatcagcaccagtttgccgacgcgctccggccagttaagggtgaacgccatagaactatggccgcccatcgagttgcccagcaggtggattttggcgatatccagttgatccaccacgcttttcaggattcgtgcattaagatccgatcgtgaaccactattaacgatcgaatcgcttttgccccaacccggacaatccagcaggattacccgatagcccgcctctaccagcggatcgatattgcggctgaagttcgcccagccagtagcacccgggccggaaccgtgcagcaggacaacggtttcgtcgccttgtccgcagtcattaaaatggatgcgcagcgttttacccgcttcttctacattcagaaaacggctggtggcggcttcggtttgtggctgataactcatcatcttctcctgcatattcagttctctgttctggcgcttaacgagccaaatccggcaatccactccgggattgggcggtaataacgcccttcgctacgccagttgccaaatgcagaaatagcggcaaaagcggcgacccaggttttgatttcatgtgtcgactttccggcaatggcggaaagctcttcgttactgacggcatccagttcctgtatgcgtccctgctccagcaaagtcatgaactggttatcccaaatcgggttgagcggatgcagagttctctgatcctcaacaaacttctcagcggcgctaatcacccgttgctgacgcaattcgcgctcactggcgggtaaatctttcccgctccccaacagacggtcgcgcatatgggcatcggctttcgccagttcgggcaccggcggctgatgggaaagcccaccggaacccaggaacagcacgcgtttattgagagtgctggtgaaacgtccaatggcttcacccaacatgcgggtacgctggaaaccgggcagcggcgtggcgacaccgttgatgaacacaggcagaactggcaccttatccagcccgccgagcaggaactccagtggctgggcgaacccgtggtccacctgcatacagtaagaaacggcaagatcgatcccgctcttcatgacggcatgcgcacaggcctccgccagctccacaggcactggcagctctcctgccgcactgccgaaatcaccaattgccgtcgctccaacgcctaaacagaacggtggcatcacgtcatagaaaaagccgttgtagtgatctggcgcaaacagcaccaccagttcaggggagaaagccgcaatacgctcgcgggcgctggcaatcacgccattgacctcatcgagcacctcttgcgccgggtcgacataccccaccagcggcgagtgggaaagacagtgaagataagcgtgcatatcaggctaccttttcgacagaaacgtcggcatcagggcgggtcagcgtcatcaccgacgccagtttattcagggtcttgcccagggtttgcggaatggcggtggcggcaacaaagcgatccgggcgcatcaccaccagcgaagcattgtgttgcgcgaaccagctacgcagacgaccttgcgtatcgcccacgcgtagcacgccgtcgtggttatcctgtgcggtatgaatttgcacttccggcaccacctgaatgaagcgtgtgcccaacgcgcgccactgctggatttgctcgtcgctcatcccccacagtggattgcatccccagccaattaccgcgaagttcgcgccaatcgcgttatcgagcagcgtcacgtcaccgttttccagcgtgactttcggctgaataaacatcttgccgaccggagagtgcttcgcttcgccctcacgcaccagcgcaccgccgtaatattgcggcatcggcttgaagcgcatttcgaggaaatagcgttttactggcggcagataattcaacagccaggaaacgccgtcacgtaacgtaccctgccagcgtttcggcggagccagcacgttgcccgccgtcacggacaggtcaatcatcgctttggcgtgatcgcgacgttcttgttgataggtatcgagcagcgcatcgcgggctttcccctggataaccaacgccagtttccaggcgaggttaaaggcgtcgcgcataccactgttatagccctgcccctgccacaccggcatgatgtgcgcggcatcgcccgccagcagtacgcgatcaatacggaaacgttgcgccagtcgcgcgttatgggtgtagacacgctggcgaatcaattcaacattgtccggattaggcagcactttgcttaacagcttgcgcatattttgcggctcacgcagctgctcttcggtttctcccggcatcaccataaattcaaagcgacgtaccgcatgaggcagcgcggcagaaacatacgggcgcaccggatcgcaacacaaatagatatgcggcgtacttaacggatcgttggcgatatctaccacaatccactgatttggcgcagttttaccttcaaacggcacattcagagtgcgacggacaaaacttgctccaccgtcacaggctaccagccactgggctttgaccgtttcccgctgcccttctgccgttttcaggtgcaaggtcacttcgtcattttgctggctgaaggcctccagctcgcgggaaaacaagcagcgcacattcggaaaacgcgacaacccttccagcatcaccgcatcgacctgaggctgaataaaggcgttacggcgcggccagccaaattcatcggtcattggctgaatatcagcaaaacagcggcctttcggggtgagaaaacgcatcgcgtgccacggcgtagtgtgcggcagaacatcatcgaccaggccgaccgactgcatggtgcgcagcgcctcgtcatcaataccaatcgcacgcgggtagtcgatcaacttatcgagtttttccaccaccagcacgtcaatgcccatctggccgagatagttcgccatcatcagcccgaccggaccggcaccagcgatcgccacctgaacgctatggttaacagcaggctggatgtcagggtgttgtattgccatttcagtacctcacgactcggacaaaatgccgttgcgcgcacagtacggcgcaacttattttgttaaaaacatgtaaatgattttttattgtgcgctcagtataggaagggtgttttcggctacaatcaaaacatgcccgaatgtgcaccaggtgcacaactttgttttaactatagaaatgtcaattaatatgcagaacaatgagcagacggaatacaaaaccgtgcgcggcttaacccgcggtctaatgttattaaatatgttaaataaacttgatggcggtgccagcgtcgggctgctggcggaactcagcggcctgcatcgcaccactgtgcggcgactgctggagacgctgcaggaagagggatatgtccgccgtagcccctccgatgatagttttcgtctgaccatcaaagtgcggcaattaagcgaaggatttcgtgacgaacagtggatttctgcactggcggccccactgctgggcgatctgttgcgcgaagtggtatggccgacagatgtgtccacgctggatgttgatgcaatggtggtacgcgaaaccactcaccgtttcagccgcttatcctttcaccgggcaatggtcgggcgacgtttgccgcttctgaaaaccgcctctggcctgacctggctggccttttgcccggaacaagaccgcaaggaattaatcgaaatgttagcctcccgccccggtgatgactatcaactggcacgggaaccgttaaagctggaagccattctggcgcgcgcgcgcaaagagggttacggacagaactaccgcggctgggatcaggaggagaagatcgcctctatcgccgtaccgctgcgcagtgaacaacgggtgattggctgtctgaatctggtgtatatggcgagcgcaatgaccattgaacaggcagcggaaaagcatcttccggcgctacaacgggtagcaaaacagatcgaagaaggggttgaatcgcaggctattctggtggccggacggcgaagcggcgtgcatttacgttgacaccatcgaatggcgcaaaacctttcgcggtatggcatgatagcgtccggaagagagtcaattcagggtggtgaatgtgaaaccagtaacgctatacgatgtcgcagagtatgccggtgtctcttatcagaccgtttcccgcgtggtgaaccaggccagccacgtttctgcgaaaacgcgggaaaaagtggaagcggcgatggcggagctgaattacattcccaaccgcgtggcacaacaactggcgggcaaacagtcgttgctgattggcgttgccacctccagtctggccctgcacgcgccgtcgcaaattgtcgcggcgattaaatctcgcgctgatcaactgggtgccagcgtggtggtgtcgatggtagaacgaagcggcgtcgaagcctgtaaagcggcggtgcacaatcttctcgcgcaacgcgtcagtgggctgatcattaactatccgctggatgaccaggatgccactgctgtggaagcagcctgcgctaatgttccggcgttatttcttgatgtctctgaccagactcccatcaacagtattattttctcccatgaagacggtacgcggctgggcgtggagcatctggtcgcattgggtcaccagcaaatcgcgctgttagcgggcccattaagttctgtctcggcgcgtctgcgtctggcgggctggcataaatatctcacacgcaatcaaattcagccgatagcggaacgggagggcgactggagtgccatgtccggttttcaacaaaccatgcaaatgctgaatgagggcatcgttcccactgcgatgctggttgccaacgatcagatggcgctgggcgcaatgcgcgccattaccgagtccgggctgcgcgttggtgcggatatctcggtagtgggatacgacgataccgaagacagctcgtgttatatcccgccgttaaccaccatcaaacaggattttcgcctgctggggcaaaccagcgtggaccgcttgctgcaactctctcagggccaggcggtgaagggcaatcagctgttgcccgtctcactggtgaaaagaaaaaccaccctggcgcccaatacgcaaaccgcctctccccgcgcgttggccgattcattaatgcagctggcacgacaggtttcccgactggaaagcgggcagtgagcgcaacgcaattaatgtgagttagctcactcattaggcaccccaggctttacactttatgcttccggctcgtatgttgtgtgaaattgtgagcggataacaattttacacaggatacagctatgactatgattacggattcactggtcgtcgtattacaacgtcgtgactgggaaaaccctggcgttacccaacttaatcgccttgcagcacatccccctttcgccagctggcgtaatagcgaagaggcccgcaccgatcgcccttcccaacagttgcgcagcctgaatggcgaatggcgctttgcctggtttccggcaccagaagcggtgccggaaagctggctggagtgcgatcttcctgaggccgatactgtcgtcgtcccctcaaactggcagatgcacggttacgatgcgcccatctacaccaacgtgacctatcccattacggtcaatccgccttttgttcccgcggagaatccgacgggttgttactcgctcacatttaatattgatgaaagctggctacaggaaggccagacgcgaattatttttgatggtgttaactcggcgtttcatctgtggtgcaacgggcgctgggtcggttacggccaggacagccgtttgccgtctgaatttgacctgagcacatttttacgcgccggagaaaaccgcctcgcggtgatggtgctgcgctggagtgacggcagttatctggaagatcaggatatgtggcggatgagcggcattttccgtgacgtctcgttgctgcataaaccgactacacaaatcagcgatttccatgttgccactcgctttaatgatgatttcagccgcgctgtactggaggctgaagttcagatgtgcggcgagttgcgtgactacctacgggtaacagtttctttatggcagggtgaaacgcaggtcgccagcggcaccgcgcctttcggcggtgaaattatcgatgagcgtggtagttatgccgatcgcgtcacactacgtctgaacgtcgaaaacccgaaactgtggagcgccgaaatcccgaatctctatcgtgcggtggttgaactgcacaccgccgacggcacgctgattgaagcagaagcctgcgatgtcggtttccgcgaggtgcggattgaaaatggtctgctgctgctgaacggcaagccgttgctgattcgcggcgttaaccgtcacgagcatcatcctctgcatggtcaggtcatggatgagcagacgatggtgcaggatatcctgctgatgaagcagaacaactttaacgccgtgcgctgttcgcattatccgaaccatccgctgtggtacacgctgtgcgaccgctacggcctgtatgtggtagatgaagccaacattgaaacccacggcatggtgccaatgaatcgtctgaccgatgatccgcgctggctaccggcgatgagcgaacgcgtaacgcgaatggtgcagcgcgatcgtaatcacccgagtgtgatcatctggtcgctgggaaatgagtcaggccacggcgctaatcacgacgcactctatcgctggatcaaatctgtcgatccatcccgcccggtgcagtatgaaggcggcggagccgacaccacggccaccgatattatttgcccgatgtacgcgcgcgtggatgaagaccagcccttcccggctgtgccgaaatggtccatcaaaaaatggctttcgctacctggagagacgcgcccactgatcctttgcgaatacgcccacgcgatgggtaacagtcttggcggcttcgctaaatactggcaggcgtttcgtcagtacccccgtttacagggcggcttcgtctgggactgggtggatcagtcgctgattaaatatgatgaaaacggcaacccgtggtcggcttacggcggtgattttggcgatacgccgaacgatcgccagttctgtatgaacggtctggtctttgccgaccgcacgccgcatccagcgctgacggaagcaaaacaccagcagcagtttttccagttccgtttatccgggcaaaccatcgaagtgaccagcgaatacctgttccgtcatagcgataacgagctcctgcactggatggtggcgctggatggtaagccgctggcaagcggtgaagtgcctctggatgtcgctccacaaggtaaacagttgattgaactgcctgaactaccgcagccggagagcgccgggcaactctggctcacagtacgcgtagtgcaaccgaacgcgaccgcatggtcagaagccgggcacatcagcgcctggcagcagtggcgtctggcggaaaacctcagtgtgacgctcccctccgcgtcccatatcatcccgcaactaaccaccagcgaaacggatttttgcatcgagctgggtaataagcgttggcaatttaaccgtcagtcaggccttctttcacagatgtggattggcgataaaaaacaactgctgacgccgctgcgcgatcagttcacccgcgcaccgctggataacgacattggcgtaagtgaagcgacccgtattgaccctaacgcctgggtcgaacgctggaaggcgacgggccattaccaggccgaagcggcgttgttgcagtgcacggcagatacacttgccgacgcggtgctgattacgaccgctcacgcgtggcagcatcagggaaaaaccttatttatcagccggaaaacctaccggattgatggtagtggtcaaatggcgattaccgttgatgttgaagtagcgagcgatacaccgcatccggctcggattggcctgacctgccagctggcgcaggtcgcagaacgggtaaactggctcggattagggccgcaagaaaactatcccgaccgccttactgccgcctgttttgaccgctgggatctgccattgtcagacatgtataccccgtacgtcttcccgagcgaaaacggtctgcgctgcgggacgcgcgaattgaattatggcccacaccagtggcgcggcgacttccagttcaatatcagtcgctacagccaacaacaactgatggaaaccagccatcgccatctgctgcacgcggaagaaggcacatggctgaatatcgacggtttccatatggggattggtggcgacgactcctggagcccgtcagtatcggcggaattccagctgagcgccggtcgctaccattaccagttggtctggtgtcaaaaataataataaccgggcaggccatgtctgcccgtatttcgcgtaaggaaatccattatgtactatttaaaaaacacaaacttttggatgttcggtttattctttttcttttacttttttatcatgggagcctacttcccgtttttcccgatttggctacatgacatcaaccatatcagcaaaagtgatacgggtattatttttgccgctatttctctgttctcgctattattccaaccgctgtttggtctgctttctgacaaactcgggctgcgcaaatacctgctgtggattattaccggcatgttagtgatgtttgcgccgttctttatttttatcttcgggccactgttacaatacaacattttagtaggatcgattgttggtggtatttatctaggcttttgttttaacgccggtgcgccagcagtagaggcatttattgagaaagtcagccgtcgcagtaatttcgaatttggtcgcgcgcggatgtttggctgtgttggctgggcgctgtgtgcctcgattgtcggcatcatgttcaccatcaataatcagtttgttttctggctgggttctggctgtgcactcatcctcgccgttttactctttttcgccaaaacggatgcgccctcttccgccacggttgccaatgcggtaggtgccaaccattcggcatttagccttaagctggcgctggaactgttcagacagccaaaactgtggtttttgtcactgtatgttattggcgtttcctgcacctacgatgtttttgaccaacagtttgctaatttctttacttcgttctttgctaccggtgaacagggtacgcgggtatttggctacgtaacgacaatgggcgaattacttaacgcctcgattatgttctttgcgccactgatcattaatcgcatcggtgggaaaaacgccctgctgctggctggcactattatgtctgtacgtattattggctcatcgttcgccacctcagcgctggaagtggttattctgaaaacgctgcatatgtttgaagtaccgttcctgctggtgggctgctttaaatatattaccagccagtttgaagtgcgtttttcagcgacgatttatctggtctgtttctgcttctttaagcaactggcgatgatttttatgtctgtactggcgggcaatatgtatgaaagcatcggtttccagggcgcttatctggtgctgggtctggtggcgctgggcttcaccttaatttccgtgttcacgcttagcggccccggcccgctttctctactgcgtcgtcaggtgaatgaagtcgcttaagcaatcaatgtcggatgcggcgcgagcgccttatccgaccaacatatcaggacggaatgatcgcaatgaacatgtcgatgacagaaagaataaaagcaggcaagctatttaccgatatgtgcgaaggcttaccggaaaaaagacttcgtgggaaaacgttaatgtatgagtttaatcactcgcatccatcagaagttgaaaaaagagaaagcctgattaaagaaatgtttgccacggtaggggaaaacgcctggatagaaccacctgtctatttctcttacggttccaacatccatataggccgcaatttttatgcaaatttcaatttaaccattgtcgacgactacacggtaacgatcggtgataacgtattgattgcacccaatgttactctttccgttacgggacaccctgtacaccatgaattgagaaaaaacggtgagatgtactcttttccgataacgattggcaataacgtctggatcggaagtcatgtggttattaatccaggcgtcaccatcggggataattctgttattggcgcgggtagtgtcgtcataaaagacattccaccaaacgtcgtggctgctggcgttccttgccgggttattcgcgaaataaacgaccgggataagcaatattatttcagagattacaaagttgaatcgtcagtttaaattataaaaattgcctgatacgcttcgcttatcaggcctacaaattcagtgatctacgtaggccgcatccggcgtgaacaaagcgcagaaacaagagtcgcatcatgcctctttgacccacagctgcggaaaacgtgctggtgcaaaacgcagggttataatcatcagcccaacgacacacagcgcatgaaacgcccagtccatcaggtaattgccgctgatactacgcagcacaccagaaaaccaaggggcaagcccggcgatgataaaaccgatcccctgcataaacgccaccagcttgccagcaatagctggttgcgcagagtgatcgagcgccagcagcaaacagagcggaaacgcgccgcccagacctaacccacacaccatcgcccacaataccggcaattgcagcggcagccagataaagccgcagaaccccaccagttgtaacaccagcgccagcattaacagtttgcgccgatcctgatggcgagccatagcaggcatcagcaaagctcctgcggcttgcccaagcgtcatcaatgccagtaaggaaccgctgtactgcgcgctggcaccaatctcaatatagaaagcgggtaaccaggcaatcaggctggcgtaaccgccgttaatcagaccgaagtaaacacccagcgtccacgcgcggggagtgaataccacgcgaaccggagtggttgttgtcttgtgggaagaggcgacctcgcgggcgctttgccaccaccaggcaaagagcgcaacaacggcaggcagcgcccaccaggcgagtgtttgataccaggtttcgctatgttgaactaaccagggcgttatggcggcaccaagtccaccgccgcccatcagagccgcagaccacagccccatcaccagtggcgtgcgttgctgaaaccgccgtttaatcactgaaggcatcaccgcctgaatgataccgatccccaccccaccaagcagtgcgctgctaagcagcagcacactttgggggtaaagctcacgcatcaatgcaccgacggcaatcagcaacagactgatggcgacgctgcgacgttcgctgacatgctgatgaagccagcttccggccagcgccagcccgcccatggtgaccaccggcagagcggtcaacagggcagccacgctaaagctcattccgctcgcctggcgcaattgcggtagcagtggaccgacggaggtgagcagtggtcgcatattaagaccaatcagcaccagaaccagcagcatcgtgaacgtcttttgatggttgcgcatggctgtcagaacggtttggtcggcagatatttaccatctaaggtgatgaccgcacgttcgccaccttccgggtccgccactttcttaacgtcgagtttgaagttaatcgcgctgataatgccatcgccaaacttctcatgaaccaacgctttcagggttgtgccgtacacctgcaacatttcatagaaacgatacatcgttgggtcggttggaatacggtcatcaatgcagccacgcagtggaatcatctgcaacagtagaatggcgtcttcgtcgagatccagcttcgccccgaccaggcgggcggcgtcggcaggaagcgcctgctgccccagcaaagccgcggttacaaaggcttctgccagaccggtgccgtcggcaatctcggcaaatgagagatcttttttagctttgctgagcaaaatggcatcggcaagatcaagacgaatattgcggttaatttgcgactgaatcatggtgcatctcctgatggtttaaaaataaggttacgctgcggtcggttggcgtagcggtatggcacaaacgcgcggattagctgccagtggcacaaactggcgggttgcgccgtcaaacgctgcgatgctgccgctttcaatgtcgtagacccagccgtgcagggcgatccgcccctcttcgagcgccaggcgcaccgatggatgagtttgcaaattagccaactgagcaatgacgttttcacgtaccatcgccgcagcttttgacggtaaatcggaatgcgggcgcgcctcattaacgacgcgggctgaatcggcataacgcagccagtgggagacggcaggcatatggtccatgcactgacagctggcaatggcggtcatcgcgccacagttggaatgaccacaaatcacaatgtcagatacccgaagcgcagcgacggcatactccaccgaagcagaaacgccaccgggttccggcccgtaggaagggacgatattgcccgcgttgcgaataacgaacagatcgccaggctcacgttgcgtcaccagctcagggaccagacggctgtcggagcaggagataaaaagtgtgcgcgggctttgctgtgtcgccagctgtttaaacaaggcttcccgcttcggaaatgcctcgcgctggaatttaaggaatccatcaataatctctttcaccgttaacctctgtctgtctctggaatgagaggcagactactcgccgattgtcataaggtaaaagtctcatttatgatgagttctattggatttacttataggttggcgaatgctctctcgacatatcaattactttcttgccgtggctgaacatggcagcttcacccgtgccgccagtgcgttgcacgtctcccagcctgcgctttcccagcagattcgccagttagaggagagtttaggcgtgccgctgtttgaccgtagcgggcgaacgattcgtctcactgatgcaggagaagtctggcgacagtacgccagccgggcgttacaggaactgggggcgggtaaacgggcgattcatgatgttgccgatctgacgcgaggatcgctgcgtatcgccgtcactcccacctttacaagctactttatcggccctttaatggcggatttctatgcgcgctaccccggcatcacgctccagctacaggaaatgtcgcaggagaaaatcgaagatctgctttgtcgcgacgagctggacgttgggattgccttcgcgcctgtgcattcgccggagctggaggcaattcctttactgacagaaagtttagcgttagtcgtggcgcaacatcatccgctggctgcctgtgaacaggtggcgttgagtcgcttgcatgatgaaaaactggtcctgctcagcgcggaatttgccaccagagagcaaattgaccactactgcgagaaagcggggctacatccacaggtggtcattgaggcgaactcaattagcgcggttctggagctgattcgccgcacttccctttccacattgttaccagcagcgattgccacacaacatgacgggcttaaagcgatttctcttgccccgccactactggagagaacggcggttttgttgcggcggaaaaatagctggcagacagccgccgcgaaggcatttttgcacatggcgttggaggaatgtgcggatgttggcgagaatgaatcacggtagccactgacacaggtcagtggctcttcaacacagaggaaattaccgtttgtaatcgatggcttctggctgctccagatatacggtggtttgtgccggttgtgtactggcaatcaccttgccgccacgtaccgaataacgtaccggaacctgacggcgcagcgcatcaaatccattttcagccggcaggataatcaggtttgcgctgtttccggcggcaatgccgtaatcctgcaaattcaatgttctggcactgtggtgggtgattaaattcaggccatcgttaatctgcccgtagcccatcaactggcaaacatgcagccccatatgcagcacttgcagcatattcgccgttcccagcggataccacggatcgaagacatcatcgtgaccaaagcagacgttaatgccggactccagcatctctttaacgcgcgtgatgccgcgacgttttggatacgtatcgaaacgtccttgcagatgaatattgaccagcgggttggcgacaaagttaataccggacattttcagcaagcggaacaggcgtgaggtatacgccccgttataggagtgcattgccgtggtgtggctggcggtgactcgcgcgcccatgccttcacggtgcgccagggcagcaacggtttcgacaaagcgcgactgctcgtcatcgatctcatcacagtgaacgtcgatgagacggtcgtatttttgcgccagggcgaaggttttatgcagcgactccacgccgtattcacgggtaaattcaaaatgcggaatcgcccccactacatctgcccctaagcgtaacgcctcttccagcaacgcttcaccgttgggatacgacaaaatcccttcctgagggaaggcgacaatttgcagatcaatccacggcgcgacttcctgcttcacttccagcattgctttcagcgcagttagcgttgcatccgaaacatcgacatgggtacgcacatgctgaatgccgttggcaatctgccatttcagcgtttgccaggcgcgttgtttcacatcgtcatgggttaataacgctttgcgctcggcccagcgttcaatgccttcaaacagcgtgccggactgattccagttcggttgtccggcggtttgcgtggtgtccaggtgaatatgcggctccacaaacggcggtataactaaaccttgttcggcatccaggctgttttcagttatgggcatcacgccggattgcgcatcaatggcgctgatttttccgtcctgcagatgaatctgccacagcccctctttgcctggtaaccgggcgttaataattgtttgtaaagcgttattcgacactgttaacctccacatgcgtcattgctgctgtcgttttacgattcaaaatcgggttaaggatcagatagctcagcgcgccacctaataccgcgttgaccggaacaattcccggtaaccagtggcctgcggcaatccccagcgcgaccgccagaatcgccacccaattgacactcatcatacgcgtggtcgcaaagtgctcatagcggcgacggttcatcagatagtcggcgatgatcacgccccctaccggaggaatagctgccgaaaggaaggtcaaccagccgacaaaattgttatacagccataatgcgcagaccgtaccgataataccgttgattaccgaaagggttttgctcgacataccggtaatgttggcgaaacctaaacccgacgcatagagtgcgttatcgttggtggtccagatattcagccccagcaccacaatcgcaggcagcagcaggccctgagcaatcatcacatcagagatatccgccatgcccagtgccgcagcgcccgctgcaccgaaaataaacatcaacgagttgccgaggaaaaaggccaccatcgccaccagcaccgccagtttggcattgcgaccaaaccgaacaaagtcagcggtgagcgtacccgcactgataaatgaccccacaaccagcgccagcgcgacattgaaatctaacggttgtgcgggaacgaccgcttttaatgcgtccaggccgcccatgccgttaacagccagccacacggaataaccgcccaggcaggcgatagccggaaccgcaatcaccgaaagaaccgtcagcgccgaaatgccaaaaaagacggtgacggtcatcagtaaaccggaaacggcaatcagcaaattaatatccagcccggttgccttacccaccggaatggcaaacatcgccacaccgacgccaaaccagccaacctgagttccgcccagtagcagtgaaggcagccatgagcctttaacaccaaacgagaagcgagcaagaagatgagtggtcaggccggtttttgcgccaatgtaaccgagaaatgaagtgtaaataccgaggagaagattaccgatgagaactgcgaggaagaaatcatgatagctaagaccggttccgagagtgccgccggtccacatactggcggaaaagaaggttaatcccagcatgacgaacgtcaatgccaatacccctttccgcgccgactgcgggactggcccctggctaaagttgttatcttgcgacacgaaattccccctttttgctgtttgaaacccaaaaaatccgccgcattctattcatctgaagataaaaagcaatcgttttcgtggggaaatatattttttatatgaatgagtgcaaaaaggtgggggaaaaattatcggtgtaaaaacagtgggtagtgggtaggcctgataagacgcgtcagcgtcgcatcaggcatcggcgcggggtgtcggatgcgccacgcgacgcatccgacaataccttactcttccatcgcctggcggatctgatccaatgacgcaggatcatcaatggtcgtcagatccccaggatcgcgtccttcgcaaattgcctggatcgtgcggcgcagcatttttccggatcgcgttttcggcaattgcgagacaaaccagacgtgcgccgggcgaccaaagttgccaatctggctgtccaccagcgccataatcgccttctcttgcgaatgcgccacatcacgatcttccagactatcgctctctttcggaatgacaaacgccaccgccacctgccctttcagcgcatctttcaccccaaccaccgccacttcggcaacgcccggatggctggagatactctcttcaatctcgcgcgtgcccagacgatgcccggcaacgttaattacatcgtcagtgcgcccgagaataaagtgataaccgtcagcgtcacggatgccccagtcaaaggtggcgtacaccgggcgggaaaacagcgaccagtaagtcttcacaaagcggtcgtcgtcgccccagatggtctgaatacagcccggcggcagcggcccttccaccaccagcatccctttctcgttgacgccacacggttcgccggtgacttcattaagcaactgcacgttatagccatacatcggcacgccggggcttcccagacgcgtcggcctgtcgtccagaccgcgagcaatcgccataatcggccagccggattcggtctgccagtagttgtcgatgaccggcacatccagcgtattgctcacccaactggcggtcggctcgtccagcggttctccagccagatagagcacttccagcgacgagagatcgtgtttgcgaatttcagcggtagggaattttttcagcacgcgaatggcggtcggcgctgagaacatccggctaacctgatatttctcgacgattttccaccacacgccgcagtccggccaggtcggcaatccttcgtaaacgatagtcgccatccccgccagcagcggcgcgtaaacgatatacgaatgccccaccacccagccgatatccgatgcgcaaaagaacacgctgcccgctttgccgccaaaaatggtgtccatcgaggtcgccagcgccaccgcatatccgccgacgtcacgctgcacgcctttaggtttgccggtcgtgccggaagtgtagagaatgcaggaggtttcgttggattccagccacgccaccggtacccgcacgccgatgtgttgatggcgcaacgacgcgaaatcgacatcccgcccgctgacgcgcgccattttcgccagcccgcgatccaccagcaaaacatggcgtggctggtgctgcgcctgacttatcgcatcgtcgagcaattttttatagggaatgattttgccaccgcgcgctccggcatcagccgagacaatcagcaccggtttagcgtcatcaattcgcgccgccacgctgtgcgaggcaaaaccaccaaataccaccgaatgaatagcaccaatgcgcgcgcaggccagcagagtaatatgcgcttcggcaatcatcggcatatacaccagcacccgatcgccgcgctgcacgcccagtgagcgcaacattgaggccaccgcgttcacttcgtcatgcagctggcgaaaggtaaaggtgcgctcttcttctgtttccgaagagacggcaatcaatgccagtgcctctggctgtttctccagccagcggtcgatagcgttgtggcacaaattggttcggccttcacaaaaccaacgggcaaacggcggattgctgtggtcgagcgtttgcgtaaagggcgtctgccagtcaatacgccgggcctgctcggcccagaactgctccggttcgttaatcgaacgctgataaaattcgctaaaagacataatgctctcctgttgaacttacgccttaccgccgtttacttaaatgacgtacaggtcgagatactcattgaccggcatctgttccaggcgagttctgtcgagagaaacctccagaatgcgctgctgttggcgagtcgggaactggcgcgcgagattgattttgaatttatcgaccagtttcggaataccatcctgacggcggcgagcatgaccaatggggtactccaccaccacttcttcaaatcgtgtgccgtcggtgaactcaagggtaatggcattggcgatggcgcgtttttccgggtcgtggtagtcagcggtaaatgccggatcttcaaagcaattgatcttctcgcgcagggcgtcaatgcgtttatcttgcgcaacgttgtcctcgtaatctgccgccgttaagcgcccgaatagcagcgggatcgccaccatgtactgaatgcagtgatcgcggtctgccgggttattgagcggcccttttttgtcgatgatgcgaatacaggcttcgtgggtgcgaatggtcactttttcgatatccgccgccgttttgcctgctgcctgcatctgttcatagagcgtcatcgctgcttcaactgccgtctgggagtggaactccgccgggaaggagattttgaacagcacattttccataacgtaggaaccgtacgggcgctggaagcggaacgattcacctttaaaggagacgtcgtagaatccccacaccggcgcagtcagggctgacgggtaacccatttcgcccgttttcgccatcagtgccagacgtaccgcgcgggaagtggcatcgcccgccgcccaggatttacgcgtgccggtgttcggcgcatggcgataggtgcgcagcgactgaccgtccacccacgccagcgaaacggcgttgagaatttcctcgcgggtcaggccaagcatttcggcgaccacggcggtggaagccactttcactaacagaacgtggtcgaggccaacgcggttaaaggagttttccagcgcgatgcagccctgaatttcatgggctttgatcattccggtcagcacctgtttcatggtcaacggcgctttgccgctggcgaccgcgttgcgcgaaagccagtccgccgttgccagaatgccgccgaggttgtcggaaggatgcccccactccgccgccagccaggtatcgttgaaatcgagccaacggatcatcgcgccgatgttaaatgccgcctggacggggtcgagctggaactgagttccggggacgcgcacgccgttaggtacgacggtgccggggacaattggccccagcagttttttacaggctgggtattcgagagcttcaagaccgcagccgagcgtgtcgagcaggcagtaatgtgcggtgtcgtaggctactttggagctgatttcgtagttcatgacgtaatcgacgatatcaacgatttcacgatcaaattccgggcggatgttgttgatttgagctgacattgggtacgtttccttattgttattcgtagaggtttactggcgcttatccagcgcgacaaactggcggtcttccggtccaacataattggcggaaggacggataattttgttgtcctgacgttgttcgataatgtgcgccgcccagccggtgacgcgggcgataacaaacagtggtgtgaacatctcggtgggaacgcccatcatgttgtaggaaacagcggagaaccagtcgagattggggaacatctttttgctctcccacatcaccgtttccaggcgatcggcgatgttgtacatcttcagcgagccgccttcctgcgagagctgcttcgccacacgtttaatcacctggtggcgcgggtcggcgatggtataaaccggatgaccaaaaccaatgaccacttctttgctttccacccgcttgcggatatcggcttcggcttcgtccggcgtttcgtagcgttgctggatctccagcgacacttcattcgccccgccgtgcttcggcccgcgcagtgcgccaatcgcgccaataatcgcggaatacatatcagagccagtgcccgcaatcacccggctggtaaaggtggaggcgttaaactcgtgttcggcgtacagcaccagcgaaatatgcatcgccttttcccagctttgcgacggcttttcgccgtgcagcagatgcaggaagtgaccaccgatggagtcgtcatcggtttccggctggatgcgttcgccgttgtggctgtagtgataccagtagagaagaatcgagctaagtgacgccagcagtttgtcggcaatatcccgcgcgccagagacggtatgcccctctttttctggcagcgtgcagccgagcgcggaaacgccggtgcgcataacatccatcgggtgtgacgccgccggtaaggcttccagcacggtacgcacgttagccggtaaaccgcgcagggctttcagtttcgttttgtaggcggcgagttcgtcacgggtcggcagtttgccgtggatcagcagatgcgccacttcttcaaattcgcaatgttccgccagatcaagaatatcgtagccgcggtaatgcaggtcattgccgcttttacccacggtgcagagcgccgtattgcccgccggaacgccagaaagtgccacagattttttcggtttaatgacatgggtactgttttgcaggatcgttgtgtcgctcatattgtcctcgtcatttgtagggtcgagatatttttcgttgtgttttatttcacctggctacgggcaaacaggtcgtcgagcttctcttcgtactggtagtagttgatgctttcgtacagctcgttgcgggtttgcatggtatcgatgacgcttttctgcgtgccttcctgacgcaggacgttgtagacatgttcagcggcgcggttcatggcgcggaacgctgaaagcgggtacagcgccattgcgacatgggcgctgcgtaattcgtcggtggtaaacagcggtgttgcgccaaattcggtaatgttggcgaggattggcacctgcaccgcatcggcaaactggcggtacatggcgagttcggtaatcgcctccgggaacaacatctcggcacccgcttcaacataggcctgcgcacgctcgatcgccgcatccagcccctctaccgccagagcatcggtgcgcgccatgatcacaaaatcaggatcggttttcgcatccaccgccgcgcggatccgatccaccatctcttctttcgagacgatcgctttattcggacgatgaccgcagcgtttcgcaccaacctgatcttcaatatgcaatcctgccgcaccggctttaatcatcgatttcacggtgcgcgccacgttaaaggccgaagaaccaaaaccgatatccgcatccaccagcagcggcagcgaacaaacgtcggtgatacggcgaatgtcggtcagcacatcatcaagggtagaaataccgagatcgggcagccccagcgaacctgccgccacgccaccgccagaaagataaattgcctgatatccggcacgctgcgccaacagcgcatgattagcgttgatggtgccaacaatctgcaatggattttctttagtcagtgcagcgcgaaacgctttacctggagagtgtagagacatagcccatcctttgttatcaacttgttatttgcgttgataaagacaaagcaaggggtgtgccacaattgccttaataaaattaaatgtttaatttcaatttgttagagataaagtcatgaactaatccgcaaatatgcgtttcagttaacgtttcaggcaatgtttcaccgcgtttcattgcaacaattatgaaacaagactaaacccaatattcggtttcttaactttgcggtgcgctatggcacatccaccacggcttaatgacgacaaaccggttatctggacggtatctgtaacgcgcctgttcgagctgtttcgcgatatcagcctcgagtttgatcacctggcgaacattacccctattcagcttggctttgaaaaagcagtgacctacatccgcaagaaactggcaaacgaacgctgtgacgccatcatcgcggctggctctaacggcgcgtacctgaaaagccgcctgtcagtgccagttattttgattaaaccgagcggctacgatgtgttacaggcactggcaaaagccggaaaactcacctcttctatcggcgttgtcacctatcaggaaaccattccagcgctggtggcgtttcaaaaaacctttaatctgcgcctcgatcaacgtagctacattaccgaagaagacgcccgcgggcagattaacgagctgaaagctaacggcactgaagcggtggtcggcgcggggctgattaccgatctggcagaagaagccggaatgaccggaatttttatctattccgccgccaccgtgcgccaggcgttcagcgatgcgctggatatgacgcgcatgtcgttacgccataacactcacaatgccacccgcaacgccctgagaactcgttacgtgctgggcgatatgctcggtcaatcaccacagatggaacaagtacggcagactattttgctgtatgcccgctccagtgcagcggtgttgattgagggggaaacggggacgggcaaagagctggcggcccaggcgattcatcgggaatattttgcccgccacgatgcgcgacagggcaaaaagtcgcatccgtttgttgccgtcaactgcggggcgatagccgaatcgctgctggaagcggagctgtttggctatgaggaaggggcgtttaccggctcgcgacgcggaggtcgcgccgggctgttcgaaattgcccacggcggtacgctgtttctggatgagattggcgaaatgccgctacctttgcagactcgcctgttacgggtgctggaagaaaaagaggtcacccgcgtcggcgggcatcagcctgttccggtagatgtacgggtcattagcgccactcactgcaagctggaagaagatatgcagcaaggacgttttcgccgtgatctgttttatcggctgagtattttgcgtctgcaattgccaccactgcgcgagcgggtggcggatattcttccgctggcggaaagctttttgaaagtgtctctggcggcgctctccgccccgttttctgccgcattacgccagggattacaggcaagcgaaaccgtgctggtgcactacgactggccaggtaatattcgtgaactgcgcaatatgatggagcgactggcgctatttttaagtgtggaaccgacgccggatttaacgccgcaatttttgcagctgctactgccggaactggcgcgcgagtcggcgaaaactcccgctccacgcttactgacaccacaacaggcactggagaaatttaatggcgataaaacagcagcggcgaattatttaggcatcagccggacgacgttctggcggcggctgaaaagctgaactgccgaatgcagcgcgaacgctttatccggcataaatttcaatagatgatcaccgataaacttacgcatcgggcatgtttacatagggttcagaattacttcttcttataaatatttgccgtgccgtggatcttattgtcagtttgaccagaggtcagtaccaacacatcagcccctttttcatccgcttttttgatcaaatcctctttcgcatctgcggtcgacatttcattactggttgaaatatcacctattttttcatactgcgattcaactttttcaaattccgctttggtcatcaattcagcggcatagacattggtaacggcaaacgctaacgcaccgactaacattttagagattattttcatattacggctccagagttgttatcacactatcacccacccacattattgggttgattaataattagttcagtcagggcataaacgccagtaaccggaaataagacactttgtgatctctctcgcacccgattatttttggtagaaatatgatgaagttacttcacttatttatggatgaaatcactatggatcctttgcacgccgtttacctgaccgtaggactgttcgtgattactttttttaatccgggagccaatctctttgtggtagtacaaaccagcctggcttccggtcgacgcgcaggtgtgctgaccgggctgggggtggcgctgggcgatgcattttattccgggttgggtttgtttggtcttgcaacactaattacgcagtgtgaggagattttttcgcttatcagaatcgtcggcggcgcttatctcttatggtttgcgtggtgcagcatgcgccgccagtcaacaccgcaaatgagcacactacaacaaccgattagcgccccctggtatgtcttttttcgccgcggattaattaccgatctctctaacccgcaaaccgttttattttttattagtattttctcagtaacattaaatgccgaaacaccaacatgggcacgtttaatggcctgggcggggattgtgctcgcatcaattatctggcgagtttttcttagtcaggcgttttctttgcccgctgtgcgtcgtgcttatgggcgtatgcaacgcgttgccagtcgggttattggtgcaattattggtgtattcgcgctacgcctgatttacgaaggggtgacgcagcggtgagcagataatttactctctacgtaatcaacctgatttgccgaatcccggccatcggcgatgatagcccccgtaatgcgtggtccttatttccgataagtttacttgagtctttagcttcccatttcagcccactctcccctgtgtgggcttttttcattggtctgccccgtcctgaatagccaaacaatggcaatgttccactttgcagggatgataataaggggatctgattcagaagagttttgaaaagttggaccgccatcgaggcctcgaaccccgtaccatacaacaatcctggttgtcgtctgctcttcctgatgagctaatggcggtttttgatatgagccttacagcatattttctgtcaggcttgagtgcgatgcgtaaggtacagaaaagaccccacacaaacatgatggaattatgatttttttcatatgaatgtcaacccacacattcacaaaacatctgcatgagatcattttttatacaccgcatagctgcgaaaccactgctggtgcttttttaagcgaagcgtcgccgatcacaacaaaatatcggcgaaaaaggcggtggaatgccatttggcatacggatatacagatgaaatgattacctgctttgcgattcactctctggtggaataacaacttgcaggtggaaccctttctgaactaaagagtgtagcggattttaacgtgcttatttacaggataatatctgtcacctaattcctgcactctattcgatatccattcatttaatcgtgcgtcatctctgtatgtttttacgtccagaacagagagcaataacatcaccagtgattcaggaaaaacagggtggatattttttaagtgtaataataatccatgcgcaagcgcctgcttaatgggcgcgtctgtctccggaatagacgacatttcgcgaagccatttttccacacgcatacactctttccctttagggaaaattctcagcaaaggcatatggtgttcaagaagaatacatttgcaatctgttcgcactgaatcgataaactgcactaatttcttaagcccggtaaagcgtccagcctgcacatttgctttaatatcaagaaacgcatcatcctggtcatatacccaaactgtccctttttgattttcaagtatgcgaaaaacaaacttaaccgggtgatcagggtaatccatccagtcataaaatcctgggaaatcattaaactgcacatttatggtgagtgcgttatcgtctgaccactcacagtctcgtacggcagccatgagatgaatgagtttgtcgtcatcgactaaatcatcacgacaatcataaggataatcataatattgtttaatcaaaaccttgaatatatcgacacaggaaaccagggagcttttgatatcctctggtaactgattgtttttaaccgtattaagtatgctttgttgcgtatatggcatcaaattattgtgcggagcttttaatgatatcatcgcgatctctcttaaataaaaataaacgtcgcagataataaagcgctgattaaaccaggcactatcagaaatcgctcataactaacgtgtgaagtattgtgtactggagggagttaatttaacaatttgaatttacgttataggttttactgctactttgatattatttcgctctccttaactaaaaagttaagtggagagcgaagttaatatgttaaaccacagcgtatttattaattttttcagtctgttagtgtgcgattatcgataacaaaacgatatttcacatcaccacgcagcattcgctcataggcttcattaatttgatcggcccgaatcatctctatatcagccacgatgccatgttcggcgcaaaaatcgagcatctcctgagtttctggaatgccgccaatcatagaaccggctatcgcacggcgtttcatgatcaggttgaaaacttccggcgatttatgcggtgtcgcaggcgcaccaaccagcgtcatggtgccatcacgcttcagcaaggtggtaaaatcgtcgagattatgtggcgcagctactgtattcaaaatgaaatcgaaactcttcagatgagccgccatctcatcggcattgcgtgagttaacaacttcatcggcccccagggcttttgccgcttcgcgttttgcctcagaagtggtaaatgccaccacatgcgcccccatcgcgtgggccagcttgatccccatatgtcccagaccgccgatgccgaccacgcccacttttttacccggcccggcctgccagtgacgtagcggcgaatacgtggtgatccctgcacacaacaaaggagccaccgccgccagctgctcttgcgggtgacgaatacgcagaacatatcgctcatgaacgacgatctgttgtgagtagccgcccagagtatggcccggttcgtccggcgtcggcgagttataggtgccggtcatgtgatcacagtagttttccagcccgtcttcacactcttcgcaatgtttacaactgtcgacaatgcagccgacaccgaccagatcgcccggcgcatgtttttctacctgatcaccaacggctaccacacgccccacaatttcatgacccggtacgcaggggtaaaccgtccccgcccactcggaacggacctggtggagatcggaatggcagacgccacagtaagcgatttcgattttgacatcattcggtcccggttcacgccgtgtgatatccatcggttcaagtggttgtttagcggaatatgcaccaacagctttgatcttcattgtgtttactcctgattagctatgtgtatttggcgacgcctgatatgtcatcgcggcaaaacgcgtccattgaatatagccaatatttaaaccacccgatccagccccaacatgccgcgaacctgaatgaaacagagcagcaacgttccccataaggcgagcgcctataagtgtgatatttgctatccgtaaaagactaaaatcggcaaaactgatgatcttttcacgtagacaaatagttatctacacaacgtcaataagggcatattcctcaaagataatgtccatttctgccgacactatcatattgaggtcgccccactccctggggcttaaatctcttacaattcaccgttgcaggcgtttcaaatgcgcatcaacctgccacactcccccacaccagttgccctttatggaacgttgcggttctcggcgagatacgcgccaccgcctcggcggaacaggaggcgtccaccagcacaaagctggcatcatcctgcgcttttggccatacacgctcgcctttttcattcagcggcaatacatcgccagtggctagaaacagcgaacgggagaggttctgttcgttaggacgaatatagagctgcgcgtagagattggctttttccagcatgtcgcccagaccataaggcgaccagtggtcgataacgctgtcagtgccagtcatcacttttacgcctttgtcgtgcaactgtttgagcggcatatgcagcgtgccaatcggcaccgtcgaggcgatagaaatttgctgcgccgccatccgattcgccagcgcatcgacctgttgttcgttgagcgtagccagcgcaaaggcgtggctgatggtcagcttacccttcagctgtggcgttttctctaccgtttcaaccatataattgatggctgccacgcccgacggagtggtttcgtgcaggtgaatatcgacgcctttgtcgtagtccagcgcaatctggaacatggtgtcgagggatttttccatcgcgccatcaacactggtcgggtccaggccgccgacgtaatgcgcccccgcctgcatcgcttcacgcatcaaaggttcagatttcgacagcagcaaaccgtgctgcgggaaggcgacgatttcacactcaaagcccgcctgacgtcgcgccagcaccgcctgcaaattttgcagatttttcaggccggaaactggttcgatattgcagtgactgcgggcaatggtggtgcctttcgactgcaatagatcgatcagtttttccgcccgctcctgcgtatacggttgtaactccggcagcattttctgctcgagtttgatcatgtcctggatagtggtgcctgccggacgattgagcgagcgccacggcccgccgtagaaggttttgtcgagatgaatatgcatgtcgcgagtggtgggtagcatcaacttaccgccagcgtcatagtgcggcagcgtggcgtccggatgctgcttgttctcgcgcagggcgacaattttgccgtcctgaatctccacggtctggcgcgccgtgcgggtctgcaccgccacaccgttttcgtagtcaaaaccggtttccagcagcacgttatcgagatagtaatgcgggtcagtgattttcatggtgttgttcgcttcgcagtttagggtgccagctaccgccgcatgggcgagcggcacagaggtaccaaacagcgcggcggcggtgaccatcttaccgctctggctcagaaattcacggcggctattgctttctttcatcctacgtccttacgttttaataatatgggtgcccgtttcaccgcgcagcgccgcaggcaggcattccggcgtggtgataatcacttctttgccgccctgctccaggaacgtcaggctggcgatgatttttggcaacatgctgccgggcggaaaatgcccttcctgcatatagcgagtcatggtggcaatatccacccgatccagcgcctgctgctgcggtttaccaaagtggatacagactttttcgacgccggtggtgatcaccagaatgtcggcgtgaatttcacgggccagcagcgcggtagagagatctttgtcaataaccgcgtccacgctttggtaatcccccgcttcagtacgcactaccggaattccaccgccgcccgcgccaattacgacaaaaccttgttggatcagcgccttaatggcgggtgcttcgacaatacgtttcggttccggcgaggcgaccacgcggcgatagccccgtccggcatcttcaacaaaacaccagtcagggtttgccttttgtagtttgtcacgctggctttcactgaagaatgcaccaatgggcttggtgggatgggcaaaacctggatcgtttttatccacttccacctgagttaccacggtgacggcttttttctcgccgtgacgcgccagccggttattcagcgcctgttggatcagatagccgatgccgccctgcgtatctgccacacagttcgccagcggcgttaagagcagcccttcgcgctcgtgggcaatctccgcacggcgtaaatccagcccgacctgcggcccgttaccgtgggtcagcacaatgtcgtaatcggaagccagcatttccagcaccgtatcggccacggctttcaccgcctccgcctgatgctcaatcgactggctggcgttatctttgataatgctgttgccaccaatggcaacgaccacaagctctttcatgttgttatgtccgctacagagggtgattaggttatgaccaacgccagactgcctgatgcgctacgcttatcaggcctacaattctcgggccatccgtaggccggataaggcgttcacaccgcatccggcataaacatgtaagtcagacgccgtaacgttcgcaccagccgagaatggctttctcgaagcaggcgaatggtggatgcacaatgcccgcgccaatcatgccgacgcccgcatctttatgggcgatggcggtgttgatcaccggcagaatgccgctgctacccacgcgggtgatgtcgattgccgacggcacgcccataaaaccgagcagcggaatggtgacgttggggttttcaccgagagtgatttcacgcatctggcgagagaaatcgatagcctcttccaccgtgccgcccaccagcgcaacgattgcaggcgcggtcgccatagcaaatccgccaataccgtaggtttcagtgatggcgctgtcgccgatatccagccccgaatcttccggcttataaccggcaaacatcgggccgatgacctgctgcgccggaccggtaaaccattgccccggtaatccgctgacccgcaggccgaactcgacgccgttacgcgccatggtggtgaccacggtgctgtattcgatgccgtgcgccgcatccatcgccgctttacacatcgccatccacgtcgggccggagaagtagtcgctgctagcgacaaactcaaacacttcgcgctgtttctccacggaataacctgcctgaataattcccggcgtcagcgcctgaatcagcaacgtcgtcccggcgttattgcggttatggcactcatcgcccatatgcagtgcctgcgccagcattaagcgcagatcaatctcgccgataattttcatcgcgtcgcgcagcattggcccctgcacatcgcgcatccagttgaggcggtcgatcacgctctgatcgttggctcccatacgcaaaatcttcgccatctgctcgctcatattggtgtaagcgatgttgccgtaggttttgttttttacgatgtgcataaacatcgaggcagaggtaacacccgccatcgatcccacacagtcgtgttcgtggcacggcgagaaggtgatctccccggaggccgccagttcagccgcctcgtcgagatctttcgccagcccttcgaacaccaacgccccggtgaccgcgcctttcatcgcgccgcacattttttcccaggtgatcggcggcccggcgtgaagaatggttttcggcgtcatgcccggcaccacgttaatcgcctgatcaaaaccaatcagcaccggatgcgactggataatgcgctccagcgcctgctggttagcggcggcgattttgtctgccagcggcgaatcggcaatgttatccagcgcctgcaccacctgcatattgccctgccccggcggcgtccagtcgagttgagtcacttctacatgctgctttttcaggtcatcgctaaacatggcgatgccgacgttaataacgttcaatggttggctaaacagtgactggctcatcaggcttcctcccctttgcagataaattcacgcgccagcaatccggtattggtgctgctgctcgccagaatcactccggcatcaagcagcatctggctttgttgttctaacgatggcgtatcaagatcggtacccagcacataggcgagaatgatcaactcgcgtccttcggcagcggcgatcgctttcgcttctttgatcgcctcgatggtggagccgaccggatcttcatgcgatccaaatccgagcacaaaatccatcacgatcaccgccacttctggatcgcgcgcctcttcgatcaagcgactgatgcggttggtggggtcaatcattggatgcggcttgccgttcgtgaagtcgtcatcgccaaagtcgaggaaggtgtgtttgatgctgcggttgatatcttgcaggcggaattccggatcgggctgaatgttgctgtagacatcgccatgtttttccatcaccgcgaacatggtttcgtcgcacagcgtgccgccgcagaacaggccacgaatgtatttctgctgcggttgcagacgcgcacgcacatcagcaatcaacggctggttaagcgtatgcaggtcgagattttcctgtttcacgccggagagcatcaccgcttttagcgccgcctctttgctgccgcgggcaaactgtagcccctgctcatccaccggcgtttcaacgcgaccgaggaagcagaccaccaccggcttgcggcaggcacgtgcgcgttccagcactttgcgggccaccgcaggcgcgggaggttttgaaatcagtgcgataatttcagtttgcggatcgttttccagcatcccgatggcgtcgagcatcatcaggccgccgattttctcgctcaggtcgcgcccgccggtgccaatcagttgtgaaacaccgccaccaaattcatgaatgcggacgctcagctcctggctgccggtgccggatgcgccaacaataccgatattgccgcgacgcacggcgttaccaaaacagagcgccgcgccgttaataatcgccgtgccgcagtccggccccatcatcagcagccctttttcgtgggccaactgcttgagcgccagttcatcttcaactgagacgttatcggaaaacagcatcacgttgagatcgttttgcagcgcctgacgcgcttcgcgagcggcaaacagaccgttgaccgaaatcaccgccaggttactttccgggatatgctttttggcgctggcaatagtggcgtaacgcgcctcgtgcgagccgctttgcgctttggtgttgaacagttcttcaatctccaccagcaactgctcgttgtccgcacccgatttaccattgatgacaatcatcaggtcgccgtttttcgcctgttccagctccggcgtcagcagtcctaaatttttcagtacacctttgttcatttcggtcgccatcgccacaaatgcctgctcgacgccgtcgagtttatttgcacgcgtggagatagacatcagcgagacagaatcaaaataggtattcggtttaatgactattttaactgacataattccctccgtaggtttggctcagcgcacaaccatcggccatgccatacagcatgtcgcagccggaactggagccaatatgtttaattttttctattgcctgagttgcgttcccagggatgtcataaataatgttgtgaataaaacgatgaatattttcccggcaacgttgttgtaatgcggcttccagcgttatagcacttaataatgtggtgttatttctgccgcgctgcataccgagataaaattcctctttgtatttttccgacggatgcccgggaataaataaaataagcgccagacctgttaaataatcgtcggctgatggcgtaaggccaatccctaacccaatcatactggcgaccgctgcggcgatattttgtttttcgtttactgcctgaataactgcccgtcgtttaatatgtagttctttatttaacgcctgataaaacggattatcgccgcgataattaaacagggtttcattttcccccaggtgctgatgaataatgtcgtgccactgtagccaggcgataaggtgaaaattcacagcggtcatttgcaaggttggggacagccaacgccgacaacgactcatctctatatgaagatgttgaccaaccgtaataccttgatcgtcaaactgaaccttatcaccatgccggaacagatcatcaaagtgagtgagtgccaaccgacaactgtttggcgcattgtcgtactcttcacaaagcagcgtcagcaactgctggcgagccgggagtgcgatatttaccgctctggcaaagacctgttcaacctgtccttgcccccgctgcgccagaaaatccgcatccgcagttagcgcccacacacaccgtctttctggtgtgttgatagcaagcctcccggtttatgcacctgcggcaatcagtaactgcgcaatctcttcaaagccccgttcccgcgccagttccagtggcgttttgccatatttatcggtcagatgcgggctggcaccgtgttccagcaataactgcacaatcgcctgctgtttaataccaccatcattaagcacaatcgcttccagtagcggcgtccagcctacatggttggtctggttaacgttaatctccgtatgcgccaaaagctcttttacaatacttaaatggcctttttcacaggcaggcgtcaggccgacaccgccaaaacgggttacgcaattaagatcgggtttagccggtaaaataattcgtagtagcgttaaatcatcgttcagacagctaattaaaaaaggatttaaacaggtatgatcttgcttattaatatccgctccggcatcaattaatgcctgaacgcaagcatattgctgatataaacttgccagcgtaattgccgttttcccctgacgatcgcaggtattaatatcgacacccagcgcaaggcaggtttttactttatcgatatcaccctgttgtgcagccaataaatagtcggcaggtagattttttatactcattcacattcccctggtttttgtggctgttttcgatgaattgagaatagcaacgataatctgataaaagaacccgcttaaatttaattcgctgtatttcgcctttttgttgaatgatgttcaacaatcttttcgcagtgtgcggtagtgcaatatttgtttctttgacccgataccctttcactcaatcaggttttatttctctatagtctgcacatgtaagagtagctttcgtccatgtctaaccagaggggaacaagatgaacggactcacggcaacgggtgtcaccgtcggtatttgtgcagggctttggcagttagtgtcttcacatgtcgggctctctcagggatgggaattattaggaaccattggcttcgtcgccttttgcagtttttatgccgcaggcggcggtaaatcggggtttatcagaagtctggcggttaattattccgggatggtgtgggcatttttcgccgcgctggctgccggttggctggcctctgtaagtggactgtccgcgttctgggcgagcgtaattactaccgtacccttctcggcggtagtggtctggcaagggcgtttctggttactgtcctttattcccggtggctttctcggcatgacgctgttttttgccagcgggatgaactggacggtgacgttactgggttttctggcgggtaactgcgtggggataatttcagaatatggcggacaaaaattaagcgaagcgacgactaaacgcgacgggtattaaaagttattcaaaaatgattatctatctttaatcgatacctctacagtcatggctggagaaattcatattagataatggcgggaatggtttaatgaactcagtttttaccgaagagaatctgttggcatttactaccgctgcgcgttttggcagtttcagtaaagccgcagaagagttgggtttaaccacttccgccattagctacaccatcaagcgaatggaaacagggctggatgtggtgctgttcactcgcagtacccgcagcattgagttaacggagtccgggcgttattttttccgcaaagctaccgacctgctgaatgatttttatgccatcaaacgtagcatagatactatttcgcagggcatagaagcgcgtgtgcgcatttgtattaatcagctgctttatacgcccaaacacaccgcgcgcttattacaggtgctgaaaaagcagtttcctacctgccagattaccgtcaccaccgaagtgtataacggcgtctgggatgcgattattaataatcaggccaatatcgccatcggcgcacccgatacactactggacggcggcggtattgattacactgaaattggcgcgattcgctgggcttttgctatcgccccggatcacccgttagcctttgtgccggaacccatcgccgaaagccaactgcgtctctaccctaatattatggtggaggacaccgcgcatacgattaataaaaaagtgggctggttgctgcacgggcaggagtcaattctggtgccagatttcaacaccaaatgtcagtgccagattttaggtgaaggaattggttttttgccggattacatggtccgtgaggcgatgacgcaatccctgctggttacccgacaaatccataatccgcgccaggattcgcgcatgttactggcgactcagcattctgctacgggtcaggtgacgcagtggattaaaaaacaatttgcgccaaatggcatattaacggggatctatcaggatttactgcatcgggagaattaatcgctgccaacctcccgatgcgctgtgaatagcggtttacatcaaccacctgctttcattacccattcagagataaatttattacccggtactggcggagagtacaaatagccctgcaaaaagtgaacgcctttaccgatcattaaatccgcctgctcctgggtttctaccccttccgccacgatactcagaccaggcttacgcgctagttcgacaatattgtccacaatatgaccggagatttcgtcgacactcgccatttgcacaaatgacttatcgatcttaataaaatcgaccgggaacgcctgcaagtaacgataggtcgcataacccgtaccaaagtcatccagcgcaaaggtaatgttgtgctgatgaaggctgtcaaatatcgctctggcttctggcgttaccggaatagggttacgttccgttagctcgagaaccagcttgattttatcgttacctaatttcttaaccaggttcagacactctttttcaaatcccgctgccaaaaaacaacccgccgagacgttgatgccaatatggaaattgtccggcagcaaatgttttaccggcatcagaatatccgcagtctgtttcatcagttggcgggtcattatgacaataagaccggatgactccgccagaggaataaactgatccggtgggataattcccgtttgtggatgttcccagcggacaagtacctcacagcccgtcagtaccccagtctgcgcgcagaaaaccggttggatccacggtttgaattcgtggttttccaacgccagactgatggcttcaggcgtgacgatatggtgacaacggttatcagggatataaaaattatttttatttcccgtgccactgatgacttgcggatgatattgaaaaaagatatcccgccagaaggtaatatcactctggatgcctagtttttcatacagctgcttcttttgatgtgaaattgtctttgcactgcgatttctgtactgtgagatttctgtaaccgacattccctccattagcagcttgagtaaaagccgttctttttcggacacgataccaggcaacgtcaaattcaccgttgccccgaactcttccaaaaaaacactcaaatcatgcgaagccatcgaacacaccttgattaaatcttgtgcgccagctaaatctgcgagtcttcactctgactgataaagctggctgcaagaaaatgacacagagagccgaattatctcccgttcggctctctctccttttactcattattcagatcagaattgccacttaatgccaaccattgcagaggtgtcattatatcccctatcggcaacctgaacgcccacattcccccagacattcaggttggcatttagctgtccttccaccccggtttttatctcagcaatatttcgggctccatcctgagtgacggacacgccatccatactggtgctgaaatccttactgttatgcagccagttcacttctacaaacggctggaactcgcgggatttaccgtcatccattttatggtggctcttcagccaggtttttacgccaagtcgggtttgaacattgccatcaccgttgctatgaacgagggttccgttgctttcgcggtgcttatcggctttgactcccatccaggtaacctgtgcttgcggctgaacataccattcattacgcgttccctggctgccattaaattcagctaatttgtgtttgtatccagcttccagtgaagcggtaaatccttttgatttataggattcactttgtaagtcatcccctttcactgtgttatcaaaccagctgtactgcgcccaactgtcgagatacgcgccattacgcgactcgtcatcggcataccaggtggcatagaggccggtgctatatccgttcacactcgcttttgcacgataaccggttcgcgaggaaatggttttactgtcgctgttgccatatcccgccatgaccccaacatgccagctgtcgctgccgttttggctccactgcgcgacatcgcctcccagttgcagaacatagcgattgctttgggttttcagctggccgctgccatcacgccatttattatgaccaccttcatggcgcatccacatagtggtttgtttctgctcacccgtcaccatgtcggtatagtacgtattacccagacgctcatgcagacgcgtggtgaacattgtattcgctgctgcaaggttcgcaatgtagctacccgcctccggtcgcaggtcattatccacattcagatccggacccggcgtaggtgtcgggttagggttcggctctggattcgggtttggctccggattcggcatcgggtctggctccggctgcagttcaggagaatcactgccgctggtcagataccagttaccactatttgccccttgtccacgcgcgagagtgtagtcatacgcccccgcaacgatacgaccagcctgaacaaattcgccctcagacttaccgtctacatggataagttcgataccgttaagggttttcgcacctgtaccgccagcgttattcaccgtaacggcagtcgtgccgctagtatcgccctcgacaaccaatttatcggttactgagtcatcgccattcagtaccgtattcattactagttgaccgttattaccgtggtagttccccttcaccactaacacattgccagcttgctgtcctgacattccggtcatcagcgtaccgttgttggtcagattgccgcccagggtgtaattcacagacgcagccgctcttttttcagcgctattattcaacgccagggtaccgttgttctcaacgtttgcgctacccaatccctgcgcatgacttaccaggacattagccgaattagcaatgttcacattcgctgtcaggttgctgttatcgcccgcgatgtccagcgtgccgccctgaatattcagctctccgctccccgttaacgaaccggttgaagtgcccccgttggtaaccgtcagactgccgccatttaagctcagcagtgaatcggcgctgccattgagcgtgcccacggtctggctgtgaccattcatatccagttcagtctctgccgccagacgcagttcatgggtattacccaacacgttatcgttattcaacaaaagcgtcccactgcgcagatcggtaacaccggtatagtcgttgtctttgttagaaagcgatacggtctgacccttctggctgctgaatgccaggtcaccactgccggtaatctttgcgctgagatcggcggcattctcgcttttaccgttagagctcagcaccagagcatcgctgtcggtagcgtgtaaatcaagctgggtcaggccgtaaccgatatacagaccgtcattgtttaccccactcgtcagacgatagtcgtaagtgccgacggccgctttttgcccattctgctgaatatcacgttgggcactgctggagaggatttgcccatttttatcctgcaattgcagattgcccgcatcgcccagaacttccgcaccttgcgcatcaaccaacttaatggtgctgttaccatcatcgacttcagtgagcgataacgcagagtcaatatcacgagatactgagcttacaacgtcactgtcagaaacctgaatcacaccctcgccgcgcaaatccagcgttttactaacgttgaccgtcccttctgtcatctgtgcacctgctgtcagggcaccaaaatcaacggttccgccggagaatcccaaagtgctaatggagtgagcgcccttacccactgttaccaggcttccctgacccgcagtgatcccgcctctctgcagaaactcagcattcttttccaggttaaatgtcgtgttctggaacgccagtgaaccctggaaccagtctgtataagcaaactcatcgaaggagaattcgtgattccccatgtttatttcaacaatacctctaccttgaagatcgttatcaaatacccaatctttattggcattgatttgcagtttgccatcaacatccaggtccgcacggccgatgttcttgtcttcagaaataaccgcgacagcaccagaagcgacatcaatatatccgctgaatgcatagttattgccggtcagtgccactgtcccactgtcgatacttattgtaccattgccggaaatcttattggcaaaggtcatgctatcgtcagccttcaggtgtaatttcccgcggttgttgatctctgctgtacctatatttttggtgatccctaaagcgccattttgctcaattttgactttaccactaaaggcagagttatcaccggttaagtaagtcgtgccattgagcgcattgatatagcccaggccctcgctgccactgacaatatccgcggaaatagtcgcgtttttatccgtgtggtttaaggtgattttcttatcggatgtctttgcccacacaaactcaattttttcggcatcaataatccctgcagccttcgcagcacttccttcctgtgcacctaacgctaactcagagttggtgcttaaactaattttcggtgcggatattttacctccatctgatacgactaatgttgtatcagaacgttggtcgtaataacccaggctaatatgttcacgagcattaacttcaccaccgttattaaccgacaggaactgattaccgccatatccgccgtaaacgcccataaagaaggtccctgcatttacctgactaccttcgccgcttacattcccctgcgtataagtcagacgactggtgcccttaacatgaattttgccgccattggagacattaaaatagccttgatcatgtctcatgcctgagtttgactcatacaaatcatcagcatataactcgctgccagcattggagacattcaggaaccccgtacctttcagcaaaaagttaagcgggccattgattgttacctttcctccggtaatatccaacccaccaccagaagcgagagtcagacgcggacgggaagtatctgtcgtattgattaccagattggcattgtcagtcaccgtaatacggtaatcgatgctctggttctctttgccaaaatcaatagctttatcctggtttacgatgacatcatcggcgaataccagagatgaatataaacttatcgcgctaattaaaacagcccgggacttttttccttttactctgctccccagctccgagcagacgctccaacagttacgggacctgttccactttagccgatatattttattcatcacaatctccagcaatacatccaaataaaaccaagattgcataaacagcaacgcattaaatgccattctggttactgttcatcgcatataaaaattcaaaaattttgcatagcattggcaaccacatatctgagtatgtagttcagagggtaataaaatagcaagttactactgaaaacttattttaagttaacactcttaactttatcattacattcctcccagtctctaatacctgcgcattatatgtatccaggaactcaaatcaactcaaaatataaacaaaagcaggaggaatacatttaatatacagacggtaaaagtggtaactcttattaggtatccaaatataagaatcgtcttattaataaatatatgactctataggactgaatccattcagctaatacaaaataaaatcgttaattaataaaatataaagtcatgaagtgatacaagaggaatttcaggatatgacatgacaatcatatataatatatgcataattttttacagcgagtcaatgattcccgcgccatatgcagacatggcgcggttttatgcaaaaacaatcacgcgtccgggaacatcacgctatggcccggcgcttcacgatggagatgaataaagttaaggtgccgctcgtactggtcaagaatatcggtgatcacctgctctttgctgtagtccatcaggtcgttgccctggctgccttctaacaggaaggtttccagccggtagtaggtcgatttaccgctacgtgcgcggtaggtaaagcccggcaccgaatattgctgcggccaaatctgatagacaaagttttgttcttcgcccatatgcaccaacaaatccagatgccccaactgttgtccctcttccggcggcaggctttttagctccacgtacgcgccgcgcaaccgcagctcctgcgccacttcttccattgccgggtaacagaccgtctccatcatctgtttagtgtaacgcgtgcccggataattcatcaggcgcgagagacgttttttccagctcaggcgatcctgaagccccagcggtcgcggcgcggtatcgcggttggcactttcacggcggtaatcttctaccttcagagatttatacaaccccgccatcacgaagaagatcacaaagctgaacggcagccccataatcaccgtggtgttttgcagcgcggatatcccgttggtcatcagcatgccgagcgtcagcaggccaatcgccaccgaccagaagacgcgcagccagccgggggcgtcgctgttgatatctttaagctgcgaggtgaaattccccagcaccagcgcaccggagtccgccgaggtcacataaaacagcaggccagtaatggtggcgacggaggcgctaaaggtaaacgccggatactgcgccagcaggctgtagaagccgcgctccggatggaccatcgcttcctcggcaaatgccgcgccgccgtggatgatttcatacagcgcgctattgccgaacaccgagagccataacagcgtgaaggtaaacggaataatcaacgtgcccagcacgaactggcgaatggtacgcccacgcgagatacgcgccaggaacaagccgacaaacggcgaccatgccacccaccatgcccagaagaagagcgtccagttattcatccactcaactggacggtcgaaggcaaaactgttgagcgtcatgcccataaagcgattcacatagtcgccaacattcagcaccagcgcattaagcaggaacgaggtgtcgcccataaacaatacgaacaggatcaatcccagcgccagcgcaacgttaagttccgataacacacgaatccccttatcgacaccggaggtgacagagatcgtggcgattatcaccgacaaggcgatcagtgccgcttttgccgccatcgaatcgggaatatcaaacagtacgctcaagccatagttaagctgcaccacaccgataccgagcgtagtggcaataccgaagatggtgccgatcaccgctgcaatatccactgagtgccctatcggcccgttaatccgtttaccgaagatcgggtacagcgccgagcggatggtgagcggcaaattataacgatagctaaagtatccgagcgccatgcccatcagcgcatacatcgaccagccggttaagccgtagtgaaacagcgtccagaccatcgcctgacgcgcggcctcaatcgtctgtcccgcgccttccggcggctgcatatactgcgttaccggttcggctacggagaagaacatcaggtcgataccgatcccggcagcaaacagcatcgccgcccaactcagcaggctgaattccggtttggattgttctggcccgagcttcaccgaaccaaaacgcgaacaagcgatacagaccacaaagacaatatagagcgttgccgccagtagatagtaccaaccgaaggttttagaaacccagtccagcgtgcggccaatccacagggccgagaagtcgcgaaacaggatcgttgtcagggaaaacaacaaaatcagtccggcggaggtgtaaaacaccaccggattgattttgtccttttccctgctgtgtgaaaggtctgtcatccagtatccccactgttattgttaccatttaaaatcaaattcgtaacaattaagacacattttatattgaacgtccaatcaataaccgctttaatagataaacaacgctgatgaatggagtggcgaaaatgcccaaattggggatgcagtcgatccggcgcagacaactgatcgacgccacactggaagcaataaatgaagtgggcatgcacgatgcaacgatcgcgcagatcgcccgccgtgcaggcgtttctacggggatcatcagccactatttcagggacaaaaatggtctgctggaagcaaccatgcgcgatatcaccagtcagctgcgtgacgcggttttgaatcgattacatgcacttccgcagggcagtgcagagcagcgattacaggcgattgttggcggaaacttcgatgaaacgcaggtgagcagtgcggcgatgaaagcctggctggcgttctgggccagcagtatgcatcagccgatgctctatcgtttacagcaggtcagtagccgccgcttattgtcgaatctggtgagcgaatttcgccgcgagttaccgcgcgaacaggcacaggaagcgggctacggccttgccgcgctgattgacggattatggctgcgcgcggcactgagcggcaaaccgctggataaacctctcgcacactcgctgacccgtcactttattactcagcatttacccaccgattaaccgaggagacgtgatgtcccgaatggcagaacagcagctttatatacatggtggttatacctccgccaccagcggtcgcaccttcgagaccattaacccggccaacggtaacgtgctggcgaccgtgcaggacgccgggcgcgaggatgtcgatcgcgcagtgaagagtgcccaacaggggcaaaaaatctgggcggcgatgaccgcgatggagcgctcgcgcattctgcgtcgggccgtcgatattctgcgtgaacgcaatgacgaactcgcaaaacttgaaaccctcgacaccggaaaagcatattcggaaacctcaaccgtcgatatcgttaccggtgcggacgtgctggagtactacgccgggctgatcccggcgctggaaggcagccagatcccgttgcgtgagacgtcatttgtttatacccgccgcgaaccgctgggtgtggtggcggggattggcgcatggaactacccgatccagattgccctgtggaaatccgccccggcgctggcggcaggcaacgcaatgattttcaaaccgagcgaagtcaccccgcttaccgcgttaaagctggctgaaatttacagcgaagcgggcctgccggacggcgtatttaacgtgttgccgggggtgggcgcggagaccgggcaatatctgaccgagcatccgggcattgccaaagtgtcatttaccggcggtgtcgccagcggcaaaaaagtgatggctaactcggcggcctcttccctgaaagaagtgaccatggaactgggcggtaaatcaccgctgatcgttttcgacgatgcggatctcgatctcgccgccgatatcgccatgatggcgaacttcttcagctccggtcaggtgtgtaccaacggcacccgcgtcttcgttccggcgaaatgcaaagccgcatttgagcagaaaattctggcgcgcgttgagcgcattcgcgcgggcgacgttttcgatccgcaaactaacttcggcccgctggtcagcttcccgcatcgcgataacgtgctgcgctatatcgccaaaggcaaagaggaaggcgcgcgcgtactgtgcggcggcgatgtactgaaaggcgatggcttcgataacggcgcatgggttgcaccgaccgtgttcaccgattgccgcgacgaaatgaccatcgtgcgcgaagagatcttcggtccggtgatgtcgcttctcacttatgaatctgaggacgaagtgattcgccgcgccaatgataccgactacggcctggcggcgggcatcgtgacggcggacctgaaccgcgcgcatcgcgtcattcatcagctggaagcgggtatttgctggatcaacacctggggcgaatccccggcagagatgcccgttggcggctacaaacactccggcattggtcgcgagaacggcgtgatgacgctccagagttacacccaggtgaagtccatccaggttgagatggctaaattccagtccatattctaaccaggaggtttatttgcaatttgactacatcattattggtgccggctcagccggcaacgttctcgctacccgtctgactgaagatccgaatacctccgtgctgctgcttgaagcgggcggcccggactatcgctttgacttccgcacccagatgcccgcagcgctggcgttcccactacagggcaaacgctacaactgggcctatgaaacagagcctgaaccgtttatgaataaccgccgcatggagtgcggacgcggtaaaggcctgggtggatcgtcgctgatcaacggcatgtgctacatccgtggcaatgcgctggatctcgataactgggcgcaagaacccggtctggagaactggagttatctcgactgcctgccctactaccgcaaggccgagactcgcgatgtgggcgagaacgactaccacggtggcgatggcccggtgagcgtcaccacctccaaacccggcgtcaatccgctgtttgaagcgatgattgaagcgggcgtgcaggcaggctacccgcgcacggacgatctcaacggctatcagcaggaaggttttggcccgatggatcgcaccgtcacgccgcagggccgtcgcgccagtaccgcgcgcggttatctcgatcaggccaaatcgcgccctaacctgaccattcgtactcacgctatgaccgatcacatcatttttgacggcaaacgcgcggtgggcgtcgaatggctggaaggcgacagcaccatcccaacccgcgcaacggccaacaaagaagtgctgttatgtgcaggcgcgattgcctcaccgcagatcctgcaacgctccggcgtcggcaacgctgaactgctggcggagtttgatattccgctggtgcatgaattacccggcgtcggcgaaaatcttcaggatcatctggagatgtatctgcaatatgagtgcaaagaaccggtttccctctaccctgccctgcagtggtggaaccaaccgaaaatcggtgcggagtggctgtttggcggcactggcgttggtgccagcaaccactttgaagcaggtggatttattcgcagccgtgaggaatttgcgtggccgaatattcagtaccatttcctgccagtagcgattaactataacggctcgaatgcagtgaaagagcacggtttccagtgccacgtcggctcaatgcgctcgccaagccgtgggcatgtgcggattaaatcccgcgacccgcaccagcatccggcgattctgtttaactacatgtcgcacgagcaggactggcaggagttccgcgacgcaattcgcatcacccgcgagatcatgcatcaacccgcgctggatcagtatcgtggccgcgaaatcagccccggcacggaatgtcagacggatgaacagctcgatgagttcgtgcgtaaccacgccgaaaccgccttccatccgtgcggtacctgcaaaatgggttacgacgagatgtccgtggttgacggcgaaggccgcgtacacgggttagaaggcctgcgtgtggtggatgcgtcgattatgccgcagattatcaccgggaatttgaacgccacgacaattatgattggcgagaaaatagcggatatgattcgtggacaggaagcgctgccgaggagcacggcgggatattttgtggcaaatgggatgccggtgagagcgaaaaaatgagtcgtgatgtgaactaacgcaggaaccgatcagattgagagttaccgttccagagagggggaccgaatccttatataaacactgaggtaactctcatgcatcatatccagtattcatgatgctggctttttgctgatatttaacccgaacattcctgatacagactattaatacaaccttatctgcgacagattttattttctggatatattatgcgtgaacaaatcaaacaggatatcgatctgattgagattttattttatctgaagaaaaaggttcgtgttatcctttttattatagctatctgtatggcaatgatgctgttgtttctgtatatcaataaagataatataaaagtgagttacagcctaaaaataaaccagacaacaccaggcatacttgttaactgtgatagcaataataactttgcctgtcagaccgcaatgactgaagatgttatacagcgaattactacattttttcacaccagcccagatgtcaagaacagagaaataaagctggaatggtcatgagataagagagatttaccaactgctgaagcggaaatatctcgcgtgcaggcgtctattatcaaatggtatgcgtcagaataccataatggcaggcaagttctcgatgagatacaaataccttcagcaattaacagtgagctttatacaaaaatgatatacctgaccaggaactggtcattgtatccgaacggtgatggctgtgtaactataagctcaccagaaataaaaaataaataccctgctgccatttgcctggctctgggattttttctaagcattgtaatttctgtaatgttttgccttgtcaaaaaaatggtagatgaataccaacaaaactctgggcagtaatacacagcattctgatagagagtgcctgtataaagctgaagtgacaatgaccgggaagggaacccgttttcaggaatggatgcctgtctttttcactgtaaatatcctggcattactaatgccaggatatttacagaagagcagcataaccatgacggaacggggttaagtcaggttgtccttaacgctattttcaacctcgtatgccttcttcaggtttatgttcagatctcatatctctctcagcaatcctcaataatcagatacaccgctttcaccgggccatgaaccccgacgactttgataagctcaatatccgccgttgaactagggccgctaatgatgttaatgcaggacggcattcgttcaccggcctgcgctttctgatgcaatttttctgcgagttgcgctacacgcggcaggattgtgcttttacgcaggataaaaagagaagattccgggagcaggctcaatgaacgcccgcgcccggcggcggaaaaaagaaccacgcctcccgattcggttaaaccatattcagcatacacgacacccactttagcctgctcggcctgcgagatattctcggcacctttcgccggatcccaaacaacggcattgcattcctgctgcaaacgttcactaatccccaattcctccagcctcgtgtcaccgctaatcacgaccgactgatctcccagctctttacacagacgtattgcagcttctgccgccttcgcctcgctggtcagctcacagcgcgtcaacataacatcgctggcaaactgaataaacgcgtcacagcgctgctgttggttaagttgggtaagccgctcgttagcatagttgttaagcggcgcatcttctgcttgcggttcaagtcgcagcgggcgacccagtgcctgagcaacgttattcaaaaattcgcctcgattatccattctttttctcctgcgcctgatgtttcttaaaccaactacggaaactctctccgtcagcttcaggaagatcgcgtgcttccatccagtcgctaatcgcgccaaatttgagtggtgttttgccgccattgataaaccagcttgccgcatgagcgccggccatcatcccgactttccacaatcctggatgactattggcataagcgaacatttttatcgcccgttgctctgcttttgcggtgatccctttttcagccatcacccgacgatgacgcaaaatcagttttgacagcggaatacgcaccggacacacgctgtcacaagcagtgcataaagagcaggcgtagggtaaatctttaaaatctttatagccgccaagtagcggagaaatcaccgcaccaattggccctggataaatagagccatatccatgaccgccaatatggcgatatgccggacaagtattcatacaagccccgcagcgaatacagcgcagcacatcccgaaattcagaggccagcacctcagaacgcccgttatcgacaataaccagatgaaactcttcaggaccatcaacgtgccccgcttcgcgcggtcctgtcagccaggtgttgtatcccgtcaaacgtgcaccaacggcactgcgcgccagcatggtgatcaatacatctacctcggcaaacgtgggggcaatacgctccattcccatcactgcaatatgcgttttaggcagcgtggtacacattcgcgcattaccttcattggtcaccaggcataccgaacctgtctctgccaccgcgaaattacagccggtaatacctatttcagcactgaggaaatcttcgcggattttttgccggatgaataaggtcatcgcttcaggcgtttccggcccctcatagcccagacgttcgtgtagcactcgacggatctgatggcgatctttatgaattgccgggaccacaacatgagatggcggatcttgatccagctggagaatatattcacccagatcggtttcaatcacctgaatgccagcatcctgcaacacatgattgaccccaatctcttcggtcaccatcgatttagatttcaccaccttccgggcatttttgcgttgggcaacctgtaaaatgtagcgggtagcgtcttctttggtttttgcaaaccagacgtgaccgccgttttgcgtcactttttctgagagctggtacagataagcgtcgagattactcagaacatgatcacgtatctgggcggcccgatcgcgccactcctcccagtgccccaattcatcgaccattttttgccgatttgccccaatacgctgctgcgcgtttgccaccgctttgcgcatgatcggatcttcaatttgctgacggatgcgtgtcttaaaatctgtattactggttttgatcgacatctttatatcctcagcggctcatcaacacttcagcaatatgcatcactttgactttctgcccttcccgttgtaatcgcccactgatgttcagcaggcaactcacgtcagcaccaattaaatactcagggcggacttccatcaggtgcacaaccttttctttcaccatctcgccggatatttcggccattttgaccgagaacgtgccgccaaatccgcagcaggtatcctgttcagcaaaggtcaacagctccagtccacgcacatttttcagcagcgtaagtggctcgtccttcactcccagcttacgggccaggctacaagatgggtgatacacagctctcccttgcaaactggcacctacatcgactacccctaatttattaacaataaaagaggtgagatcctgcatacgcgcggcaaccttttcggcacgtgatgcccattcaggttcatccgccagatacgtcgggtaactttttacggcataggtgcaagagccagccggtgaaataatgggatcgtcgttatcctccagtgcggcgatcagatttttcatccctggaatcgcttctttgatataaccgctattgatcgcaggctgaccgcagcatccctgtttctccgggaaatttacgcgacagccgagtttttccagtagcagcacggagtctcgtgccattcttgatttcagggcgtcaccaatacaggtgacaaagaaattgacattcacaactaatactccattacttcatgcccatttatgcccgatgtttcccccccaccgggggatcaatcatcaataaatatggcgttcttttttaattggctagcaacataccacccctcatttgtatgacaaatgataatctttcatccaaacttcaaatgcaataactaattttatttctttcggcatcgctcacattttatggggaaatcgacgttcatttttggcataagaaatccatttaaaaaggctacatcccttatacctattcagagctacttattcaggggttattgagatatacactgatggtgtacaaaaaaatcaccgacaataatcacgtatcaagtaatagtcggggttttatttaattgaagcaatttagtttgcatttttatttaaaaactgagctagagtccatcagaaaaaaatatataaagcccaaaccaccgttggaaatagaaatagttgaaaggctcacaactcccggaatgcggattatctttgccctgatttctggcggttttattcagggtgcaagctgtctgaccctttcccgatattctcccggagtacaaccaaactcgcggacaaacgccttgtgaaaagatgattcactggcatagcctactgactcagcgatcaccacaacagggagcatttcccgggaaaacatctgggccgctatttgtagacgcaactttgttaatacagccagcggcgtggttccggaaacatcacggaaaagctgggcaaaacttgcccgggacatgtgagcgatgctggccagcgattcgacggtccaggcgtgtcctggcatttccagcatttgctgtattaccgcaccaagacgtggatgcagaagcaaactgagaatgtttttctcagtattaacctgtgcaatccactcacgcaccgcgagggtaaagaatgtagcgcagatctggctacacagtgcatccactcccggcatcgccgatctggattcctgttgtaaaaacgggatcgcctccctcagccagttatattccacgctgtggttaaccggtgctaaaaacagcgtttccggcaaagacgttaaaaaataacgcgccgaatgttgcaaccgaagagtgccgcagacaatacaggtcgattcattatcgacatgactcaggcgatgagctgaattttgtggtagcaggaccacatttcccgggcgtaatgtaaaaatctctcccgtcggcatttccagcttcgccgctccttgcgttaacgcatgccaacgaataaccgataattccccggcaccatgtggaagctgccagtcacttcctaacacgcaattcttatcgatcgttccttgtggagcgttaagcatcaacaaacggctaagggcatccatatcagactcctgagtggtttttgattacaaacaccaacaatcttagtaaataactaatctaataccatcaaatggttaatcatgatttttgttttgtgattctgattaagaaaaagaaaataccagacgataagacaaaatatcaagcgttgtgaagaaatggtatttgctcttttgcgtctatagtcatgatgtcaaatgaacgcgtttcgacaggaaatcatcatgaataaatatcaggcagttattattggttttggcaaggctggaaaaacattagccgtcacgctggcaaaagcaggttggcgagtggctctcatcgaacaatcaaatgcaatgtatggcgggacctgtattaatatcggctgcatcccaaccaaaacattggttcatgacgcacagcagcacacagattttgtccgtgccatacagcgtaaaaatgaagtggttaattttttacgtaataagaattttcataatcttgcggatatgcccaatatcgacgtgatcgacggccaggcggagtttatcaataatcatagcctgcgtgttcatcggcctgagggaaatctggaaattcatggcgagaaaatttttattaataccggtgcacaaaccgtggttccgccaattcctggaattaccaccacgcctggtgtatatgacagcaccggattacttaatctaaaagaattgcctgggcatttaggtattttgggcggcggatatattggcgttgagttcgcctctatgttcgctaattttggcagcaaggtaaccattttagaagcagcttcgctgtttttgcctcgggaagatcgggatattgctgataatatcgcgacgattttacgcgatcagggcgtcgatattatcctcaatgcccatgtggagcgaatcagtcaccatgaaaatcaagtgcaagtgcatagcgagcacgcccaactggcggtggatgcactgttaatagcttccggtcgtcaaccggctaccgcttcgttacatccagaaaatgccggtatcgcagtaaacgagcgcggggcaattgtcgttgacaagcaattacataccaccgcagacaatatttgggcgatgggagatgttaccggcgggctgcaatttacttatatttcactggatgattaccgcattgtgcgtgatgagttgctgggagaaggcagacgtagtactgatgatcggaaaaatgtgccttattccgtattcatgacaccgccactgtccagggttggtatgacagaagaacaggccagagagagtggtgctgatattcaggtggtgacattgcctgtagctgcaattccgcgtgccagagtgatgaatgatactcgtggggtattaaaagcgattgttgataataaaacccaacgtatattaggggcatcactgctgtgtgttgactcccacgagatgatcaatatagtgaaaatggtgatggatgccgggctgccttatagcatattacgcgatcagatatttactcatccgtcgatgagcgaatcactcaatgatctattttcattagtcaaataaactcaaaatcagacgccagaacaaatattctggcgtctcagagaaaagaatcttattaattccctgttactctataacttcttaatcacttcattgatggtattttatatgtttaaaaaatctgttttatttgcaacactattatctggcgttatggcattttccaccaatgcagatgataaaataattctgaaacatatcagcgtctcgtcagtatcagcatcaccgacagttctggaggatgccattgctgatatagccagaaaatataatgcttcatcctggaaagtcacatcgatgcgaattgataataattcaaccgcaacagcagtattgtataaataaggatgttcacaatggaaaaatacctgcacctgttaagtcggggagataaaattggcctgacattgattcgtctgagtattgcaattgtttttatgtggattgggttattaaagtttgtcccttacgaggcagacagcattacaccattcgtcgcaaacagtccactaatgtcgttcttttatgaacacccggaagactataaacagtatctgactcacgaaggcgaatacaaaccagaagcaagggcatggcaaacggccaataatacctatggtttttccaacggtcttggcgtcgtggaggtgattattgctctgctggttttggctaatcctgtcaatcgctggttaggtttattgggaggactgatggcatttaccacgccgctggtaacactctcatttttaatcaccaccccggaggcatgggtacccgcattgggtgacgctcatcatggtttcccttatttatccggtgctggtcgcctggtattgaaagatactctgatgctggcaggtgctgtcatgataatggcagattcggcgcgggaaattcttaaacaacgcagtaatgaatccagttcaacgttaaaaactgaatattgataatccgaacactgtctgttgttcactttttcaggcgtcaggccccctttctgatgatgaagcctgacgccatattaccggagatatgacagagtgaagatcaatatcactcccctgttaaaagattcttgtcgtctcaggtaaaatatatgattaatatcaatcgtgtatttttacagcaagacaaccacgaacaaattcaggattaaaatgttttaccgactccccaacataacccaaatcaagcgaactaatttgtgccatttctttctctgtcagtgagaaatcccagatagcaaaattttcttcgatacgctgttgatgtgtcgatttcggaataacgaccactccccgttgaatattccaacgcagaatgacttgagaaatcgatttttgatgggcatctgcaatactctgaagcagattattttcaaagggtttatgtcgtccaccacctaacggagcccatgcttcaggctgcacgttataatacttcatggttgccagcgcctctggttgggcaaaatagggatgcaactcgacctggttgaccatcggtttaactcttaccgtttcacaaaagttcgccagaacatgaggatagaaattggaaaccccaattgcttttaatttgccctcttcataggcatcttcgagtgcacgccacgcactgaaataatcgcgcatagcctggtgcaataaatagaggtcgaagtactctagtcccgatttttttaatgatgcttcaatacctgctgctgccgtatcctgattcaacatatcctgcacccacaatttagacgttataaataactcatctcgggtacataaaccttcagatatagcttcacgaacggcttcaccgacggcatcttcattaccgtataccgctgcagtgtcgatgagtcgataacctgtgcggatagcgttcaacactgactgtttgcacacgtttttatcggtaacctgaaaaacaccaaatcccatcatcggcattttcagattgttacttaatacggaaaattccactgtcagtccctccattaggcatgaacaatgagtctacgttaaaacgtaacctcaaattagtacgtggattttgatatcacttatgcaaaaaattcattaataatgtaggactgaaacctctctatttttggggacaacgaagcagacgctaccagtgcttttgccttcgcccttgctgtttttgatacacttagggcccagggcataacgaaaatgtgcgatatgacaaagaattaacggagaatgtgatgatcaggcagaagattctacagcagctcctggagtggattgagtgcaatcttgagcaccctatttcaatcgaagatatcgcacagaaatctggctacagcagacgcaacatccagcttctgttccgaaatttcatgcatgtgcctttgggagaatacattcgcaaacgaaggctttgccgtgccgctattcttgtccggctcaccgcgaaatctatgcttgatattgcactctctttgcattttgattcacagcagtcattcagccgcgaatttaaaaagttattcggctgctctccccgtgaataccgccaccgtgattattgggatctcgcaaatatcttcccttcttttttaatacgtcaacagcaaaagacggagtgtagattagtcaattttcctgagacacctatttttggcaactcatttaaatatgacattgaagtgtcgaataaatcaccggatgaagaagtcaaactgcgacgtcatcatttagccagatgtatgaataattttaagacggatatctatttcgtctccacgtttgaaccgtcaacaaaatcggtcgatttgctcacagttgaaacttttgccggtacggtatgtaaacaaaccgattctgagatggcgaaagagtggacaataaaccgaggactgtatgcatctttccgctatgaaggtgagtgggagcgctatcctgaatggtcgcgaaacctctatctgatggaattacctgccagggggttagccagagtgaacggcagtgatattgagcgattttattacaatgaagatttcgtagaaaaggatagcaatgatgttgtttgcgaaatttttatccccgttcgtccggtttagctgtcgctatatctaaatgaacttataacgagactactgtcaggcaattcaataaataatggcgttgaatatgtcaacgccattattgtttattagaatgctattttcatattcttaaaaattatttcatcgcctcctcgccctttgccgtatcggcatccaccgcggtaatggtcaccgtcactggcttcatttcgtacccgccataggtcagggcgttaaatgtgaatgtatagacgcctggcttgctggtactaaatgtacgtatgattttcccgctcacgaaatggtcatttttcgacggcaggaactgataatccttctccgtcaccccttccggcgtctgaatgtcgacccacatattcccgccaacggggttatttgccgacatcagggtcaccgccagcttcgcagtcgatttcccatccgccaccagagattgcatatcagatgatgcggtgagtaccgcgtttttatcatccgcaacgaatttagattcggcagttttcgttgatacctgaccgttggtctgactcacttgcgccttgagtgtgtatgtcgccgcaacaatagtggtagcggtgaaaatagcctgcccttgctcattcgttgtcgcagtgccattcggttccaggtttaacgaagccgggctggcagtcagcgtcacttcgctatcgttcaccaaattgttattggcatcagtcaccgtaactttatacgtttgtttggctttgccgtccgccagcgcatagttgccaatcacctcaatattggagatagttgccgtagtcttatccgccacaaacgttacagactgcgcattcgaaggctggtcatttcctgccgacgccgtgatctcataggttccggcagtcactgaaaccacctgcaactctgctttcccctcatcgttggctttcacccagacattatcgcctgtaagcggcttgacaccccggggcagattaaaggtcaccaggctccctggaacagggttaccatttttatcctcaacggtcgccgtcagcgtaaaggcgtctttgccgtttgccactttttgaacggcggtgtctacctgcaggtttgcctgaccggtgctggcatccgcgttaaatttcaccgtgaccgtcttctgagcaccattcaccgaagcggaaatattgtgttctcccgcaaccgttgacataagctcaatgtccactttccctgccgcattggttgttactgtattccccgtcttgctggtcacaccctgcggtaaagtcagcgtaacttcttgcccctgcaacgggttaccatagctgtccacgacggtcagggttatctggttagcagactgtccattagccagttggttattaaccttcactgtcatatcaccaatctcagccttagatgcgtcacctgcaacgttcagcaccagtggctgagcaacggcattttggccgttcactcgcggcatcacagacaactgacccgcggcagatcccagcgttaaggtcgacacgtagaccccattacctttctctgtccagcttcctgctgaaggacgctcactccccgtgctggcggcaccgctaaacactggtgcatctggcttcagcccggtgaccgggttcccgtacgcatccttcacggtgaaggtgagttccgtcgtcgttttgacggtcggagccttattgtccgcaacaagcgtagagttcgctgatgacatctctccggcgatgaccgtcaactgcgcggcttcggtggctgctggctggccgttgaagagcggcatgacacgaagctcgcccgtctttccgcctgtagtcaacgtagcaacataggaaccgtcacctttttcggtccaactggaaacggtcgccccttcagaggcggtccccgtcaaacttgccgacaacgaaagaccactgatagcgttgccatgcgcatctttcgccaccagcgtcacggttgtactttcgccggcttttacgtgatcttctgcgacagagactttcgactggtttgaagataacgcatcagccaccacggttacttttgccgcatttgctgccgcatcctgtccatttagcttcggcataacttctaattcacccgccgtagagccgagagtaatctgcgcagtccacgtcccatcaccattatttgtccagcccgatgccgtagaacctacagcagcggcacccgctaatgacggcgcttccggcgtgaggctggtcacagggttgtcataggcatcttttaccgtccagattgccgtaactgtacccccaaccaccggtttatcaggattcagggtgatggacgaatgtgctgcatcaagcggcccggcaacaaacttcagcgtttgttgtaatgtgcccagctgatactgctcgctgaaagcacgcacaacaacgtttccggcacgggtcgaagaaaccgtagcgctgtaaacgcctggttttatctccgaaattgtaccaatggtgacaccattagtgtcttgcggaacaaatcgcaagcggctggcctctcccgtcaccgggttaccatcagtatccaccgcagtcagcgtcagcgtgtaggcttgctgaccatcagcaaccacgtcacctgacggctcgttagcgctcagggtggagtttgccacatccatcatcgtggcccgcagttctgcagtgacggttttgctcatgccatcaacactaacagtaatcgttgcctcacctgactgcgttccggtagtaaagacagactgatacacccctgcttcagtttcggtgaactcacccagtgttggctttgcctgtgatttagtggccttcagggtacgagtcacaatatttccagccggtttgaaagttagttcagtcttgatctgatctttcatgcccgtgactggctggccctcggcgtcgcgcagagacagcaccagcggtctttgctcattaccgttagcaagcatttgaatacggctctgaccgtcaagcgttaacgccgtgcgatcggcactcatacctgctccggtaatgaccacctctgtctgcacgcgttttgaggcattgcctttgttatcgtaggcaaccgcagaaatcgcataataattgtctttgcctggacgataagccgggagcgttacttgccactgactaccctgaccggtaattttgccaccttcagccagtaatgacggcgcttcccactgcacatttttcagtccgtgagttgctttgctgaccacaagccccagggaaagtgtctgaccgcccttaccttcaatacgctcaggcagagcaatacggatcacttcagatttgcggtactcaagaacgatgttgttattacgctcaaccaggtcatagcggctgcctgccagcattcgacgctcgcgaatgctgtctgtatcgagttgtttctccagaggttcgccaatccgataattaacttccaggccaaagcgagtgtcattctcaccgctcttgccctgcttatgcccggcgctcagtgtcagaagaggcactggcgtataggtcacctcggcagaaatagcatgcgggtctttctggcgcttatctttaccaaacagcccgacttcatcgccataatactgttcatacatcaggcttgcgccaagctgcggccaggcaggtaaatagccctctgcgcggatatcccaaccattcgccgggcgttcctgataatcctcaatatccggcgattttttccagccagaagcccgaatataaccattggcgctcagtttcagataatcgcgccagtattccgcaccaacaccaatgcgggtatgactacgggataaatcatggtcgataaaggtgttcacccccgccatccagtcatttcctgaaaaatgacgccagccaaaaccaatatttgactgagtacgatcgtcggtacgatgtattgctccctgagtgaacaacatatttgttggcgtatcataaatcggataaagcatttccagcgaagaatccttcagcgagaaatctttatcgacattcagtttgacgcgcgcagtaccatatttcccgagccactcctgtatttcctggttagctttagctgtggccattccggtaataaagttacgtgtcgcatcgctatctggctgactgcttaaaaatgtcccggcatttgcggcaaacgacgcgacatttttctccacgttattatcagcagttaccgtagtatttcccatgctcaaccgtggctgaaccgcatgctgcgcacgtgccgccattactggggtaaaggtgacagcgagtggaaaaagaacctgaacagagatatttgcccacgccacgcagcgggccagaactgaataacgaaatcgtggttgtttatgacctgttttataacgcgacattgagataatttcctgatgaacgaattaacgaacataggcagacacaaataatggcgtctgcttgtcagaaaaaccggggatttcccgatttccttttccgcagaaaaggaaatacctttatgtaagaaagtgcaccgccacctaatatatccagtgtctgtagccactcatcaggtggttgggcgcgggattatatttttatttatgggtgaaaatttagctttttgtgcaagtcattaaatagacacctaagttatattttttactctgcggacagtgaataattcattattcagagtgaataataatggcctgcctttaattaacaactattggaaatacgtcgaagtaggtatatacgccagaataaatcgatatattttttatggatattcattttccttcatcggactgtaaattgcggagatttcgaacttgcactacccatcgcaacactcaaacagatttatgaatttcgttcataacccctgacaaatcctgccgtctaatcgagcttttccctttacgttatgcttctcatgaacgagaacacaacttattcatgaattaaccattccggataaactatggaatcaaattcaggcatcgaaaggaactggctggtttccgttaatagattaaatatctattactctcccgagagtaaaactatcaaatcaatgagtaaccgatacagcctcacaaattctttcagataattaacccgtcactgcggcacgttctctcgtaaggcgtgcctgcagtgtaatccagtatgtatccggcatagttgacggtttaatagaactcaattcctctcccaggtcaccaacaacgatatcttgtataacaccccaggagatacgacattatgatgagatgcgatatgctcctcagcgccaatcaacgcccggactgggccagtcttgagatcagactcattcccggaactgacttcaggcgacatatatcaatgacgttggtgcaataaaagatagccgatgtaatacatctattcaaatttgtgatacatgtcaaaaaattggttgaccaaactcgttatttatataagggcacttacgaagtgcgctcttttttaaagcgaggaagtaccaatgaaagagaataaagtacaacaaatcagtcataaactgattaatatcgttgtttttgtcgcaattgtagaatacgcctatttatttctccatttctattaataacggcaataaactgttcacttcagtgatatttaaaatatgcatcctctccctttttgtaagtaattattatatccgtgggagaggaatacacgctgtcaggtaatcaatcatactgcgataaatcatcggccagtaaagtggagataacctccattgtcgaaaaatccatactctcagcaaaaccatcatcaatcactcatccaggcgtttatgggagcgtcaccaatggctgctaacaatgccagagttccccgttgcgaaaattccacatccacaaagagtcacagggattgggtgttgaaatgatcaggatgagcatgtatctttatggttatgttataacataacaggtaaaaatgatgaagcccaatatccatcctgagtatcgtactgtggtgttccacgacaccagtgttgatgagtactttaaaatcggctcgactatcaaaacagaccgtgagattgagctggatggcgtaacgtatccatacgtgacaattgatgtctcttctaaatcgcacccgttctatacagggaagctgagaacagtggcatcagaaggaaatgttgcacgattcacccaacgttttggtcgttttgttagcacgaaaaaggggtcgtgatgaaagttcttaactctctgcgtaccgcaaaagaacgccatccagactgtcagattgtgaagcgaaaaggacggctatatgtgatttgtaaatctaatccacgttttaaggccgttcagggtcgtaagaaaaaacgttgattcaaaattcgacggattaacgatatttgtctgattaataatcagatcggattaatgttggtgtgtttataacaccaacattaattttcctggggatatattcctcctgttcatttgaggccaactgcctgacgtttctctccgaatattccattatcttaatgttgacttgttgaccagcttcgcccctgtatgctggcatcaactctcttttagactgaacacgccactcagtctcctccctttgcggcgcagcctgcattttcactcaaactgttaagatgataaatgtggtaaatctgttggtactaacataaaaacgtttacgccacaggaacagtctgatccaccggtaaccccgtcgccgacgttcgagtgccagttagagtaacgcgcacagataactgcactcagtgccctgacaaagaggccatcgttcctgtgacagctggcagtgttcttgcccccttatttccagacaggggttgtatcttaagttaacattacccgctgacgtcgatattctcgcggagagcgataacccaacgcactatgcggatggttttcattgtaatgctcgatcgccactgcaaggttatgcaatgccgttctt

SEQ ID NO: 19 - DNA, 187437 bp, Escherichia coli
  source 1..187437: mol_type = genomic DNA
tcgggccgtcagtcgcagcaactaccaggatcgcgccgtccatctgagcagcaccggtgatcatgtttttaacatagtcggcgtgccccgggcagtctacgtgtgcgtagtgacgggtcggggtgtcatattcaacgtgagaagtgttgatggtgataccacgagctttttcttccggcgcgttatcgatctggtcgaatgcacgagcagcaccgccgtaggttttagccagtacggtggtgattgcagcggtcagagtagttttaccgtggtcaacgtggccgatagtaccaacgttaacgtgcggttttgtacgttcaaatttttctttagacacggctatattccttactatagtgctctccccttcaggagagagcacgggactttggtattaacccttaggcttatttaccacgggcttcaattacggcctgagcaacgttactcggcgcttcatcatacttcaggaattccatagtgtatgatgcacgacctttggtcagagaacgcagctgagttgcgtatccgaacatttcagacagcggtacttcagcgtggatcttaacgccagtaacttcagattcctgacctttgagcataccacgacgacggctcaagtcaccgataacgtcaccggtgttctcttccggagtttctacttcaaccttcatgatcggctcaagcagaactggtttcgctttcttaaagccttctttaaaggcgatagaagcagccagtttaaacgccagttcagaggagtcaacgtcatggtaagaaccgaagtgcagacgaatacccatgtctactaccgggtagcctgccagcggacctgctttcagctgttcctggatacctttatcaacggccgggatgtattcgccagggattacaccacctttaatgtcgttgatgaactcgtagcctttcgggtttgaacccggctccagcgggtacatgtcgataacaacatgaccatactgaccacgaccaccagactgtttcgcgtgtttaccttcaacatcggtaactttctggcggatagtttcacggtaagcaacctgcggtttacctacgttcgcttcaacgttgaattcacgcttcatacggtcaacgatgatgtcgaggtgcagttcgcccatacccgcgataatggtctggttagattcttcgtcagtccatacacggaaagacgggtcttctttagccagacggcccagagccagacccattttttcctggtcagctttggttttcggttcaactgcgatggagattaccggctcagggaattccatacgttccagaatgatcggcgcatccgggtcacacagggtgtcaccagtggttacgtctttcagaccgatagcagcagcgatgtcgcccgcgcgaacttctttgatctcttcacgtttgttagcgtgcatctgaacgatacgaccgaaacgctcacgtgcagctttcacggagttcagtacggtatcaccagagttaaccacaccggagtaaacacggaagaaggtcaggttaccaacaaacgggtcggtagcgattttgaacgccagtgcagagaacggctcgtcatcacttgcgtgacgctcagccggagtgtctttaccgtcgtccaggataccgttgatcgcaggtacgtcaaccggggatggcaggtaatcaattaccgcatccagcatcgcctgaacacctttgttcttgaacgcagaaccacaggttaccaggatgatttcgttgttcagaacgcgctgacgcagagcacctttgatttctgcttcagtcagttcttcaccacccaggtatttttccatcagctcttcagaagcttcagctgcggattcgatcaggttctggtgccattcgttagccagttcaaccatgtctgccgggatatcttcgtattcgaaggttacgccctggtcagcgtcgttccagttgatagctttcattttcaccaggtcaacaacaccggtgaaatgttcttcagcaccaatcgccagctgcagcggaaccgggttcgcgcccagacgggttttgatctggttaacaactttcaggaagttcgcacccatgcggtccattttgttaacgaacgcaatgcgcggaactttatatttgtttgcctgacgccatacggtttcagactgcggctgaacaccaccaactgcgcagtaaaccattaccgcaccatcgagaacacgcatggaacgttctacttcgattgtgaagtcaacgtgccccggggtgtcgatgatgttgatgcgatgcggctcatactgcttagccataccagaccagaatgcagtagtcgcagcggaagtgatggtaataccacgttcctgctcctgctccatccagtccatggttgcagcgccgtcatgaacttcaccgattttatggtttacaccggtgtagaacagaatacgttcggtagtagtggttttaccggcgtcgatgtgcgcactgataccgatattacggtagcgtgcgatgggtgttgtacgagccatttgtttcctcgtttatcttttaggcgttcaatttaagtagcccaaagcgggctgcttactggaagcgcccgcctggtgactaaaactccgaagggattaccaacggtagtgtgcgaacgccttgttggcttcggccatacggtgaacgtcttcacgtttcttaactgcagtacctttgttttctgcagcatcagaaagttcgttcgccaggcgcagagccatggatttatcaccgcgtttacgagcagcttcaacgatccaacgcattgccagagcattacgacgaaccggacggacttcaactggtacctgataagtagaaccaccaacgcggcgagacttaacttctacagtcgggcgcacgttttcgagagctacttcgaatgcttccagttcagatttaccagagcgctgagccagggtctccagcgcgctgtatacgatagattcagcagtagattttttaccatctaccatcaggatatttacaaatttagccagcagttctgatccgaacttcggatccggcagaattttacgctgaccaatgacgcgacgacgtggcatggaaatactccgttgttaattcaggattgtccaaaactctacgagtttagtttgacatttaagttaaaacgtttggccttacttaacggagaaccattaagccttaggacgcttcacgccatacttggaacgagcctgcttacggtctttaacgccggagcagtcaagcgcaccacgtacggtgtggtaacgaacacccgggaggtctttaacacgaccgccacggatcaggatcacggagtgctcctgcaggttgtgaccttcaccaccgatgtaggaagtcacttcgaaaccgttagtcagacgaacacggcatactttacgcagcgcggagttcggttttttaggagtggtagtatatacacgagtacatacgccacgtttttgcgggcatgcttccagcgcaggcacgttgcttttcgcaactttgcgagcacgtggtttgcgtaccagctggttaactgttgccattaaatagctcctggttttagcttttgcttcgtaaacacgtaataaaacgtcctcacacaatatgaggacgccgaattttagggcgatgccgaaaaggtgtcaagaaatatacaacgatcccgccatcaccaggccatctggctggagtgcttaaccgtaagtctgacgaaatcagtatagtcaatgggaatgatgtcgttcgaaatttgaccagtcaaaccgcgggcaataaggtcttcgttcagggcatagaccttaatgggggcattacgcagactttcaaggtagcggttaccgtcaactgcggcagttacgccatcttgcaataatagcagttcgtctccttcactgagcagacgcagcagcgcagcaaaatccgtcagccagggtgaacgatgtaacgtgtgcagcataaacgcctcaaaacctcaaaataacatcgtagttggcgagttcgcggcgtaaggcatctgcttcgagcggcgtggcttcgacaacaaagggtgtctgcggatctaacccgcgttcgcgcagtgaagccgcacaaacccagcactgttcaatgtcgtacagacccaacaatttaaaagtggcaatgtaatcacgcgccagcactgcatcgggcttttgtcctgacagcagctgaaaaacgccatcagcaataaagaagacggccagatcgtcagttaatgcggaagttgccagtaaagcatctaaaccttcccgaccagcagctgtaccatgaggtgcagtagaaaaaacaaacgcaattcgtttcatcagaactgtaccaccctgtcacaggtcagcgaggcttccgccagcgcgccaagtccgcttaaggtaaatcccggctgaaggtttgacgaagccagccccagccttcctgcttcagtttcatcgacgataccgcggcgtaacgctgccgctacgcagatattcagcgccacaccatgttgcgcattcaactgttgccagccgcgcacaaggtcaaattcgtcacttgccggtgaggtcaattggttagcgttatagaccccttcccgatagaaaaagacgctgcttaactcatggccttctactatcagcgcctgcgcaaactgaaaagcactactcgcctgttgcgtaccgtatgctggcccggtcaccacgatggcaaaacgcattacttatcttgcccctggaaatcaccgcttttgaactggcggatgtagagatagacagtgtgtttggagatgttcaggcggtcagcaacctggttgatcgcgtctttaatatcgaagatccctttctcgtagagattcagcacgatctgacgatttttggcgttattagaaacattgcgatcggcattcacttcttcgatggtgaactccagcgtttgggtaaccagatcttcaacagaagaggcaaagttgacgcttgaaccgacatccggggtttctggcggcacaaaagtgctcataatctgcgagaagggaacatcaagattcatattgatgcacagcagaccaattacacgctgttcgcggttacgaatcgcgatagtcagggacttcattaatacgccgcttttggcgcgagtaaagtagcatttagaaacgctgctatccgctcccgtcatatcgtgcagcatacgtagcgccaggtcagtaattggcgaaccaatcttccggcctgtatgttcaccgttagcaatgcgaatggctgaacattttagatcctgcaaagagtgcaaaacgatttcacagtgggagccaataagcatcgctaacccgtccaccaccgcttcgtaggatttcagaatatcaaaatcggtctggtcgaaaggacgttgatccagtaaatccaactcactggtttcgttggttaaaagcgacctggacatgaaaaaaaacactccttttcaggagcctgtcgttaacttttcagggcaggctcattaatgatgcgggtaactaaattaatacagcggaggttccgctttccagcactaattatatccggcctgtaataaaaaaaccgccgcctggtcaggcggcggttcttaatgcttattttttagcagaatctgcggctttcgcatcagcttccggctttgcatcagccttcggcgctggtttcacgtccaacagctctacgtcaaacaccagggtagaattcggtgggatccccggaacacccgctttgccgtaagccagttctggtggaataaccagtttgatcttaccgcctttcttgatgttcttcagaccttctgtccaacccgggataacaccgtccagacggaaagagagcggttcaccacgagtgtaagagttgtcgaactctttaccgtcgatcagagtacctttgtagttcacgacaacagtatcgctgtctttcggtgcttcgcctttaccggcttctactacctgataaaccagaccagttgaagaggttttcacacctttctctttggcaaatttctcgcggtactctttaccttttgcttcgttatcagccgcgtctttttccatcttcgcctgagcagaagacttcacgcgagcttcgaatgcttgcagagtctgttcgatctcttggtcggagagtttgctcttatcagcaaatgcatcctgaacaccagcgatcagctgatctttatccagtttgatgcccagtttttcttgttcttttagagagttttccatgtaacgacccagcgaggcacccagtgcataagctgacttctgatcgtcatttttgaacgctgctttgctgtcagcagttgtagcaggttttgcagcttcagcagcaaaagtgattggtgcatgcagggcaacggccattgtggtcgccagcagcgttactttaaacagtgatttcatccatatctccaggatcggggcatctcaccccagggttaactattatcagaagggtactataaagcgttgtcgaacaaatctacatacagacacgccctattatcatctattttcagactctttttgtttaaattagtttcgatgaccgcgaaatgagtgctgtctcgggcagcaaagttaagtagaatccgcggcaaccattcgacaaaagaggtgaatcatgcaggatttatcattggaagcacgcctggcagagctggagagccgactggcttttcaggaaatcaccattgaagaactgaacgtcacggtgaccgctcatgaaatggagatggcgaaactgcgcgatcatctgcgtctgctgactgagaagttaaaagccagccagccgtcgaacatcgcgtcgcaggctgaagaaacgccaccgccgcattattgaggcgaaaaaaaagcggggaatccccgcttttttgtcaccttttcggtattagtggcaaccacaaccgccgttgcctttaccgccacagcagccttcgccaccgtgttcatgaccgtgatcgtggccatgaccgccgcagcaaccgtcgtggtcgtgatcgtggtggtgatcgtgcgcgccgtgaacgtggccatgagccagttcttcttcggtcgcttcgcgaatcgccacaacttcaacgttgaatttcaggttctgaccggccagcatgtggttaccatcaaccacgacgtgatcgtcttcaaccgcagtgatttcaaccggtaccggaccctggtcagtttcagccaggaaacgcatacctacctgcagttcatcaacgcccataaatacgtctttaggaacacgttgcaccaggttttcgtcgtactgaccgtaagcgtcgttcgcgccaacagcgacatcaaatttgtcgccaacttcatgaccttccagcgccgtttccaggccagagatcagggaaccgtgaccatgcaggtagtccagcggcgcactcaccggagactcatcaaccaacacaccgtcttctgtacgtacctgataggccaggctgaccaccaggtcttttgctactttcatgatatctcctgagcatgggaagaatagtggcgcagattgtagcggaattctgcagccgtgtactcactagcttaaaaaaactcggcgcatatcgctagtccggatgaaaaatcccgatcacttgctcatctttgcgaacgtgatcgcgggcttctttgtctgcttctcgcatctggtgtccgcacttaacgcattcaacaatatcaatattattttcgcgccacatcgccattgaatcctgcgcctgacaggccgggcattttgcgcccgcaataaaacgttttcggattgccatctttaccctctactcaaattcatcccagccgtccagctggcgtcgttcttgttgcatttcacgttggaaaatctcttccagttcgcgtcgggcttccctggcgcgagaaatttgtacggtatcagcatgcatcgggattaactcccgcagcattcgcatatccaggcggcgaaaatgcagttgcgcccgctgtgcctgatgcggatgcatgccaagcgtgaccagcgtcttgcgccccagctctaacgcactggagaatgtttcacgggaaaactgcgtcacccctgcctgtaataactcatgcgcttccacacgtccgcgcgctcgcgcaagaatatgcaaatgcggaaagtgctgctggcatatttccaccagcttcatggtgtcttccggctcgttacaggtaatgacgatagactcagcggcctctgcacccgcagaacgtaaaagatcgacctgcgtggcgtcgccgtaataaactttgtagccatatttacgcatcaggttaacggcgctgatatcccgctccagcacggtaatgcgcattttatttgccatcagcaaacgaccaatcacctgaccaaaacgcccgaagcccacgacaatgacctggggtttatcatcgttgacccacggtttttcgtcttcttcttccggtccgttaaactggcgggatagccatttatccaccagcttcatcagcagcggcgtggtcatcatggaaagcgtcaccgtcaccagcaacagcgccatctggtcgccctggaataagcgttgtgaagaagcggtagaaaagaggacaaaggcaaactcaccgccctgactcaacacgccagcaaactgcatccgctctgagctacgcacgccatacaatcgcgccagcagatacaacacgagaattttcaccgccaccagcacaaccacgcttatcactacccacaacagatgggtataaagcaccccgaggttgagcgacatgccgacagagataaagaacaaaccgagcagcaagcctttgaagggatcgatagccgtttccagttcatggcgatattcactttccgccagcagcacgcccgcaataaacgtaccgagcgccatcgacagccccagcgcgtccataaacaatgcggaacccaacaccaacagcagcgtcgcggcggtgaacacttcccgcacgccagaagctgcaataaaacggaataccggacgcagtaaatagcgcccgccaatcagcatgccgacaaacgccagcaccttcatgccgatcttcatccagtcgaaatgttcgtctgccgaacccgccaacaacggcactaacgccagtgccgggatcaccgccagatcctgaaacagcagaaccgaaaacccgagctgcccggattcgctgcgattcatccctttctcacgcatcaattgcaacgccattgcagttgaagacatcgcaaggccaatgccaccgacaaccgccgcctgccaggcgaaatccgtcagcatcaataatcccgccagcaacgccgcgcttaacagcacctgtgccgcgcctacgccaaaaatcgaacgccgcagttgccaaagtttggagggattcaactcaagaccgatgataaacatcaggaataccacgccgagttccgaaaagtggaggatctcatcgacgtcgctaataaaccccagcccccatgggccaattgcaatccctgccagcaaatatcccaacacagcgccaatacccagccgcgatgccagcggcaccgcagccaccgccgcgaagagaaacagcactcctgcgagtaaaaaatcggaaccttccatcagcggcctcctggagacagcggatttgccagccagtcaccgtaggctctggcgtgactcgccagctcctgtgcgctttgccgtctcgcccagtaaataatgatgggacttaaccaatgcatccggcacatgcccgccgccagttcaaagggacgcagaacatcgctcatcgggtagcgattcaatgcgtcataacggtaagcactttccggctcgccggtggtaatcacgctacgccagtactttcccgccagttggtttcctcccggcccgctggcaaaaccacgacttaatacccggtccagccactctttcagtagcgccgggcagctataggtataaagaggatgctgaaagacaatcacctcgtgctcgcgcagtaatgcctgctcacgggggatatcaataaaaaaatcgggatagtgcgcataaaggtcgtgcacggtaacattgctgagctgcgtggccggtttaagcagtacccggtttgccaccgagtcctgagattccggatgggcatacagcagcaaaactttcgctggctgagacatcatccccctcccggtatggtttttgtgtatagtcgctgttttgggctaccattgcgcccggtgcggcagctcgcccatacattacattatcataatgataagttaacatagtctgaacatacggcaccttatgattgttttctcctcgttacaaattcgtcgcggcgtgcgcgtcctgctggataatgccaccgccaccatcaaccctgggcagaaagtcggcctggtgggtaaaaacggctgtggtaaatctaccctgctggcattgctgaaaaatgaaatcagcgccgacggcggcagctacacctttccgggaagctggcaactggcgtgggtgaatcaggaaacgccggcgttaccgcaagcggcgctggaatatgtcattgacggcgaccgtgaatatcgtcaactagaagcgcagctacacgacgccaacgaacgtaacgacgggcacgccattgcgaccattcatggcaagctggatgctattgacgcatggagtattcgctcccgtgccgccagcctgctgcacggcctcggtttcagcaatgaacaactggagcgcccggtaagtgatttctccggtggctggcgtatgcgtcttaaccttgcccaggcgctgatttgccgttcagacttgctgctgctcgacgaaccgactaaccacctcgatctcgatgccgttatctggctggaaaaatggttgaagagctatcagggcacgctgatcctgatctctcacgaccgcgacttcctcgatccgatcgttgataaaattattcatatcgaacaacaaagcatgttcgagtacaccggcaactacagttcgtttgaagtacagcgcgccacccgtctggcgcagcaacaagcgatgtatgaaagccagcaggaacgcgtagcgcatctgcaaagttatatcgaccgtttccgtgccaaagccaccaaagcgaagcaggcccagagccgcattaagatgctcgagcgtatggagctgattgcccccgcgcacgtcgacaacccgttccgctttagcttccgcgcgccggaaagcctgccaaatccgttactgaagatggaaaaagtcagcgcgggctatggcgatcgcattattctcgactcgattaaactgaacctggtgcccggctcgcgcattggtctgttaggccgcaacggcgcgggtaaatcgacattaatcaaactgttagccggtgaacttgcgccagtcagcggtgaaattggtctggcgaaagggatcaagctcggctacttcgcccagcatcaacttgaatacctgcgcgccgacgaatcacctattcaacatctggcacgtttagcgccgcaggagctggaacaaaaactgcgtgactacctcggcggctttggtttccagggcgataaagtaaccgaagaaacgcgccgcttctcaggtggggaaaaagcccgcctggtgctggcattaattgtctggcagcgtccgaatctgctgctgctcgacgaaccgactaaccaccttgacctcgacatgcgtcaggcactcaccgaagcattaatcgagttcgaaggcgcgctggttgtcgtctcgcacgaccgtcatttgctgcgttccaccactgacgacctctacctggttcacgatcgtaaagtcgaaccgttcgacggcgatctggaagattatcaacagtggttgagcgacgtacaaaagcaggaaaaccagaccgacgacgcgccaaaagagaatgcgaacagcgcccaggcacgtaaagatcagaagcgtcgggaagcggagctgcgtgcgcaaacccagccactgcgtaaagagattgcccgtctggaaaaagagatggagaagctgaacgcgcaactggcgcaggcggaagagaaactcggcgacagcgaactgtatgaccagagccgtaaagcggagttgaccgcctgcctgcaacagcaagccagcgccaaatccggcctggaagagtgcgaaatggcgtggctggaagcccaggagcagcttgagcagatgctgctggaaggccaaagcaactgatggcgcagataacgacgaccgatgccaatgaatttagcagcagtgctgaattcacccctatgcgcggctttagcaattgtcatctacaaactatgctgccacgtttgtttcgtcgtcaggtgaaattcaccccgtactggcagcggctggagttgcccgacggcgattttgtcgatctcgcgtggagtgaagaccccgcacaggcgaaacataaaccgcgtttagtggtgtttcacgggctggaaggcagtctcaatagcccttacgcccacggtctggttgaggcggcgcaaaagcgcggctggctgggcgtggtgatgcattttcgcggatgcagcggtgaaccaaaccgtatgcaccgcatttaccattcgggcgaaaccgaagacgccagttggtttttacgctggctgcaacgcgaatttggtcatgcgccaacggctgccgtcggctattcgctcggcggtaatatgctggcctgtttgctggcaaaggaaggcaatgatctcccggttgatgcggcggtgattgtctctgcgccgtttatgctggaagcctgtagctatcatatggaaaagggcttttcccgcgtttatcagcgttacttgctgaacctgttaaaagccaatgccgcgcgcaagctggcagcctaccccggaacgctgccgattaatctcgcgcagttaaaatcggtacgtcgcatccgtgaatttgacgatctcatcaccgccagaattcacggctacgccgacgctatcgactattatcgtcagtgtagcgccatgccgatgctgaaccggatcgccaaaccgacgctgattattcacgccaaagacgatccgtttatggatcatcaggtgatcccgaaaccggaaagtctccccccgcaggtggagtatcaactgactgaacatggcggtcatgttggctttattggcggtacattacttcatccgcaaatgtggctggagtcacgcattcctgactggttaacaacgtatctggaggcgaaatcatgttgattccgtggcaagacctctcccccgaaacgctggaaaatttaattgaaagctttgtgttacgtgaaggcaccgattatggtgaacatgagcgtacacttgaacagaaagtcgccgacgtcaaacgccagctacagtgcggagaagcggtgctggtatggtcggagctgcacgaaacggtcaatattatgccgcgcagtcagtttcgcgaataacctgcaaccgtcggcggacgagataataatgatagctaagtcatggagttactatgtctgccaaacatccggtcattgcggtaacaggatccagcggcgcggggaccaccaccaccagcctcgcgtttcgtaaaatattcgcgcagttaaatctgcatgcagctgaggtggaaggcgacagttttcaccgttacacccgcccggaaatggacatggcgatccgcaaagcgcgcgacgccgggcggcatatcagctacttcggccccgaagcgaacgacttcggcctgctggaacaaaccttcattgaatacggtcagagcggcaaagggaaatctcgcaaatatctgcatacctacgatgaagccgtaccgtggaatcaggtaccgggaacattcaccccctggcaacctttaccagaacccactgatgtactgttttatgaaggtttacacggcggcgtagtcacgccacagcataacgttgcgcagcatgtggacttactggtcggcgtggtgcctatcgttaaccttgagtggattcaaaaactgatccgcgacaccagcgagcgcgggcactcacgagaagcagtgatggactcagtagtgcgttcaatggaagactatatcaactacatcacaccgcagttttcccgcacccatcttaacttccagcgcgttcccaccgtcgacacttcaaacccgttcgcggcaaaaggtatcccgtcgctggatgaaagctttgtggtgatccattttcgtaatctggaagggatcgatttcccctggctgctggcgatgttgcaaggctcattcatttcccacatcaatacgttagtggtaccgggcggcaaaatggggctggcaatggaattaattatgctgccgctggtgcaacgattgatggaaggaaagaaaatcgagtaactctgctattacgccggataaaatactatccggcttcacaacgggatagttaaatcacgcggcaaccacttcatacgagtgagtaatattcaccgctttttccagcatcaacgccactgaacaatatttctcagcagagagatcaaccgcacgcgcaaccgctgcgtctttcaggtcgcgaccggtgacgataaaatgcagattaatgtgcgtaaacaggcgtggtgcctcttcgcggcgttcagaggtcaattttacttcacaatcgaccacatcctgacgccctttttgcaggatcgaaaccacatcgatggcactgcaaccacccgccgccatcaacaccatttccatcggacttggtgctttatcgcctgagttgccgtccattaaaatctggtgaccagaggcggattcgcccagaaaagttaacccttcgacccacttcactcgcgcttgcatttttgctactccactgcgtcaattttcctgacagagtacgcgtactaaccaaatcgcgcaacggaaggcgacctgggtcatgctgaagcgagacaccaggagacacaaagcgaaagctatgctaaaacagtcaggatgctacagtaatacattgatgtactgcatgtatgcaaaggacgtcacattaccgtgcagtacagttgatagccccttcccaggtagcgggaagcatatttcggcaatccagagacagcggcgttatctggctctggagaaagcttataacagaggataaccgcgcatggtgcttggcaaaccgcaaacagacccgactctcgaatggttcttgtctcattgccacattcataagtacccatccaagagcacgcttattcaccagggtgaaaaagcggaaacgctgtactacatcgttaaaggctctgtggcagtgctgatcaaagacgaagagggtaaagaaatgatcctctcctatctgaatcagggtgattttattggcgaactgggcctgtttgaagagggccaggaacgtagcgcatgggtacgtgcgaaaaccgcctgtgaagtggctgaaatttcgtacaaaaaatttcgccaattgattcaggtaaacccggacattctgatgcgtctgtctgcacagatggcgcgtcgtctgcaagtcacttcagagaaagtgggcaacctggcgttcctcgacgtgacgggccgcattgcacagactctgctgaacctggcaaaacaaccagatgctatgactcacccggacggtatgcaaatcaaaattacccgtcaggaaatcggtcagattgtcggctgttctcgtgaaaccgtgggacgcattctgaagatgctggaagatcagaacctgatctccgcacacggtaaaaccatcgtcgtttacggcactcgttaatcccgtcggagtggcgcgttacctggtagcgcgccattttgtttcccccgatgtggcgcagactgatttatcaccccgatatcaactatgcacttcgacaaacgctggtgctatgtttgcccgtggccgttgggttaatgcttggcgaattacgattcggtctgctcttctccctcgttcctgcctgttgcaatattgcgggccttgatacgcctcataaacgttttttcaaacgcttaatcattggtgcgtcgctgtttgccacctgtagcttactgacacagctgctactggtaaaagatgttcccctgccctttttgctgaccggattaacgctggtacttggcgtcactgctgagctggggccattgcacgcaaaattgcttcctgcatcgctgctcgccgccatttttaccctcagtctggcgggatacatgccggtctgggaaccattgctcatctatgcgttgggcactctctggtacggattgtttaactggttttggttctggatctggcgcgaacaaccgctgcgcgagtcactaagtctgctgtaccgtgaactggcagattattgtgaagccaaatacagcctgcttacccagcacaccgatcctgaaaaagcgctgccaccgctgctggtgcgccagcaaaaagcggtcgatttaattactcagtgctatcagcaaatgcatatgctttccgcgcaaaacaataccgattacaagcggatgctgcgtattttccaggaggcgctggatttgcaggaacatatttcggtcagtttgcatcagccggaagaggtgcaaaaactggtcgagcgtagccatgcggaagaagttatccgctggaatgcgcaaaccgtcgccgctcgcctgcgcgtgctggctgatgacattctttaccatcgcctgccaacgcgttttacgatggaaaagcaaattggcgcactggaaaaaatcgcccgccagcatccggataatccggttgggcaattctgctactggcatttcagccgcatcgcccgcgtgctgcgcacccaaaaaccgctctatgcccgtgacttactggccgataaacagcggcgaatgccattacttccggcgctgaaaagttatctgtcactaaagtctccggcgctacgcaatgccggacgactcagtgtgatgttaagcgttgccagcctgatgggcaccgcgctgcatctgccgaagtcgtactggatcctgatgacggtattgctggtgacacaaaatggctatggcgcaacccgtctgaggattgtgaatcgctccgtgggaaccgtggtcgggttaatcattgcgggcgtggcgctgcactttaaaattcccgaaggttacaccctgacgttgatgctgattaccaccctcgccagctacctgatattgcgcaaaaactacggctgggcgacggtcggttttactattaccgcagtgtataccctgcaactattgtggttgaacggcgagcaatacatccttccgcgtcttatcgataccattattggttgtttaattgctttcggcggtactgtctggctgtggccgcagtggcagagcgggttattgcgtaaaaacgcccatgacgctttagaagcctatcaggaagcgattcgcttgattcttagcgaggatccgcaacctacgccactggcctggcagcgaatgcgggtaaatcaggcacataacactctgtataactcattgaatcaggcgatgcaggaaccggcgtttaacagccattatctggcagatatgaaactgtgggtaacgcacagccagtttattgttgagcatattaatgccatgaccacgctggcgcgggaacaccgggcattgccacctgaactggcacaagagtatttacagtcttgtgaaatcgccattcagcgttgtcagcagcgactggagtatgacgaaccgggtagttctggcgatgccaatatcatggatgcgccggagatgcagccgcacgaaggcgcggcaggtacgctggagcagcatttacagcgggttattggtcatctgaacaccatgcacaccatttcgtcgatggcatggcgtcagcgaccgcatcacgggatttggctgagtcgcaagttgcgggattcgaaggcgtaatgcaggctaaaccatcggataaggcattcacgccgcatccgacatcttttgcctgatgcttcgtatttacgccccaaccaccttcgccaccgcgtgggcgaaacgttgcatcccttcatcgatatccgcatcttccaccaccagcgacggtgcaaaacgcatcacatccggtccggcattcagcaccattacgccagcccctgcgcccgcatacaggaaatcacgcgcccgacctttgaactgtggcttaagctccgcgccaatcaacagccccataccgcgaatatcgctaaacacatcgtactgctgatcgatcttctgcagatggtcaacaaaacgctggcgtttcgcctgaatgccttccagcacttcaggggtattgatgatatcaaacgccgcgcccgctactgcacaggacagaggattaccgccgtaggtggaaccgtgagaaccaggatgaaatgcagaagcaatttctgccgtggtcagcatggcgctaatcgggaagccgccgcctaacgctttcgcagaggtcagaatatccggcgtcacgccgtagtgcatgtaagcaaacaaatcgccggtccgccccatcccgcactgtacttcatcaaacaccaataatgcctgatgttgatcgcacagctcgcgcaagccctgcaaaaactctggcgtcgctgccgtcacaccgccctcgccctggatcggctcaaccaccaccgcacaggtgtgatcatccatcaccgctttcactgcgtggagatcgttaaaaggaacgtggatgatgtctgccggttttggcccaaagccgtcggaatattttggctgcccgcccaccgagacggtaaacagcgagcgaccatgaaaagcgttatggaaggcaataattttggttttgaacggactatgacgcacacaggcgtaatggcgtgccagtttaaaggcggtttcgttagcttccgtgccggagttcataaacaccacgcgttcggcaaacgtcgcctcaatcagtttgcgcccaagacgcagcgccggttcattggtgaaaacgttactgatatgccacagagtttcgccctgggtttttaacgcgttcaccagcgcaggatggcaatggcccaacgccgtaactgcaatgccacccgcgaaatcgacatactccttgccttgctgatcccagattcggctgccctgaccttttaccggaatgaactctgccggagcataaatcggcaggatcacttcatcgaaagtcgcgcgtgtaattgctgtttgttcaattgccatctcatgatcaccctgttacgcataaataattgtgaaattataatcacaaaatatgcataaaaaatcactaaatggcaatcagaaatcagcgatgcaggaaattagccagcagttgatgtccttgttcgctaagaatactttctggatggaactgcacaccttccagatcccactggcgatggcgaatccccataatctcgcgggtttcgctccaggccgtcacgtcaaagcacgctggtaatgagtcaggttccaccaccagcgaatggtagcgtgtcacggtaagtggatttgccagcccccgaaatacgccctcaccgttatgtgtaatcggcgaggttttgccgtgcatgacctttgcggcgcgcacaactttaccgccaaatgcctgcgccattgcctgatgaccgaggcagacgccaagaatcggcaagcgcccggcatagtggcgaataacgtcaagggagatcccggcttcatctggcgtacaggggccaggtgagatgacaattttttgtggtttaagggcgtcgatatccgccagcgtcaacgcatcgttgcgcttaaccagcacatccgcccccagttcacaaaagtactggtagaggttccaggtaaaagaatcgtagttatctataagcaggatcatggcggctccggtacaaaagaaccgcgctattttactcagattccccggcttcgcttaccactttgctaaatatcatctgcagtgcggtgagatcccccattgccccactctgatttgcctgattccaggcctctttttcgataccctgccagctcagttgatatccggcatgaatcgccagttgctcgaagaagatccgctgtgccagaccacttcccacccggaagggatgcagcacgttgatttcacaatagtaatgcgccagccgctcgacgaacttcgctttctccaggccaaccagataaccttcttcctccagatcctgcatcagggcattgccctctttttcgatataagcaaagtggcagaacggcgtatcaccctgataaatatcaacttcacgcagttgccccgcccagtcgaaaatatcctgatacagctggcgatggatagtgcgcaaatgcggtaaaccgcgcaccagcggaccaagctcaatggtcgcagcacgcagcgccgtcatttcgtaagcggcctgttccagccgctgctgctggtggatgttcagccggttacgcatgatatcaaggccaggataaagatacggatcgcgcccttcgccgaatttatcgctcatagtgcctcctcagctcttcaaggcgcgctaaagcctctgcggcagtaagagtgactaaaggcatctcgacgccttcaagacggcgactggcctggaaattacgattacgctgaagctcccagagacgggacttttgcttatcggtgagtttcttcacttgatgcctccctgaacgtgtccatttgccacaagtataagcggcaaatccgggttacgccgggagagcagaagcgcgggcaagattgcccgcgcgagaaatcattacggcaggactttagcggaaaggataactaccggttttgacggcacattctggtacggaccaacgtcatgagtcggcacctgggaaatcttatcggccacgtccatgcctttcaccactttaccaaataccgcgtaaccgaaatcacgctgaccatggtcaaggaaggcgttatcggcaacgttgataaagaactggctggtggcgctgtctttgtcagcggtacgcgccatcgcgatggtaccacgcgtgttgcgcaggccgttatcggcttcatttttgattggcgggtttggttttttctgctgcatctgctcggtgaaaccgccgccctgaatcataaagccaggaatgacgcggtgaaaggtagtgttgttataaaaaccgctgttcacataatcgacaaagttttgcacagacactggcgctttttgtttatccagctccagttcgatgttaccagctgaggttgtcaacaatacgtgcgggtcccctttcgctgccattgctgcgggagaaagagcagaaagagcgaaaacagcagccatcgccgccagggtcgatttgaacatgagatttccttaacaaacagagcagaaaaaaagcaagtgaagagattctaaatagccttcaagaacaaggccatccctttacctaattttacgtatctgaaatatatgtaacctgacgatcactttttattccgtgatcaaaatcacctcttaaaatgcaatttagcaaccgattgcaataaaacatttaaacagatcacaaaatcacctaaaatcgcccgctcgcggcatatcccgctatgccattttatttttgaacgcaggccaatcatgactaacagcaatcgcatcaagctcacatggattagctttctctcctacgcactgactggtgcgttggttattgtcaccgggatggtgatgggaaatatcgccgattatttcaatctgcctgtttccagtatgagtaacaccttcaccttcctcaacgccggcattttaatctctatcttcctcaacgcctggctgatggaaatcgtcccgttgaaaacgcagttacgttttggctttctcctgatggtgctggcggttgccggtttgatgttcagccacagcctggcgctgttctcggcggcgatgttcattctcggggtggtcagcggcatcaccatgtcgattggtacattcctggtaacacaaatgtatgaagggcgtcagcgcggttcccgcctgttatttaccgactccttcttcagtatggctgggatgattttcccaatgatcgccgcgtttctactggcgcgcagcattgagtggtactgggtttatgcctgcatcgggctggtgtatgtcgctatttttattctgaccttcggctgtgagttcccggcgctgggcaaacatgcgccaaaaacggatgctccggtagagaaagaaaagtgggggatcggcgtactgtttctctctgttgcggcgctgtgctacatcctcggtcagttaggttttatctcctgggtgcctgagtatgccaaaggcctgggcatgagcctgaacgacgcgggcacgctggtgagtaacttctggatgtcatacatggtcggcatgtgggcgttcagctttattcttcgcttctttgatttgcaacgcattctgaccgtactggctggtctggctgcgattctgatgtacgtctttaacaccggaacaccagcacatatggcgtggtcaattctcgctctgggcttcttctccagcgcgatctataccaccatcatcaccctgggttcacagcagaccaaagtaccgtcgccaaaactggtcaactttgtcctgacctgcggaaccatcggtactatgttgacctttgtggttaccggcccgattgttgaacatagcggtccgcaggcggcactgcttacagcaaacggtctgtacgctgtcgtctttgtgatgtgcttcctgttaggtttcgtcagccgtcaccgtcagcataacaccctgacctctcattaattgctaatgccggacggcactatcgtcgtccggccttttcctctcttcccccgctacgtgcatctatttctataaacccgttcattttgtctattttttgcacaaacatgaaatatcagacaattccgtgacttaagaaaatttatacaaatcagcaatataccccttaaggagtatataaaggtgaatttgatttacatcaataagcggggttgctgaatcgttaaggtaggcggtaatagaaaagaaatcgaggcaaaaatgagcaaagtcagactcgcaattatcggtaacggtatggtcggccatcgttttatcgaagatcttcttgataaatctgatgcggccaactttgatattaccgttttctgtgaagaaccgcgcatcgcttatgaccgcgtacacctctcgtcttacttctctcaccacaccgccgaagagctgtcgctggtgcgcgaaggcttctacgagaaacacggcatcaaagttctggtcggcgaacgcgctatcaccatcaaccgtcaggagaaggtgattcactccagcgccggacgtaccgttttttatgacaagctgatcatggcaaccggttcctacccgtggatcccgccaatcaaaggttctgatactcaggactgctttgtctatcgcaccattgaagacctaaacgccattgaatcctgcgcccgtcgcagcaagcgcggtgccgttgttggtggcggcctgttaggtctggaagccgctggcgcgctgaaaaacttaggtattgaaacccacgttatcgaatttgcccctatgctgatggcggaacagcttgatcagatgggtggcgagcagctgcgtcgcaaaatcgaaagtatgggcgtgcgcgttcacaccagcaaaaacacccttgagattgtgcaggaaggtgtcgaagcgcgtaaaaccatgcgttttgccgacggcagcgaactggaagtcgactttatcgtcttctctaccggtatccgtccgcgcgataagctggcaacccagtgtggtctggacgttgctccgcgtgggggtatcgtcattaatgattcctgccagacttccgatccggatatctacgccatcggtgaatgcgcaagctggaacaaccgtgtatttggtctggtagcaccaggctacaaaatggcgcaggtcgccgttgaccatattctcggtagcgaaaacgcctttgaaggtgctgaccttagcgccaagctgaaactgctgggcgtagacgtaggcggtattggtgatgcgcacggtcgcacgcctggcgcacgtagctacgtttacctcgacgaaagtaaagagatctacaaacgcctgattgtcagcgaagacaacaaaaccctgctcggtgcggtactggtgggcgataccagcgactacggtaacctgctgcaactggtgctgaacgctatcgaactgccggaaaacccggattccctgatcctgccagcacactctggtagcggcaagccgtctatcggtgttgataaactgccggacagcgcgcaaatctgctcctgcttcgacgtcaccaaaggtgatctgattgctgccatcaacaaaggctgccacaccgttgcggcgctgaaagctgaaaccaaagcgggtactggctgcggtggctgtatcccgctggtcactcaggtactgaacgcggaactggcgaaacagggcatcgaagttaacaacaacctgtgcgaacactttgcttattcgcgtcaggaactgttccatttgatccgcgttgaaggcattaaaaccttcgaagaactgctggcgaaacacggcaaaggctacggttgtgaagtttgtaaaccaaccgtcggttcgctgctggcctcctgctggaacgaatacattctgaagccggaacatactccgctgcaggattctaacgacaacttcctcgctaacatccagaaagacggaacctactcggtgatcccgcgctctccgggcggtgaaatcaccccggaaggactgatggcagtgggtcgtatcgcgcgtgaatttaatctctacaccaaaatcaccggctctcagcgcctggcgatgtttggcgcacagaaagacgatctgccggagatctggcgtcagctgattgaagctggcttcgaaaccggtcatgcctatgcgaaagcactacgtatggcgaaaacctgcgtgggtagcacctggtgccgctacggcgttggcgacagcgtcggcctcggcgtggaactggaaaaccgctacaaaggcatccgtacgccgcacaaaatgaagttcggtgtctccggctgtacccgtgaatgttcagaagctcagggtaaagacgtgggtattatcgccactgaaaaaggctggaacctgtatgtttgcggtaacggcggcatgaaaccgcgtcatgcggatctgctggcagcggatatcgatcgcgaaacgctgatcaaatatctcgaccgcttcatgatgttctacatccgtaccgccgacaaactgacgcgtaccgcgccgtggttagaaaacctcgaaggcggcatcgattatctgaaagcggtgatcattgacgacaaactggggctgaacgcacatctggaagaagagatggcgcgcctgcgtgaagcggtagtgtgtgagtggactgaaacggtcaatacaccgtccgcgcagactcgcttcaaacacttcatcaacagcgacaagcgtgacccgaacgtacagatggtgccagagcgcgaacagcaccgtccggcaacgccgtatgaacgtatcccggtaactctggtggaggacaacgcatgagccagtggaaagacatctgcaaaatcgatgacatcctgcctgaaaccggcgtctgcgcgctgttaggtgacgagcaggtagcaattttccgcccgtatcacagcgatcaggtgtttgcgatcagcaacatcgacccgttcttcgagtccagcgtgctgtcacgcgggctgattgcggaacaccagggcgagctgtgggtcgccagcccgctgaaaaaacagcgttttcgcttaagtgatggcttgtgcatggaagacgaacagttttccgtcaaacattacgaagcacgagtgaaagacggcgtggtgcagctgcgcggttaatgttttaacgggaggcgcaatgcctcccctttttgcatggtcctgtaatgaccttcggtatattgcaggacattttttaaactttttgttttatttttttgtttttattttttaaaggataatcaaatgtttacagacactattaataagtgtgcggctaacgctgcgcgcattgcacgcctgtcggcaaataacccgctcggcttttgggtcagctccgccatggcgggcgcgtatgtgggtcttgggatcatcttgattttcacgctcggtaatttgctcgacccgtccgtacgtccgctggtgatgggcgcgacctttggtatcgccttaacgctggtgattatcgccggttctgaactgttcaccggacacaccatgttcctcacctttggggtaaaagcgggcagcatcagccacgggcaaatgtgggcaatcctgccgcaaacctggctgggtaacctggtcggttccgtcttcgttgccatgctctatagctggggcggcggtagcctgctgccggtagataccagcatcgttcactccgtcgcgctggctaaaaccactgcaccggcaatggtactgttcttcaaaggtgcattgtgtaactggctggtttgcctggcaatctggatggcgctgcgcactgaaggggcggcgaaatttatcgctatctggtggtgtctgctggcatttatcgcgtctggctacgagcactctatcgctaacatgacgctgttcgcgctctcctggttcggcaaccacagcgaagcctacacgctggcgggtattggtcataacctgctgtgggtgacgctgggtaatactttatcaggtgccgtattcatgggattgggttattggtatgctacgccgaaagcgaatcgtccggttgcggacaaatttaatcaaactgaaacggctgccggttaattactaaggggtttttacgtggatcatttgcctatattttgccaattacgcgatcgcgactgtctgattgtcggcggtggtgatgtcgcggaacgcaaagcaaggttgctgttagacgcaggcgctcgcttaacggtgaatgcattagcgtttattccacagttcaccgcatgggcagatgcaggcatgttaaccctcgtcgaagggccatttgatgaaagccttctcgacacctgctggctggcgattgcagcgacggatgatgacgcgcttaaccagcgcgtcagcgaagccgctgaagctcgtcgcatcttctgtaacgtggtcgatgcgccgaaagccgccagctttattatgccgtcgattattgaccgctcaccgctcatggtcgcggtctcctctggcggcacctctccggttctggcgcgcctgttgcgcgaaaaactcgaatcactgctgccgttgcatctgggccaggtggcgaaatatgccgggcaattacgcgggcgagtgaaacaacagttcgccacgatgagtgagcgtcgccgtttctgggagaaattgttcgttaacgaccgcctggcgcagtcgctggcaaacaacgatcagaaagccattactgaaacgaccgaacagttaatcaacgaaccgctcgaccatcgcggtgaagtggtgctggttggtgcaggtccgggcgatgccgggctgctgacgctgaaaggactgcaacaaattcagcaggcagatgtggtggtctacgaccgtctggtttctgacgatattatgaatctggtacgccgcgatgctgatcgcgttttcgtcggcaaacgcgcgggataccactgtgtaccgcaggaagagattaaccagatcctgctgcgggaagcgcaaaaaggcaaacgcgtggtgcggctgaaaggtggcgatccgtttatttttggccgtggtggcgaagagctggaaacactgtgcaacgcgggtattccgttctcggtggttccgggtattaccgcagcttctggttgctctgcctattcgggtattccgctcacgcatcgcgattatgcccagagcgtgcgcttaattaccggacacttaaaaaccggtggcgagctggactgggaaaacctggcggcagaaaaacagacgctggtgttctatatggggctgaatcaggctgcgactattcagcaaaagctgattgaacacggtatgcctggcgaaatgccggtggcaattgtcgaaaacggaacagcagtcacgcagcgcgtgattgacggtacgctcacgcaactcggtgaacttgctcagcaaatgaacagtccatcgctaattattattggtcgggttgttggcctgcgcgataaactgaactggttctccaaccattaatttaacccgggccagagaattctggccttcttaatgactctttttatatattcagcaaataaaacgtagccccttaataaatattatctgctaatgggttatattcaccgttacagcgacttacaaaattaagtcattcgctcactgacgccaattaaatattcctgtatcgttcttaacgagcagtctgcttatattcatataatcaatgaatattaattaatatataatacatagggaatgtaaatgaacaaatttattaaagttgcactggtaggtgcagtactggctacgttaactgcatgtactggtcatattgaaaaccgtgataagaactgctcttacgactacctgctgcacccggcaatttctatttctaaaatcattggcggttgcggtcctactgcacagtaagtctctgacagaaatcggctaacaccggtttaattgcccgacgccctctggattttccgagggcgtatttgtttctgcattcttttcgaaaacatcattcacaagattaaatactggcaatactctcacgcaaaatccgcagcaccgtctcttcaccgctgcgattcgggttaatgcgaatcgcacaatgttctgattgtggattcgcctggcgaaacgttccggaaaggcgataaaagagcggcgggatttcatatttcgactctgcacccaccgggtaaggcaaggcaccgcgcttttgcgcctcttccagcactctggcggcaatcggctgatgaaactcgacaatcaacaccttcgactgcgcattagcaatcaccgcgcttttcacttccggcaccgcaccaccgttaagcaaagccagcaaccgttcagatacccctgcctgcaccgcgtgcatcactggcgcaaacaccagaccacgcaatacttccagcgcctgtgcgccctggatctggctaccgccggagtaaagcgtggcgcgaatacggttgataacatcagcatcgccgaccactgcaccaacaccctctggcccaaatagcttgaagcaggaaaatgtcgagacattcgcgccgcattcacagccgattcgcgccaccttcatcaccgcatagttgtcatcggttaacgctggaacacctgccgcgcgcaacgttgccagcacatctgccagcacgtagctgtcctgcggctgctggcgcgtatgctgcaccagcgccgcatccggttgttgctcgtcgacgacctgcttcagtgccgacaggtcattgaaatcaacagtaataagcgtcagccccatctgctcaataataacccgtgtcgtcgggtaaacaggcgcgtcatgcaccagaagacgctgccccggtttgagcaaagccgccagcccggcgcgaatcgcgccagtccccgcgccctgcaccagcgccgcagcctgtgcgtgaaatgcatcagccagcacctgttccacacgctgggtaacgcgcggttgattcagtcctggcgttaagcctaaatcaccgccagtaagaaactcgctgccggggaaatggcgacaaatgctatccaccagcgcaaactgcttttgctgcgcctcaataatcgtcaggctttgcagaggaaacgtcttcataggtgccttccttaagccggaacgaacaggccaagccagtaaagaacattcagcagaataccggtgatcattactgccacgaccggtgccgccattttctgtaccggacggcccagggattcgttgaggaagtaaatggcaaccgcgatagagaatccggtataacccgccatcttaattgctgcgaaaatcgaaccgaccagcagcgccacttccatcagcatattcatggcgttacggatgttatccgacgcattacgcaccgacggatagcgccccagccatttgccgatcgaacgaagcaataaaacttctgccgaaataaccactgcacctaataccgctgcaaccatcggattcggcgagagatagcccaccgcataaacaaaggtaaagcccgcaactgcatacacacccgttgctaacgcggtggtggcaatcaacggcacaaaccccagtccgcgcataaattctgccagagccgcctgattaatcagcgtttgcgattgttccggcgttacgcctgcggaatatgctttctccagtgtgaagatcgacacttcactgccagcaaaaatcttcatgctggcaacggcggcaatcaatgctcccacgatggcgatatagggtaagtttttgataatccgtgacgtgcgttcttcaaacaccgaaagcccgctggcatcaatgtcattttcatcacgatgacgcaggtcgtgagttatcgcgatccccagcagcatcaccatgccaataaagatttcgatggattcagggttaagatgtgggaaatagcgcacgactaccacacgggtcatcagtaccaccacggcggcgatcagactttgcttccagccaaactggtagaaaatcgccaccagcgggaacagtgcaaaagctgaaaccaccggcgagcttaattcccccaggctacctaatacatccaccggcagcgcggtcagcagctggtttactggcaacaggcaagtaaggatcaacacgccccagatagcgccaagaccaaacgccatcaggctgtttatcgccaggacgccgaggatatcggtaggaagaaagagtaaccatgcgttgagcagcccggttttcagggtaaaagagatccccaccgaggccacaaaaccaatgctcagaccaaaagcgatactccccgcctcgcgacggttcatatagccttcaatcagttgcggcaggatcgggcggatgccgtcatgaaaaacagccgccgagcgatgcgccagaagcgatgtcatacccgtcaggcacgccaccacgataatctgaatatacagatccatagtcgtgccttttatttcagatggttaatcagcatcggaatcgcgtgttcgacgtgctcaacggaaaggccaaacgccactttcccttcggcgatcattttggcgatatgctcgtctttcgctttaatgcctggtttggcaatggtgcaacttttgttatagccaatcaccgcgatggcaatcgacaatgccgcgcccgcaccggtattacacgcaccgatgtagtaatccagttgcccggatttcactttcattgccgcttccatgtcgttgtgaatgaaaacttcaaaactgccaggagccgtcgcttcaatggtttttttaatctgctcacgctgtaagcctgcaacgccaatctttttcatgagtctgtccttattggaaaaattgagagggattttcacgtaacatcacatccacatcggcctgactgaatcctgactggcgcaattgcggaataaaggtggtcaataaatagtcatagccataaccaccattggcttttaaatgggagcggcgcgtaatatccatcgacagcatgacgcggttcagcaacccacggtcacgtagcgcgtggagcatcgcaatgcgcttttcgtccgggtagtaactgttcttaccaatggtgtcgaactgcacgtacgcgccgagatcgatcatcttcaaaatgttgtcgagattgtctttcagatcgcagtgaccaacggtgacgcgcgaaagatcaactccgtgggcttgcaacagagccagttgttccagccccatggtgctgaacgaagtatgcgtggagatcgggcgtccggtctggttatgcgccagcgcagcggcaataaacaccttctcttccagcggcgtaatcttcccttcgctagagccgatctccgcgataatcccggctttcaggtcggtgccatcgataccctgttcaatttcatcgaccatctcctgcgccagttcctgcacgctgcgggtcgccacatgctccgggaaaaaagcgtcctggtaataaccggtgcaggccaccacgttgatccccgtctcgcgcattacatcgagcataaattgcgcattgcgccccatgtaacggttggtcatctcaatcacattacgcacgccccgggtcatcaggtcgttcatctcctggcaaatgaacgcatactgatcaaggcggcagtccacgttgtttttaaagccggagagatcaatatgcagatgctcatgggccagggtgtaacccgtcggatcaatactcatagggtgtctcctgcaaaccggagggaggaaagaaaagagcgaccattttgtggcggtggcgcacggaaaaattcacacacggtagcccccacatcagaaagcgtggtgcgtacaccgagttgcgtgtggaccagcccttgctgataaaccagcactggcaccacttcacgggtatggtggctgtgaccaatggtcggatcgttaccgtgatccgccatcacgaccaggcaatcatctggctgcatcgcctcaacaagccgggcaaggttacggtcaacgacctgcaaacgttcggcataacgtgcgacgtcttctgcatgaccagcgaggtcggtttcctggatattgatgcaaataaacgccgtcggatgcgtgttaaattcgtcgagggtgatatccataatccgctggctatccaccagattttgccagctcacgccataaggattgttgacgatatctgccaccttacccaccagcacggttggcacgcctgcttcatacagtttttgtggcacctgcactttttcatcgacgccatagcccatatgcacgacctggaaaccgttgtcataagcgccagaacgcggcgcattgataccaataaagcgcccttctttgctttctgcggcatcgagaatgcgttgactgtcggttaacaggccaccaaatgtaatgacccgaccgacctgtacctgctcacgcacgatacgaccaattttgattgcgtcgtcaaaagagatcacagagagattggcggtaatgttatagacctggcctaaatccgcctcgagattatcgccaatcgcaaccgcctgattgacccacagaaattgcagttcatcgccacggcgctccacctgccaaccggcggatactaatgcctgctcaacacggtcaatcacatcgcaaaaaggcatccgcagcggcggtaacgggcgcgtgcctaaaatttcctgatgccccataaaggtatcgccaccttcatgttgcagctctgccacgccccaggttgcggaatctgacggctgcatatcgcctggcgcataacccaatgcgttgattagccccagcttctccagcgttggtagctgcaaatgcggcaactggctcaagatgtgaccacaggtattcgctcccgcatcttgcggacgcaccagcgtgacatctttcattgcccctacgccaaagctatcaatcactaacaccacaaatcgcgccattacgcccccagagagtttccaagactgtcataacgaccaacgattttcggttcgccacggtgaataccggacaccagcaccacatcgctacgggtgacaaaaatctgcgtgcggaaacagagcaccactgcactgctcaccggatactcgcctgccagcggcagggtgtagtcgatactgctgtcatccacagttttgagattggtttcagtaatcttttgattttctggcgtaaacaccagcgcatgttgcgcatgaccacgacggtagtaaccgccgccgtagcagtagctgtcgccacggaaatgatgggagatttcacttaaccagagcatcgcgatacgttcaggctgatcgccctgctggtttgccggaatagtgcccgtcagcgcatgaccgggttcggcatgagtcacaccgtattccgccagcaatggcagcgaagtgcagctggtcgctgaaggcgcgttcagttgctcaagtgcaataccagatttcgccagttgatcccgtgcctgtatcagcgtgtgaagattcggtgtcggcaaaacttttccggcagcctcatcccaaagcaggcaagggaaatgggtaagtccggctaaatgcagccccggcagtttcttaatttcagcaaccacctcgtgcagcgaatgctgtacaaaaccgctctcctgccccggataaagaaaatcatcgtcgctataaactttgagcagcacaaactgcacacgtccggccttcaccgctgccgcagaaacttcccgcgctttgtcgagagtaaacacggtgatgacgtcggtgccctgttcaacggcgtcagcaacctgatgacaagggatttgtaccagatgcccctgatgcgccaccgacaaaccagcgcggcgcatgactcgcgcctctttgtaatccaccgccacaatgccgctgtaacctaatgccagcaatttttccgccagccatgggttacggccaaactgcttggtcatcagatacagttcaatgccgtaaagccgcgccgtctcaatcagtcgcttaccgttttccagtacctgatccacgtcgatcacccagctgtccggggcgatcttgccctgctgccacaaacttagtgcggcggaaatcagcgccgggttctggcgtttcaatgcttctacaaacatcttgttgcctcgtttctgttccttgaattaaatattcatttttttgaatatttaggttgtgcgacgtggatttgtcgggagcttcaaacctcttcgttagcagccatccataatccataaaggttggccagcaaatagccttcttcacacgggttaacttccagtgcgaattccttcaacaacacctgatgcaattgcacaacggcttgccagtggctggattgcgccagctctgccagcaattcgttatccagcggctctatttcttcaccacggcgactgcgcatcagtgcactcgccatatgtgtcatcgccatcgttccttgctcactgcgcaccggcagatggcactctgtttccagtacgttgacgacctgcatcatgcctttgcagatgtccttatcaataacgcctgcctcgcaaagcaggttgagtctggtttccatatcagatgcctttcgtttaataactcggttcctgttccccactcaccacgcgttgttgatgggcgagcagggcgtgtttatctacaacggcacgcagcagttgttgcattgggtaatcatcggctcgcgtcaggaccacggcttcggtggcctgtaaaaatcgcggatcgtctgtgagcggcgtcgcctctaatcccagcatggtcagttcgttttccgccaccacgttccagataaccgcatcgacatcgcctttaacaatgcgttgtaaactctcgtgataagagagatcgacacgttccacatcactatcgccaaaaaagacatcggtcatgattttctgatccgccgaacggttatccagccccacgcgcttcacgtttgcggactcgcctttacggcaaatcaactggtgctcgccaacgtaggtgtgcggccccaactccagcgcgaggcaaaaccctttttgcgtgagataactttccgccgccagtcgggaaaccaccgccatgtcatacacgccgttaagtaaacactccacgcgaatatccgcgccgcgcatatgcgcatagtaaaaaggaatgccatcaaactgggctttcaatccgctcgctaaaccttcgtacaagcgggtatagggcaaaggcatcgcacataccacgttgttgatatccacatgactcagcaatgctttgttatccatctcgaccagataactgccattgcgcccacggcgttcaatccgtatcgctccgcttgattccagcgttttcaacgcggcctgcgtcaggccaacggatgaacggcattcagttgccagctcatctatggttttcaacctattaccgcatttttcacccaacaaataacgggccagcgtcgtgataacgacgccttcttttttgataaacgttcgacgcataatatattttcaataaaatgaatgtttatatcttcattaaaatgaagataagtggcaactgtgagatgtggaaacggcgaggcgcttcacattttttcggattattgcaaatgaggataaaaaaaccgggtttccccggtttcagagtgatgacgaagtgatttattcgacaatgcgagcaaagggtaattcccactggcgcttgcctgctcccctcaccctaaccctctccccaaaggggcgaggggaccgtccgagcgttttgatattacggcttcgccacaaaaccaatcgcttcgtacaccgctttcagcgtacgggaagcgtgtacactggctttttctgcgccgtctttcatcacctgttgcaggaaggcttcatcgttgcggaaacggtgatagcgttcctgcaattcagtcagcataccggaaacggcatcagccacttcacctttcagatgaccatacatcttgccttcgaactgtttttccagttctggaatgctctggcccgttaccgcagaaaggatatccagcaggttggaaacgcccgctttgttctgcacatcgtagcgaactaccggcggctcgtcagaatcagtgaccgcgcgtttgattttcttcactaccgatttcggatcttccagcaggccgataacgttattgcggttatcgtcagacttggacatcttcttggtcggctccagcagcgacattacgcgcgcgccagatttcggaataaacggctccggcaccttaaagatctcgccatacagcgcgttgaaacgctgggcgatatcgcgactcagttccaggtgctgtttctggtcttcacccaccggtaccagattagtttgatacagcaggatgtccgcagccatcagcaccggatagtcaaacagaccagcgttgatgttctcggcataacgcgcagatttatctttaaactgggtcatgcggctcagttcgccgaagtaggtatagcagttcagtgcccagcctaactgcgcatgttctggtacgtgggactgaacaaaaatggtgcttttctcaggatcgataccacaagccagatacaaggccagcgtatccagcgtcgctttacgcagcttctgtgcatcctggcgcacggtgatcgcgtgttggtcaacgatacagtaaatgcaatggtagtcatcctgcatgtttacccactgacgcagcgcacccatgtagttaccaatggtcaattcacctgagggctgtgcgccactaaaaacgatgggcttagtcatttttcgattcctgattttcgctatgcggaagccctaatgcgggcagaaggtcatttatagactgataaattacatcaggctggctgagatcgatagcctcgccgtagttatatccgtaggttaagccaactgatgggcaacctgccgcttttgccgcctgaatatcattgcgtgagtcgccgacaaacagcatctgttgtggggcaattcccatccgctcagccaccagtaacagcgggtccggatgcggttttttgttttgcacatcatcgccgccgataaccacgctaaagtatttggcaatatctaaggcttcgagcagcggcgcgacgaacggcgtcggtttgttggtgaccaggcctagcggcaggcctttagcctgcaacgcgcccaacgtatcggcaacgtgcgggaacaaaaacgtcccctcttcggcaacctcgctatagtagcgatcgaacagtttacgcagaatacgtacctgttcttctgccggaatgtcgtcatcaacgggcggtttacccattgttttacgcagagtcgcacgttcctgacgcgcccaggtcaatgcgcgctccatcagaacatctgcgccgttaccaatccaggtaataacgcgttcttcacctgcgatgggcaactccagcgcatacagcgccatatctaccgcagcagcaagaccgggagcactgtcgaccagcgtaccatcaagatcaaaagcgacgccgcgaatatcttcaaacttattcatgacttacctttgccagttcactgcgcatttcatcaatgacttttttgtagtctggctggtcgaagattgccgaaccggcgacgaacatatccgcgcccgccgcagcgatttcgccaatgttgttcaccttcacgccaccgtccacttccagacgaatgtcaaagccagactcgtcgatacggcgacgtacttcgcgcagtttatccagtgtttgaggaatgaaagactgaccgccgaaaccaggattgacggacatcagcaggatcacatccagcttatccatcacgtaatccagatagctcagcggtgtcgccgggttaaataccagtcccgctttacagccattttctttaatcagttgcagcgtgcggtcaacatgctcggaggcttctggatgaaaggtaatgatgctggcaccagcggcagcgaaatcaggcacaatgcgatcgacgggtttcaccatcagatgtacgtcgataggggcggtaatgccatagttacgcaaggatttcagcaccattggcccaatcgtcagattgggaacatagtggttatccatgacgtcaaaatgcacgacatcagcgccagctgccagggcttttgcggtatcttcacccaggcgggcaaaatcagccgacagaattgagggggcaatcaaatactgtttcatccgcttctccttgagaattattttttcgcgggtgaaacgactcctggtttgtacaaagccagcagttcgtccacctttttacgtgtgccgccgttgctgcttatactgcgtcgaactttgacgacatgcaattttgcgcgctgataccactcacgcgttaacatcgtatcgtgattggagatcagcactggaatatggcgctcaaccagaccttcggcgatctccgccagatgcgcttgttgttcaagcgtaaaactgtttgtgtgatacgccgtaaagttggcggtcgcagacagcggtgcataaggcggatcgcaatagacgacggatgcatcatctgcgcgcgccatgctatcggcgtaagactcacaatagaaaaaggcattctgcgctttttcagcgaagtgatacaactctgcttccgggaaatagggttttttgtagcggccaaacggcacgttaaactcaccgcgcagattgtaacgacacaggccgttgtaaccgtagcggttcaaatataaaaacagtaccgcccgacggaacggatcctggcttttgttgaactcttcgcggaactgatagtagacctcggcgcaatttgtttcgggaacaaacagctcgcgtgcggcctgtacgtactcatcagtacgcatcttcacaatgttatagagactgatcaggtcgctattgatatcggcaaggatataacgagaaaagtcggtgttgagaaacaccgacccggcacctacaaaaggctcaaccagacattcgcccttgggcaaatgccgtttaatatcatcaagcaggggatacttgccccctgcccacttcaaaaaagcgcgatttttcttcatgctgactaactaattacaccttctccggctgtggagaaagctccgacagcatccagcgcttcaggcaactcccgcaacgataacccattgcgggagataaccttgattacttcagatcggcctgtacctgacgcagcggtttcgcccacgggtttttggcctgaacatctgctggcaatgtagataccgcttttttcgcctcttctttcgaagcgtacacgccagaaaccaggacataccacggctgaccattacgcgtcgtttcatagacaacgtagtttttcagattctctttcttcgcccaaccgttcaggttgtcgtagttagaggaactgctcagctgcagagtgtaatggctggacggtgccgatttcaacgaaccaacattacctgcggtcttccctccagcggctggtgttgccgtggtttgcgccggggatgccgtctgtactggagccgtagtcgccgtctcttttggtgctggcgcagaagtcgcagccggtgccttcgtgctcgccacaggagcaactggttcagtacgtttcggcgtctgtgctaccggcttcggctccgttttcacggttgcttgcggttttttcggttcaatcaccgcctgctgacgagctgggcgtgtagtggccggacgttcagcggtttgcgttttcgccgtgtcacgcgatgcattgccattgcgaacaggcgcgacagtcgcgggttcagtcggcaacgtggaattgaccgccacattgttcagcggttgctgattttgtggctgggtcagcgcattgttcaggtcaccctgcacttcaacacgttgttgaccatccgttgccgccggggtttgcccttgagtcggcgtagaagagatcggcggcagagaaacatcctgctgagtattttccgcagacgtggttcccggcgctggctgcaccccattcgcctgatcggtcgcattgccagcaagatcaatactcttctcgccagacgcggtttgatcgctggaagtggtcgagggggcttttagcgcagaaccgataccgatgatcaacagcagtagaaccagaatgccgacgcccatcatcatatactgacgagaagcgggtttactggctgcttttttgcgcttacgcggacgacgctctacgcgctcttcatccacggtttcatcttcggattcgtcaatttcttcttcgatttccggttcctcattgcgctctttttgcgcacgagtcggacggcgatcgtcagtgtcatcaagttcaatatcatcaaaattgatctgcggttcgccacgttcagtacgctcagaacgttcagaagattgacgagaacgaccagtacgacgatcgctgggatcgggtttcagctcgtcttctggtttgaattcatccatttaacaccccactaaaaggttaatgcttaccacgttgcaattaacctgaagctaatagaccgcttgataagcggcctgacctttcttgttgttacgctgattgacaatcggcaatggcgttaagaacaagctcgtgcgaaacgccgctgcgaacttcactcttaccaattgccaacggaagaattaagcgtatctctcccgcaaggactttcttgtcacgcagcatatgcggtaaatacgcctgcgcggacatttcgcgcggcccattgaccggtaacccagcccgcttgagcagggttataatacgctgcgtttcggcagaactaaactgcccgagacgttccgacgtccgcgccgccatcaccatacccgcagcgaccgcttcaccatgtaaccaattgccataccccatttcagcttcaatggcatgaccaaaggtgtgtcccagattcagtaaagcacgtaacccggtttcgcgctcgtcggcggcgacaacttctgccttcagttcacaacaacggcgaatacagtacgccattgccggaccgtccagacgcaacaacgcatccagattctcttccagccagttaaaaaacgcaccgtcaagaataatgccgtatttgatgacttctgccagccccgacgctaactcacgcgggggaagcgttttcagacagtcgagatccaccaccactgaagcaggctggtagaacgcgccaatcatgtttttaccgaggggatggttgaccgcagttttgccgccaacggaggaatcgacctgcgacagtaacgtcgtcgggacttgaatgaaacgaacaccgcgctgataactcgccgccgcgaagccggtcagatcgcccactacgccgccgccaagcgccaccagcgtagtatcgcgaccatgcggcttttgtaacaacgccgtaaagacggtatcgagtacagccaggcttttatactgctcgccgtcagggaggataacgctatcgacgttaacacccgcctgttcaagtacgccgcggaccttatcgagatacagaggagccagggtttcgttggtgaccaacatgacctgctcgcccgatttcagcggtaagaatgaagctggttcattaaacaaaccagatgcgatggtaattgggtaactacgttccccgagagtaacgacaatcctctccataacgcgacatccaccttaattactgtacccgcagacgagtgtatataaagccagaattagttgctttccagcatgtgaataatctggtttgcaaccactttagcgctttgatcatcagtacgaatggtcacgtcggcaatctcttcatacagcggattgcgttcattggccaacgcttccagaacttcacgcggcggtgtttcaacgtgcagcaacgggcgttttttatcacgctgcgtgcgtgcaagttgcttttcgatggtcgtttcaagataaacgacaacgccacgagcggaaagacggttacgcgtttcacgggatttcacagagccgccgccagtagccagcacaataccctgtttctcggtcaactcattgatgaccttttcttcgcgatcgcggaagccttcttcgccttctaaatcgaaaacccagcccacatcagctccggttcgtttctcaatctcttgatcggaatcgtaaaattccatattgagttgttgagctaactggcgcccaatagtgctttttccggcacccataggcccaaccagaaagatattgcgtttctctgccattttttcggtactactaagactattcgttaatgataaacccgcttcgctcagagagcgccgcaggacatgaactgaaacctcataagatattgcgagagtcagactgaaaattatctcaatactccagcgggtttggcaactgaataaatcacccatccctctgcatatctggtcgctgcaagcgcgctgccttgctaccaccgctctggcgataaatcaccgggtaagattagcgtaaaaaagacagcaaaatgccgcctgaatgataaatcatcatcatggaacgcaggcagcgaagagcaccaactctcaaatcggtactccttgtatgctaaatacctgcgcgcgtcaaatagatgaaacacgttcagcataaaaacattaccgcttttacggctgtttactcactggaaaccagtcgtggcgtgataaacaccactaactcgcgtcgttcatcttcttttccgtcatgacgaaataattgcccgaaccagggaatgtcgccaagcaacggtacgctatcctgacccgatttatttttacgggtaaaaatgccgcccagcgccaacgtttctccgcttttgacctcgacctgcgtttcgatctcctgcttatcaatcgccagcacttcgccatcggcctgctgtagcacctgccccggaacgttctggctgatgtgtaatttcagccggatgcgacctttttgtaacaccgtgggcgtgacctccatccccaggacggcctctttaaattccaccgacgtcgcgccactttccccgctggaaacctgatatggaatttcgctcccctgtttaatgctggcaggctgaagatgtgaggccagcagacgcggactggcgataatatccagctgctgtttttgttcgagcgcggaaagctcaagatccagcaagcgtccgttgatgcgcccaatgttaaaaccgacatgcgttgtcgccgtcgctacggagaggtcgctaccaagcgtggtgacttgcccaacgccaccagcgtgttgcgcatcggccagcgtccatttcacgcctaactcacgcaaacttttttcattaatggtgacaatatgcgccgacagctcaacctgcccgaccggcagatccatttgcgctacccactgttcaagcgcgcttaacgccgttttgttatctcgtagcaaaagacgattggtgcgtttatcgacggtcatactccctttggcactcagtagcttctcccccgctttcgccagttctcccgcgtcggcgtattgcagggttatactgcgattttccagcggcagatttgcctgcgcccgcgcctgctccgcctcctggcgggcgatattgttattctgccaggcaatggaatgcactgagagaatgttgccttcctgccgcgttatcagtccggcgcttttcactacagtttgtagtgcctgcttccagggaacatctgttagatgtaacgacaccgtaccgctgacgtctggcgacacgaccaggttcaacttctcctgttcagccagcgcctgcaacacctgagctaccggaacgtcatccaccatcagcgtcactttttgcggctttgccgcctgtacgccgggtatcagcatcaacagtagtgcggctatccattgcttcatttgtatctccttgccgttgccacaaccattgtggcggttcgcagtttgtcccggtacccagcgttagtacgtctggcgtcagctgtaaaattgtccagccgttttccagcacatcgttttgctgcacccgtcgccatttcttttgcccgtcttttattacaccgatgatgcgctcgcctcgccctaccatcccctgatagcgccactggctaagttcgctaatccggcatagatcttccggcggtttaaaagggtcacgcataccggttaaaaggcacaatgcaatacctgccaacaaccagcgtttaaccctcatgcggcgtctccagttgtagcgtgaacaaaagatcatcaccttccacgcttaacgaaaaacggctcacgctgacgttgcgctctgccagccgtgtaaatgccgacggcactgcttcccacagcgttttcaacgccaactcgcctccctgcgcggatggatgccaggaaaccagttgcgcgccggataactgaaaatccagtggcgaaaagggcagcgttttttcctcgctgaagggagtggtgtctaccaggcgatacagtgcggcccactgctggtgatgacttgcccgtagtcgaattaatgcgtcgcgctcttcatggtgtgtcgatgatagaaaaatgagcgtaactaacatcagcaaccagactgcccagcaaagctggcggaggcggggtgatgtggcgaaccaccagtcaaagaacatgttcatcgctaaccttccttgttaactgatactcaaattgccagcgtccctgcgcatcctgctgcgtggctccccgctgattgagatgaaaagacgcatcctggcggagtgacgtttctagtgcgtttaacgcggtaatgcttgttgtcagccccttgatctccagcgttccctgctgccagcttatcgttgtcagccaggcgtgctcgggtaaaagcgccgccagtgcttccagcgcagattgccagtcgcgggtaaattgtcgctggcgctgccgttgcgaacgctgttcgcgtaactgctgttgctccagcaaacgtggcttcgttatctgtaagctgcgggcgagttgttgttccgcctgaagcaaaactgcgtctatgcgcgcttcggcgctgcctgtcagacgcagtattagcgttatcccgacggccagcagcagaggcgcaacgaacatcagcaaccagaaacgcagaaaagcggtccggcgttgctgtcgccagggcaaaaaattaattggcgggttcatcagtacgccttcccaagcgccagccccagcgcgatggcaaagtctccacctgacggcggtagcggcggctgacgaacagaaacggcctcccagggatcaaatcccccttcgccacatatcgcgacgctttcgggatcaacggataacgctgccgccagctccttcgcgctagtcatccccaccgccagtttgcgcccccagcgatagcgtgtcgcccacagccactgttcgttatcacgccaggccagacattgctgatgagaaggtaaaaaaggcaggaatcgctgtaatgcactggcatccggggtgatcgcgctcacatgaacacgcaacctttctgccagagtaagcagcgttgccagctctttgctttgcgcggcagtcacgttataggcggggctgagtgagtcttcgctgtaatcgaagcgcagggagtccggatccatatccagctcgcgggccatcgtccctgacagccaggccgtttgctcccgctcaccaagggacatcgacgggcgcggaaatgaccgctgtaatgtgcgactggcgggaaacgccaacataatgtgatgacgctgcggcagttcgcgactccacggtaacaacgttttagccagctgctgcgcatcaacaatccgcccatctttgataatgtcgttctccagcggcaaccgccaccagcgttgcaaaaagcattcttttgctccccgcacgatcgcaaccgctaccgcttcttgctgttgtaaatgcaaaccaatttgccagatcttaaatgccattgtgatgatctccttatcacccgtcactctgacgggtatatcaatgcgtctggcttgcctttatactaccgcgcgtttgtttataaactgcccaaatgaaactaaatgggaaatttccagtgaagttcgtaaagtattttttgatccttgcagtctgttgcattctgctgggagcaggctcgatttatggcctataccgctacatcgagccacaactgccggatgtggcgacattaaaagatgttcgcctgcaaattccgatgcagatttacagcgccgatggcgagctgattgctcaatacggtgagaaacgtcgtattccggttacgttggatcaaatcccaccggagatggtgaaagcctttatcgcgacggaagacagccgcttctacgagcatcacggcgttgacccggtggggatcttccgtgcggcaagtgtggcgctgttctccggccacgcgtcacaaggggcgagtaccattacccagcagctggcgagaaatttcttcctcagtccagaacgcacgctgatgcgtaagattaaggaagtcttcctcgcgattcgcattgaacagttgctgacgaaagacgagatcctcgagctttatctgaacaagatttacctcggttaccgcgcctatggtgtcggtgctgcggcacaagtctatttcggtaaaacggtcgaccaactgacgctgaacgaaatggctgtgatcgccgggctgccgaaagcgccttccacctttaatccgctctactcaatggatcgtgccgtcgcgcggcgtaacgtcgtactgtcgcggatgctggatgaagggtatatcacccaacaacagttcgatcagacacgcactgaggcgattaacgctaactatcacgcgccggagattgctttctctgcgccgtacctgagcgaaatggtgcgccaggagatgtataaccgttatggcgaaagtgcctatgaagacggttatcgcatttacaccaccatcacccgcaaagtgcagcaggccgcacagcaggcggtacgtaataacgtgctggactacgacatgcgccacggctatcgcggcccggcaaatgtgctgtggaaagtgggcgagtcggcgtgggataacaacaagattaccgatacgctgaaggcgctgccaacctatggtccgctgctgcctgccgcagtcaccagcgccaatcctcagcaagcgacggcgatgctggcggacgggtcgaccgtcgcattgagtatggaaggcgttcgctgggcgcgtccttaccgttcggatactcagcaaggaccgacgccgcgtaaagtgaccgatgttctgcaaacgggtcagcaaatctgggttcgtcaggttggcgatgcatggtggctggcacaagtgccggaagtgaactcggcgctggtgtcgatcaatccgcaaaacggtgccgttatggcgctggtcggtggctttgatttcaatcagagcaagtttaaccgcgccacccaggcactgcgtcaggtgggttccaacatcaaaccgttcctctacaccgcggcgatggataaaggtctgacgctggcaagtatgttgaacgatgtgccaatttctcgctgggatgcaggtgccggttctgactggcagccgaagaactcaccaccgcagtatgctggtccaattcgcttacgtcaggggctgggtcagtcgaaaaacgtggtgatggtacgcgcaatgcgggcgatgggcgtcgactatgctgcagaatatctgcaacgcttcggcttcccggcgcaaaacattgtccacaccgaatcgctggcgctgggttcagcgtccttcaccccaatgcaggtggcgcgcggctacgcggtcatggcgaacggtggcttcctggtggacccgtggtttatcagcaaaattgaaaacgatcagggcggcgtgattttcgaagcgaaaccgaaagtagcctgcccggaatgcgatattccggtgatttacggtgatacgcagaaatcgaacgtgctggaaaataacgatgttgaagatgtcgctatctcccgcgagcagcagaatgtttctgtaccaatgccgcagctggagcaggcaaatcaggcgttagtggcgaagactggcgcgcaggagtacgcaccgcacgtcatcaacactccgctggcattcctgattaagagtgctttgaacaccaatatctttggtgaaccaggctggcagggtaccggctggcgtgcaggtcgtgatttgcagcgtcgcgatatcggcgggaaaaccggtaccactaacagttcgaaagatgcgtggttctcgggttacggtccgggcgttgtgacctcggtctggattggctttgatgatcaccgtcgtaatctcggtcatacaacggcttccggagcgattaaagatcagatctcaggttacgaaggcggtgccaagagtgcccagcctgcatgggacgcttatatgaaagccgttcttgaaggtgtgccggagcagccgctgacgccgcctccgggtattgtgacggtgaatatcgatcgcagcaccgggcagttagctaatggtggcaacagccgcgaagagtatttcatcgaaggtacgcagccgacacaacaggcggtgcacgaggtgggaacgaccattatcgataatggtgaggcacaggaattgttctgattaaaaaggcgcttcggcgccttttcagttggctgacaaagtgcatttgtttatgccggatgcgggtgaacgcgttatccggctaacaaaatcgtgaaaaatcaatatattgcaggaaacccataagcctgataagcgttgtgcatcaggcaaacttcacgcatttacactcgcccctgccctttcaaccattcgcgcacgaggaacagcgcgctgacattacgcgcttcgttgaagtcagggtcttccagcaaatccatcatatgcgccagcggccagcgcacctgtggtagcggctctggctcatcgccttccagcgattccgggtagagatcttgcgcgaccacgatattcattttgctggaaaagtaagacggtgccatgctgagcttcttcaaaaaagtcagatcgttcgcaccaaatccaacctcttcttttagctcgcggttagcggcttcgtagacgctttcacccggatcaattaatcctttcgaaaaacctaattcgtaggattcagttcccactgcgtattcgcggatcaggatcaggtgatcgtccacaatcggcacaatcatcactgcttcccggttggttggacgcattcgttcataaacacgccgcacgccattgctgaactccagatccacgctctcgacggtaaacagtcgggaacgggctacagtttcaacattcagaatggtgggtttttgtaatgatttgctcatcgtgggatctatgctgtgaaatcagcggttattgtgcgatatcggacacgctttcggcaatgtgaattgcatgttatttacatttatgtaacttaataaataatcgtcctcaaatcaaattaaaagtcaataggttgaaataactccaggaatttgctgatattccgccttcagagggtttgctatgatcagcggttactgtgatgtgcttaatgatgctcaagttaaactccacgcttgccgatagccaaccgcagaatcatgtattgtgtctggtgcgactgaccacgcctgacagactaagtaagatggggaaagcatgagcaccattgtgatttttttagctgctttgctggcctgctcactacttgcgggatggctgataaaagtgcgatccagacggcgtcagctgccctggaccaacgccttcgcggatgcgcaaacgcgtaaactcacacctgaagaacgtagcgccgttgaaaattatcttgagagcctgacgcaggtattacaggtgcctggcccaacgggagctagcgcggcaccgatctctctggcgctgaatgccgaaagcaacaacgtcatgatgctgacacacgctatcacgcgttacggcatctctaccgacgatccgaataaatggcgttactacctcgattcggtagaagtccacctgccccctttctgggaacaatacatcaacgatgagaataccgttgaactgatttataccgattcgctgccgctggttatttcactcaacggtcatacgctgcaggagtacatgcaggaaacgcgcggctatgccttgcaacctgttccgtccacgcaggcgtcgattcgcggggaagagagtgagcaaatcgagctactcaatattcgcaaagaaacgcatgaagaatatgcgctgagtcgtccgcgcgggctgcgtgaagcgttgctgatcgtcgcctccttcctgatgttctttttctgcctgattaccccggatgtatttgttccgtggctggcaggcggcgcattactgctgctgggcgcaggtctgtgggggctattcgcgcccccggcaaaatcctccctgcgagaaattcattgtctgcgcggtacaccccgtcgttggggattgtttggcgaaaacgatcaggaacagatcaacaatatttcactcggtattatcgacctggtctatcccgcacactggcagccatacattgctcaggatctcggtcaacaaaccgatattgatatctatctcgaccgccacgtagtgcgtcaggggcgatatctttcgctgcatgatgaagtaaaaaactttccgttacagcactggctgcgcagtacgattatcgctgcgggctcgctgctggtgctgtttatgctgttattctggatcccgctggatatgccgctgaaattcactctctcatggatgaaaggcgcgcagaccattgaagccaccagcgtaaaacaactggctgacgctggcgtgcgggtaggcgatacattgcgtattagcggtacgggaatgtgtaatattcgcacttccggaacctggagcgcgaaaaccaattcaccttttttaccgtttgactgctcgcagatcatctggaatgacgcccgctcattaccattaccagaatctgaactggtcaacaaagcgacggcattgactgaagcagttaatcgccagctgcaccctaaaccggaagatgaatctcgcgtcagtgcctcattacgttcagcgattcaaaaatccggcatggtattgcttgatgattttggcgacattgtactgaagacagcggatttatgttctgccaaagatgactgtgtgcgactgaaaaatgcgctggtcaatctcggcaacagtaaagactgggacgcgctggtaaaacgcgccaacgccgggaagctcgatggcgtgaatgtgttattacgcccggtgagtgcggaatcgctggataacctggtggcaacctccaccgcgccgtttatcacgcatgaaacggcgcgagcggcacaatcactaaacagtccggcccccggcggattcctgattgtcagcgacgaaggcagcgattttgttgatcagccctggccttcggcatcactttacgactacccgccgcaagaacagtggaacgctttccagaaactggcacaaatgctgatgcatacgccgtttaacgccgaaggtatcgtcacaaaaatcttcactgacgccaatggtacgcagcatattggccttcatccgatcccggatcgttccggcctgtggcgctatctcagcaccacattgctgctactgacgatgctgggtagcgccatttacaatggcgtacaggcctggcgtcgttaccagcgtcatcgcactcgcatgatggagattcaggcctattatgaaagctgcctgaacccgcaactgatcaccccttcagaaagccttatcgaataacacgtttgcgcggcaggttatgctaccctgtcgcgcaaattgcttcactctggagatttccctcatgcatatcaacattgcctggcaggacgtagataccgttctgctggatatggacggcacattgctcgacctcgccttcgataactatttctggcaaaagctggtgcctgaaacatggggcgcgaaaaacggggttacgccacaggaagcgatggaatatatgcgccagcaatatcacgacgtacagcatacgctaaactggtactgtcttgattactggagtgagcaactgggtctggatatctgtgcgatgaccaccgagatgggaccgcgtgccgtactgcgtgaagataccattccgtttcttgaggcactgaaagccagcggtaagcagcgaattttgctcaccaatgctcatccgcacaacctggcggtaaaacttgagcatacgggtctggacgcacaccttgatttattactttccacccacacatttggttatccgaaagaggatcagcggttatggcatgcggtggccgaagctacgggtctgaaagctgaaagaacgctgtttattgatgacagcgaagcgattctcgatgctgccgcgcaatttggtattcgttactgcctcggcgtgactaatcctgattccgggattgccgagaaacagtatcaacgccatccgtcactgaatgactaccgccgcctgatcccctcgctaatgtgaaggagacgccatgaaagaaaaacctgctgttgaggttcgactggataaatggctatgggctgcccgtttttataaaacccgcgcgctggcccgtgaaatgattgaaggcggtaaggtgcattacaacgggcagcgcagcaagccgagcaaaatcgtcgagctgaatgccacgctcactctgcgccagggaaatgacgaacgcacggtgattgtaaaggcgattactgaacagcgtcgccccgccagcgaggcagccttgctgtatgaagagactgcggaaagtgtagagaaacgcgaaaaaatggcgctggcacgtaaacttaatgccttaaccatgccgcacccggaccgacgcccggacaaaaaagagcgccgcgacctgttacgatttaaacacggcgacagtgaataactgtcacctgcaagagagatgattatgccgcaacatgaccaattacatcgctatctgtttgaaaactttgccgtgcgcggcgaactggtaaccgtttcggaaaccctgcaacagatccttgagaatcacgattatccgcagcccgttaaaaacgtgctggcagaactgctggttgcgaccagcctgttaaccgctacgctgaagtttgatggtgatatcaccgtacagctgcaaggcgacggtccgatgaatctggcggttattaacggtaacaataaccagcaaatgcgcggtgtggcgcgcgtgcagggcgaaattccagaaaatgccgacctgaaaacgctggtcggcaatggttacgtggtgatcaccattaccccgagcgaaggcgaacgctatcagggcgtggttggtctggaaggtgataccctggcggcctgcctggaagattactttatgcgttctgaacagctgccgacgcgcctgtttattcgcaccggcgacgtagacggcaaaccggctgcaggcggtatgttgttgcaggtaatgcctgcgcaaaatgcccagcaggacgactttgaccacctggcgacgctaaccgaaaccatcaaaaccgaagaactgctgaccttaccggcaaacgaagtgttgtggcgtttgtatcacgaagaagaggtgacggtttacgatccgcaggatgtggagttcaaatgcacctgctcgcgtgaacgttgcgccgacgcgctgaaaacgctgcctgatgaagaagtcgatagcatcctggcggaagatggcgaaattgacatgcattgtgattactgcggtaaccactatctgttcaatgcgatggatattgctgaaatccgcaacaacgcgtctccggcagatccgcaagttcattaatgagtatgtccggcagagagggctctgccggattttacgacgtaatggcctgatgtgctgcgcttaccaggcctgtgaaataaatcgcaaattattgttggtcagatacagcgtcgtatccgttaaaagagttgtcacttacttaagtttatttccagcgtttcaccatctaccgtcagatcgcgccacgctttcggcctcgtccccagttttccatccttcgcagctgtgagtaatttttctttcgttatttcgttcggaagtaaactcatatcaagcgcgtcccattcttttctgtctgagtcaaagccatagacaatgactctgtcatcattaaaagcaaacaggatccgctccgcctgaccatcactattcagatcttgctcgaccaggacgcaggcgtctttttcaatacaggtcatcacgttatagcgatcctggattaaggccgaccagaatgtcgcatccggtttaacagaaccaggggcaattaacacattatcggctaatactttttccgatacctgttcctgaagatgttgctctccatctaacgccatcagcagatcccgcgcgcgtttcgggtctttcataaacccggcatcgcttttcagcgactcaagcgccgcacgtccatagcgaccgctctgttcgagcatatagagacttacctggtctggcgtgtttttgccgctctgataacgcgccatatgactgttcacgctaatacgcatactgtccagcagcggcgaattaagaagcaccagtatcaccaacaccaataacgaaaccgcaaggttcactttgccctgaagaacaaggggattttgcccattacgccagacgatactgacaaaataccccagcgaccacaccagtaacaccagcaccgccagcgcgccctgcaagcggtcgacagtccagccgtactgagcgacccgcagccataacgcccaggcggcgacgaacacatacagcggagcaaccagcaaagcggttttaatcaggcaacgcaacggccccgtccagggaagtgacgctttttgcggatcgcggacaatagccattaagatcaattgcaaaaaggccagcgttaacagcaacccggcggcggagatgtggcgagaaatcgcgctcaggcccgtaaacggcagggtgatgataaacatcagggttagcaatgatactaacggcagcaaccccgtggcgattagcgtgaacaacttttgaatagagtcgattaaacgtgactgtgtacgcgcgagaatcaccgccagtgcggtaaccagacctaatgtaagatacataaaccagtcggttgcaaaaaagagcgtattgaaaaacgtgatgccaacaagtttaaacaactcaccccacagtaaaagcaccagccacgtcaggccattggcgagaaaaatcaccagtaatataagtacgttatgccatactgactggtaaaagtagctatagcggctactgccattgcggatacgaaggctttgttgtatccacggtagcaacaacattgccatcaacagcagatagcagccaaaatcccaaatcgccttttctgctctccagtggttcatgccatcaatttgccactttagccaaccgctcatccctagcgtggcaataaacaccagcgccagccatccccaaaggcgcttctgtttaaaggagatcacggagaagagtaaaacggatgaaaacgcgacggtcgcaggcacgccataaacaatccaactgagattttttccggcaagccaggcgatcagcaggtagcaaaccagatcctgaagtaatccggtagcaatcatcccccagcgtgttgcgggtgaaagttcaacgttatccatgttagttatccagaatcaaaaagtgggttaattatcgcatccgggccgtagtattttgcttttttcagaaaataatcaaaaaaagttagcgtggtgaatcgatactttaccgattgaatttgcatcaatttcattcaggaatgcgattccactcacaatattcccgccatataaaccaagatttaaccttttaagaacattttccacacctaaaatgctatttctgcgataatagcaaccgtttcgtgacaggaatcacggagttttttgtcaaatatgaatttctccagatacgtaaatctatgagccttgtcgcggttaacacccccaaaaagactttactattcaggcaatacatattggctaaggagcagtgaaatgcgcgttaacaatggtttgaccccgcaagaactcgaggcttatggtatcagtgacgtacatgatatcgtttacaacccaagctacgacctgctgtatcaggaagagctcgatccgagcctgacaggttatgagcgcggggtgttaactaatctgggtgccgttgccgtcgataccggtatctttaccggccgctcaccaaaagataagtatatcgtccgtgacgataccacccgcgacaccttctggtgggctgataaaggcaaaggtaagaacgacaacaaaccgctctctccggaaacctggcagcatcttaaaggcctggtgaccaaacagctttccggcaaacgtctgttcgttgtcgacgctttctgtggtgcgaacccggatactcgtctttccgtccgtttcattaccgaagtggcctggcaggcgcatttcgtcaaaaacatgtttatccgcccgagcgatgaagagctggcaggtttcaaaccagactttatcgttatgaacggcgcaaaatgcactaacccgcagtggaaagaacagggtctgaactccgaaaacttcgtggcgtttaacctgaccgagcgcatgcagctgattggcggtacctggtacggcggcgaaatgaagaaagggatgttctcaatgatgaactacctgctgccgctgaaaggtatcgcttctatgcactgctccgccaacgttggcgagaaaggcgatgttgcagtgttctttggcctttccggcaccggtaaaaccaccctttccaccgacccaaaacgccgcctgattggcgatgacgagcacggctgggacgatgacggcgtatttaacttcgaaggcggctgctacgcaaaaactatcaagctgtcgaaagaagcggaacctgaaatctacaacgctatccgtcgtgatgcgctgctggaaaacgtcaccgtgcgtgaagatggcactatcgactttgatgatggttcaaaaaccgagaacacccgcgtttcttatccgatctatcacatcgaaaacatcgttaagccggtttccaaagcgggccacgcgactaaggttatcttcctgactgctgatgctttcggcgtgttgccgccggtttctcgcctgactgccgatcaaacccagtatcacttcctctctggcttcactgccaaactggccggtactgagcgtggcatcaccgaaccgacgccaaccttctccgcttgcttcggcgcggcgttcctgtcgctgcacccaactcagtacgcagaagtgctggtaaaacgtatgcaagcggcaggtgcgcaggcgtatctggttaacaccggctggaacggcactggaaaacgtatctcgattaaagatacccgcgctattatcgacgccatcctcaacggttcgctggataacgcagaaactttcactctgccgatgtttaacctggcgatcccaaccgaactgccgggcgtagacacgaagattctcgatccgcgtaacacctacgcttccccggaacagtggcaggaaaaagccgaaaccctggcgaaactgtttatcgacaactttgataaatacaccgacacccctgcgggtgccgcgctggtagcggctggtccgaagctgtaatgatttgaagctggagaatatctatccagtatcttatagaaagcaaaacgggaggcaccttcgcctcccgtttatttacccttcttttgtcgtgccctgcgcccgcgttaccggcactggcagccaggcgcgaatggaaagcccgccccgctcgctggtgccaagctccagcatcccgttatggttatccacgatacgctgcacaattgccagccctaatcccgtgccgctaatggtgcgcgcactgtcgccgcggacaaacggctggaacaggtgcttacgttgttccggcgcaattcccggaccgtcatcttccacctggaaccaggcgcgattcggctccgttccgctgctgactttgatccagccattgccataacgggcggcgttgaccaccatattcgccaccgcgcgtttgatcgacagcgggtgcattttcacttcaatgctgccggggtaaagcgcggtttcaatttcccgctcatagccactttcggcagcaatcacctcaccgagtactgcattaagatccgccatttccatcggcatctcctgcccggtgcgcaggtagtcgataaactgctcaatgatggcgttgcactcttcgatatctttattgatcgattctgccagatagccatcctgctcgctcatcatctcagtcgccaggcgaatacgcgtcagcggcgtgcgcaagtcgtgacttacccccgccatcagcagcgtgcggtcatccgccagttgcttaacaccagccgccatatggttaaaggcacgggtaacggaacgcacctccgaagcgccatactcacgcagcggcggcggaataatccctttaccaacctgcaaggctgcgtgttcgagatcgaccaacggtcggttctggatacgaataaacagccacgccccgcctatcgccaatagcataatcgccagcgtatagcggaacagcggagagaaatcgccctgatgaatttcggtcagcggcacgcgtacccagatattgggcgacagccaggttttcagccagacgacaggcgaacttttgttgacctcaacgcgcacttccgtcgggccgcccagttgctgtgccatctgatggcttaagaattcatagtgttgcgcccaacgcagacctgcctcttcggcagcctcgttggagtagagagagatccccagctcacggtagatctcccgacggaaagcgggaggcacaaccaactgcgtgccgtcctccagttgcagtttgtcggtcatcaacatacgcacttcgtacgcgaggactttattaaactgctggaggctcggcaaaatcgcgaagttcagcaccaccagataagtcgtcaccaggctggcgaacagcaaggtgacgatgagcaataacgtacgggcaaatgaacttcgtggcgagaagcgcaatcgcctcatgctttagagccgtccggtacaaagacgtagcccaggccccaaacggtctgaatgtaacgcggatgcgctggatcttcttctaccatgcggcgcagacgcgaaatctgcacgtcgatggagcgttccattgcggaatattcacgaccacgggcaaggttcatcagcttatcgcgggagagcggctcacgcggatggctgaccagtgccttcagtaccgcaaactcaccgctggtgagcggcatcggctcatcttcgcggaacatttcgcgcgtaccgaggttaagtttgaacttaccgaaagcaattaccgcctcttcctgtgacggtgcgcctggcagttcgttcgcctgacgacgcagcaccgcacgaatacgggccagcagttcacgcgggttaaacggttttggaatgtagtcgtcagcgccaatctccaggcctacgatacggtccacttcttcccctttcgccgtcaccataatgatcggcatcgggttgctctgactacgaagacgtcggcaaatcgacaagccatcttcaccaggtaacattaaatccagtaccataagatggaaagattcacgagtcagcaggcgatccatctgttctgcattagcgacgcttcgaacctggaagccttgttcggtgagataacgttccagcagcgcacgcaggcgcatgtcgtcatcgaccaccagaatcttgtagttctcttgcattgtttgtactcccaaaggttcgcaacaatttgtaagcgtgtattcttaaaaaagctcacgttcgtcaccagctaaatctggtatgaatttcagcctaaattgttacaaagcatattaaacagcagcttaagtatacaatttattcggcgaaacattattgattctgttgatatgatcacgttatacccaatgtgcgcattatcaaacagacaaagggaatcaacgagatgaaaacgcccctggttacccgggaagggtatgaaaaactcaaacaagagcttaattatctctggcgtgaagaacgcccggaggtcacaaaaaaggtgacctgggccgcaagtctgggcgaccgcagcgaaaatgctgactatcagtataataaaaagcgtctgcgtgaaatcgaccgtcgcgtgcgctatctcactaaatgcatggaaaatctcaaaatcgtcgattactcccctcagcaggaaggcaaagtcttttttggcgcgtgggtggagattgaaaacgacgatggcgtgactcaccgtttccgtattgtcggctacgatgaaatttttggccgtaaagattacatctctatcgattccccgatggcccgcgcattgctgaaaaaagaagtcggcgatctggctgtggtgaatactcctgccggggaagcgagctggtatgttaatgctatcgagtacgtgaaaccgtaaggaagagtcttaacctcctgccgatggctggcatttttgccagccagtccgtataactatcccctgatttttgatccgaaaagatgaactcaaaccatgatgaatgattcgttctgccgcattattgcgggtgaaattcaggcgcgcccggaacaggttgacgctgccgttcgcctgcttgacgaagggaataccgtgccgtttatcgcacgttatcgtaaggaaatcaccggcggtctggatgacacgcagctgcgtaatctggaaacgcgtctgagctatctgcgcgagctggaagagagacgtcaggcgatcctcaagtccatttccgagcaaggcaaactcaccgatgatctggcgaaggccatcaacgccaccctaagcaaaaccgaactcgaagacctctacctgccctacaaacctaaacgccgcacccgcgggcaaatcgccattgaagcagggcttgagccgttggctgacctgctgtggagcgatccgtcacacacgccagaagtcgccgctgcacaatatgttgatgccgataaaggcgtggcagataccaaagccgcgctggacggcgcgcgctatatcctgatggaacgttttgccgaagatgccgcgctgctggcgaaagtgcgtgattatctgtggaagaacgcgcatctggtctcaaccgtggtgagcggtaaagaagaggaaggggcaaaattccgcgactatttcgatcatcacgaaccgttgtccacggtgccttctcaccgcgcgctggcgatgttccgtgggcgtaacgaaggcgtactccagctttcgctgaatgccgatccgcagttcgatgagccgcccaaagagagctattgcgagcaaatcatcatggatcaccttggcctgcgcctgaacaatgccccggcggatagctggcgcaaaggcgtagtgagctggacctggcgcatcaaggtgctgatgcatctggaaaccgaactgatgggtaccgtgcgcgaacgcgcggaagatgaagcaatcaacgtctttgcccgtaacctgcacgatctgctgatggcggcccctgccggactgcgtgcaacgatgggcctcgatccgggtctgcgtactggggtaaaagtggcggtggtcgatgccactggcaaactggtagcgaccgataccatttacccgcacaccggacaagccgcaaaagcagcgatgactgttgctgcgctgtgtgaaaagcataacgttgaactggtggcgatcggcaacggtacagcttcccgcgaaaccgaacgtttctatctcgacgtgcagaagcagttcccgaaagtgaccgcacagaaagtgatcgtcagcgaagctggcgcgtcggtttactcggcttccgagctggcagcgcaggagtttccggatctcgacgtttcgctgcgtggcgcggtgtctatcgcccgccgtttgcaggatccgctggcggagctggtgaaaatcgatccgaaatctatcggcgtaggtcagtatcagcatgacgtcagccagacgcaactggcccgcaaactggacgcagtagtagaagactgcgtaaacgccgttggcgtcgatctcaacactgcttctgttccgctgttaacccgcgtggcgggcctgacgcgcatgatggcgcaaaacatcgtggcctggcgcgatgagaacggtcagttccagaaccgtcagcaactgctgaaagtgagccgtctggggccgaaagccttcgagcagtgcgcgggcttcttgcgcattaaccatggtgataacccgctggacgcgtctaccgtccacccggaagcctatccggtggtggaacgcattctggcagcaacacagcaggcactgaaagatctgatgggtaacagcagcgaactgcgtaacctgaaagcgtctgactttactgatgaaaaattcggtgtgccgacagtaactgacatcatcaaagagctggaaaaaccgggtcgcgatccgcgtccggaatttaaaaccgctcagtttgccgatggcgtcgagacaatgaacgacctgcaaccgggtatgatcctcgaaggtgcggtgaccaacgtcaccaactttggcgcgtttgtcgatatcggcgtgcatcaggacggcctggttcacatctcttcattgtcgaacaagtttgtagaagatccgcataccgtggtgaaagcgggcgacattgtgaaggtgaaagtgctggaagtggatcttcagcgtaaacgtatcgccctgaccatgcgtctggacgagcagcctggcgaaaccaacgcccgtcgcggcggcggtaatgaacgcccgcaaaacaaccgcccggcagccaaaccgcgcggacgtgaagcgcagcctgccggtaacagcgcgatgatggacgcgctggcggcagcaatgggcaaaaaacgttaaacgccctgattgacccctaaacctgcgcgataaggtgtccacgccgcatctggcaacgaacgccttgtctgacataaaagtgccggagaatatctccggcatttttattccacagccaaactcacaatatattccggcaacatttatcacttcattaacaactgaaaccttaattaaacattagccagtcctggtaattcgctattcgaattatattttcgctgcgatataaccttgagccacatcaacattgagtcagattattattcaaaccaacattcgcacacattttaagtattgctgatagaaaccattctcattatcattgtgttgttgattatttaatctctcctttgttggcaaatcatctggtctcatgtcgctgtcaaacgccccatgaggtagttatccagttaatgagaaacaagtaggcacctatgcaatacactccagatactgcgtggaaaatcactggcttttcccgtgaaatcagcccggcatatcgccaaaaactgctttctcttggcatgttacctggctcctcttttaatgtggtgcgcgtcgctccactcggcgaccccattcatatcgaaacccgtcgtgtgagcctggtattacgcaaaaaagatctggccttattagaagtggaagcggtttcctgttaatacggtgataacaacaatgaaaaaattaaccataggcttaattggtaatccaaattctggcaagacaaccttatttaaccagctcactggcgcacgtcagcgtgtaggtaactgggctggcgttaccgtcgaacgtaaagaagggcaattctccaccaccgatcatcaggtcacgctggtggacctgcccggcacctattctctgaccaccatctcatcgcagacctcgctcgatgagcaaatcgcctgtcactacattttgagtggcgacgccgacctgctgattaacgtggtggatgcgtctaaccttgagcgtaacctgtacctgacgctacaactgctggaactcggcattccctgcattgtggcactgaacatgctcgacattgccgagaagcaaaatattcgtattgaaattgatgctctgtcggcgcgtcttggctgcccagtgatcccgctggtttcaacccgtggtcgcggtattgaagcgctcaagctggcgattgatcgctataaagctaacgagaatgtggaactggtgcattacgcacagccgctactcaacgaagcagattcactggcaaaagtgatgccttccgacatcccgctgaaacaacgtcgctggctgggcctgcaaatgctggaaggcgatatctacagccgcgcctacgccggtgaagcgtcgcagcatctggatgccgccctcgcccgtctgcgtaatgagatggacgatccggcgctgcacattgccgatgcgcgttaccagtgcattgctgccatctgtgatgtggtaagcaacaccctgacggcagaacccagccgtttcaccactgcggtagataaaatcgtgctcaaccgtttcctcggtctgccgattttcctctttgtgatgtacctgatgttcctgctggctatcaacatcggcggggcgttacagccgctgtttgacgtcggctccgtggcgctatttgtgcatggtattcaatggattggctacacgctccacttcccggactggctgactatcttcctcgcccagggcctgggtggcggcattaacaccgtgctgccactggtgccgcagattggcatgatgtacctgttcctctccttccttgaggactccgggtatatggcgcgtgcggcgtttgtgatggaccgtctgatgcaggcgctgggcttgccggggaaatcctttgtgccgctgatcgtcggtttcggttgtaacgtaccgtcggtaatgggtgcacgtacgcttgatgcaccgcgtgaacgtctgatgaccatcatgatggcaccgtttatgtcctgcggcgcgcgtctggctatcttcgcagtattcgcggctgccttcttcgggcagaacggtgcgctggcggtcttctcgctgtatatgctgggtattgtgatggcggtgctgactggcctgatgctcaagtacaccatcatgcgcggtgaagcgacgccgtttgtcatggagttgccggtctatcatgtaccacacgttaaaagcctgattatccagacctggcagcgtctgaaaggcttcgttctgcgtgctggtaaagtgatcatcatcgtcagcattttcctgagcgctttcaacagcttctcgctgagcgggaaaatcgtcgataacatcaacgactcggcgctggcgtccgtcagccgggtgatcaccccagtcttcaagccaattggcgtgcatgaagataactggcaggcaacggttggcctgtttacaggtgccatggcgaaagaagtggtagtgggtacgctcaacaccctctacaccgcagaaaatattcaggacgaagagttcaatccggcagagtttaacctcggtgaagagctgttcagtgcgatagatgaaacctggcagagcctgaaagacaccttcagccttagcgtactgatgaaccccattgaagccagcaaaggcgacggcgaaatgggtaccggggcgatgggcgtgatggatcagaaattcggtagcgcagcagcagcttacagctacctgattttcgtcctgctgtatgtaccatgtatctcggtgatgggagccatcgcccgtgaatcaagccgtggctggatgggcttctccatcctgtgggggctgaatatcgcttactcgctggcaacattgttctatcaggtcgccagctacagtcagcacccaacttacagcctggtgtgcattctggcggttatcctgtttaacatcgtggttatcggtctgctgcgccgcgcgcgtagccgggtggatatcgaactgctggcaacccgcaagtcggtaagcagttgctgcgcagccagcaccaccggtgattgccattaatggcttcacttattcaggtgcgcgatttgctggcgttacggggccgtatggaagcggcccagataagccagacattgaacactccacagccaatgattaacgccatgctgcaacaactggaaagtatgggcaaagccgtgcggattcaggaagaacctgacggctgcctctctggcagttgtaaaagctgcccggaaggaaaagcctgtctgcgcgagtggtgggcgctgcgttaaccttactccatcgcctgttttggaaagcccggtatgcgtctgcatccgggcttttttgcgtgcggctttccataaaaatgcaactcttgcagcacggcgtaagttcctttgaaagcatctcgcagggatgaaaactcgctaatacacaggtgtggagtggcgcgtagagtcgcggcattcaaacaacaggtgaaggaacgccatgagcaaaaagcagagttccaccccacacgatgcgctgttcaaactctttttacgccaaccggacacggctcgtgattttcttgcgtttcatttaccggcacccattcacgcgctttgtgatatgaaaaccctcaagctggagtcgagcagctttattgatgacgatctgcgtgaaagctattccgatgtgctgtggtcggtgaaaacggaacaaggaccaggatacatctattgtctgattgaacatcaaagcacctcaaacaaactgatcgcatttcgcatgatgcgttacgctattgccgcaatgcaaaatcaccttgatgctggatacaaaacgttgccgatggtggtgctattgttgttttaccacggtattgaaagcccctatccctattcgctgtcttggctggattgtttcgccgatcccaaactggcaaggcagctttatgcctccgcatttccgctgattgatgtcaccgtcatgcctgatgatgaaatcatgcagcaccgacgtatggcgctgctggagttaattcaaaaacatattcgtcaacgcgacctgatggggctggtagagcaaatggcctgcttattaagtagtggatacgctaatgacagacaaatcaaagggctgtttaattacatactgcaaaccggcgacgcggtacgttttaacgattttatcgacggcgttgccgaacgttcaccgaaacacaaggagagtttaatgacaattgcggaaagattgcggcaggagggggaacaatccaaagccctgcatatagccaaaataatgcttgaatccggagtccctcttacagacatcatgcgctttactggggtgtcagaagaagagttggctgcggcgagccagtaaatttctgtctcgccatttcaaaagttgcctacaccctctgcttcaacgccaccagcaggtgacaaaactcgaccggatgcgaaataaacggcgcatgggccgctttggcgaagatatatgattcgctgtgaggccaaagtttatccagcatcggcaccactttgcgcggcaccagaccgtcgagatagccatacaatcgcaaaaacggcatggacacgttttgcagcggctgacggagatcgaccgttttcaggatttccagcccgccattaagcacgtcaacctccggcatcggtaacgccagaacggttttcttcaacgcccgcgcatcctggcgcgccgtttcagtccccatggtttgtaacgccaagaaccgctccactgtacgctgaaaatcatcactgagttgctgctgaaatcccgccagcacgtccggttttatccccggccactcgtcacgagcactaaaacaaggtgacgacgccacggtgaccagcgcctgaacacgctcgggatgggttaacgcaatctggcttgccaccagcccgcccagactccagcctaaccaaatggctttatcaggtgcctgttgcagcacggcttcggccatatcagcaagtgacagcgcaccaaatccccggctacgcccgaagccgggcaggtcaacaaggtgcagcgtaaaatgcgagctaagttcctcgtcaatgcaacgccacacttcggcattcagtccccatccgtgcagcagcacaagatgaacattcccctgacctttggtctgccaccagatgttattcatccgctattgttctcttttgacttacaaggatgaacatatgctaacagtaccgggattatgctggctatgccgaatgccactggcgttaggtcattgggggatttgttcggtctgttcacgcgccacccgcacagataaaacgttatgcccacaatgtggattacccgccacacactcccatcttccctgcggtcgctgcctgcaaaaaccgccgccctggcaaagactggtcacagttgccgactatgcgccgccgttaagtctgctcatccaccagcttaaattttcccggcgcagtgaaatcgccagcgccctgtcacgtctgttactattggaagtcttgcacgctcgtcgcaccaccgggttgcaattgccggatcgcatcatcagcgttccgttatggcagcggcgtcactggcgtcggggatttaatcagagcgatttgctgtgtcagccgttatcacgctggttgcactgccaatgggatagcgaagccgtcacacgtacacgggccactgcgacccagcattttctcagtgcccggctgcgcaagcgcaacctgaaaaatgcctttcgtcttgaattgcccgtgcaaggtcgccatatggtgattgtggatgatgtcgttaccaccggaagtaccgtcgcagagattgcgcagttgcttttacgcaatggtgcggcgactgtccaggtctggtgcctttgtcgaaccttgtagagcctcgatgatgggcgtattataaccaactaaaatagtcaactattaggccattactatgatccgtatttccgatgctgcacaagcgcactttgccaaactgctggcaaatcaggaagaagggacacaaatccgcgtatttgtgattaaccctggcacgcctaacgctgaatgtggtgtttcttattgtccgccggatgccgtggaagccaccgacactgccctgaaatttgacctgctgaccgcgtatgttgatgagttaagcgcaccatacctggaagatgcagagatcgactttgttaccgaccagttgggttctcagttaacgctgaaagccccgaacgccaaaatgcgtaaagtggcagacgatgcaccgctgatggagcgcgtggagtatatgctgcagtcgcagatcaacccacagcttgctggtcacggtggtcgcgtttcgctgatggaaatcaccgaagacggttacgccattctgcaatttggcggcggctgtaacggttgttccatggtcgatgtgacgctgaaagaagggatcgagaagcagctgctaaacgaattcccggagctgaaaggtgtgcgcgatctcaccgaacaccagcgcggcgaacactcctactactaagttatcccctcttttgtagattgcccgatgcgacgctaaagcgtcatttcgggcctacgttgaacatgtgccagacgttggcacagcattgctttggcaaatccctcccttcgtttccccgcgataatatgaccaacctctcataatttaaatttaccccgctctggtgattctcaaacgccagatgttacccgtatcattcacatgggtaccaaacatactcctgacatctgactacaataattagttttagtgggtatcagtcgtggtgccgcaatatctctgttcccgattgggataattagagtttgtcgtcagaaaattgacgttacccataacaaatgaaaggccaggtaaatcatgccattagtcattgttgctatcggtgtaatcttgttgttgctcctgatgatccgcttcaaaatgaacggcttcatcgctctcgtcctcgtggcgcttgctgttggattaatgcaaggaatgccgctggataaagttattggctccatcaaagccggtgtcggcgggacgctcggtagccttgccctgatcatgggttttggcgcaatgctgggcaaaatgctggcagactgcggtggcgcacaacgtatcgccaccacgctgattgccaaatttggtaaaaaacacatccagtgggcggtggtactgaccggttttaccgttggttttgccctgttctatgaagtgggctttgtgctgatgctgccgctggtgtttaccatcgcggcttctgcgaatattccactgttgtatgttggtgtaccaatggcagctgcactgtctgtgacccacggcttcctgccaccgcatccgggtccgactgcgattgccaccattttcaatgccgatatgggtaaaaccctgctgtacggtactattctggcaatcccgaccgtgattctcgccggtccggtttacgctcgcgtgttgaaaggtatcgataagccaattccggaaggtctctacagcgcgaaaaccttcagcgaagaagagatgccgagctttggcgtcagcgtctggacctctctggtgccggtagtactgatggcgatgcgtgcgattgccgaaatgatcctgccgaaaggtcacgctttcctgccggtagcggagttcctcggtgacccggtaatggctacgctgattgccgtgctgattgccatgttcacctttggtctgaaccgtggtcgttcaatggatcagattaacgacacgctggtttcttccatcaaaatcattgcgatgatgctgttgatcatcggtggtggcggtgcgttcaagcaggtgctggtagacagcggcgtggacaaatacattgcttccatgatgcacgaaaccaacatttctccgctgctgatggcctggtcgattgctgccgtactgcgtatcgcgctgggttccgcaaccgttgcggcaatcactgcgggtggtatcgcggcaccgctgattgcaacgacgggtgttagcccggagctgatggttattgcggtgggttccggtagtgtgattttctctcatgtgaacgatccgggcttctggctgttcaaagagtactttaacctgactatcggcgagaccatcaaatcctggtcgatgctggaaaccattatctcggtgtgcggtctggtaggctgtctgctgctgaatatggtgatttgataacactgactgccggatgcatcgcatccggcatcaaccgcactctacttcttcttcgctgcagctctgcgccgtctgtccaaatccttcagcaacttgttcacgccatcatcggcaaacatcgactcaagcgttgcggaaagcttgcgtcgccagtttttatactggtaactggtgccaggaatattcaccggttcggccatatccagccagtcttccggctgtagtcctaacagagcactgttactgtcggcaatgtagcgctgcaaaccacggttcagcgtcggcgtcatcgacatcaacgatgccttatgcccggcacgttttggcagacaaccatatttatgcagtgcatccagcagcccttgcttcgccagttcgcgatcctgatacagaccgcgcagtaccacttcatccggatacagccccagggttttgcccaacgttagatccccgctctcccagtaaccgcgcagcgtaggcaggtcatgtgtcgccgcaaccgccatcgactgctccggatacgctttcggtgcacggaacgtcttctcgtggtcgttttcgaaatagagcactttgtaggagtacacaccgctgctgcgcagcttaccgacaatctctaccggtacggtaccgagatcttcaccaatcaccatacagcgatgacgtttactttcgagtgccagaatcgagagcagatcatccaccggatagtgaacatacgcgccctgatctgccgtctcgccatacggtatccaccacaaacgcagcatcgacatcacatggtcaattcgtaatgcgccgcagttttgcatattggcacgcaacagctcgataaacggttcataggcacgcgcggtgatgatatgcgggtccattggcggtaatccccagttctgccccaacgggccgaggatatccggcggcgcgccaaccgacgctttcaggcaatatagttcacgatcacaccaggtttccgccccaccttccgctacgccaaccgccagatcacgatacaagccaatcggcatttcatagccctggcttatctcccagcaggcggcaaactggctgtaagccagccactgcaaccagagataaaaatcgacgtcatcacgatgttcttcgcagaactgacgcacttctggtgaatccacgttctgatacatctctggccatgcaggccagccccagcgcatttcgtcctctttcacttgctgggcatgtagcgcatcaaaggctgcctgccagaacaggctgtcgccctgctctgcaacaaactggcgaaacgcggtcatctgctcatcatcacgttgcgcgaaacctttccacgccattcgtaatgctgtcatttttagggcggtaaccgtggagtaatcgacccagtcggcatcgcgcgcctgttgcagcgtctgttgcgtggtcggcaactgccaccaggcctgagcctcttcgctaagatggaaatcttcaacggcgttaacgtcgatataaatcacattcagccaacggcgagaagacgggctgtatgggctggcactctccggatttgccggatagagcgcatgaatcgggttcaggccgatgaacgacccgccacgttttgccacatccaccagcatcgctttgagatcgccaaaatccccaataccccagtttttttccgatcgcagcgtataaagctgaacgcaggcaccccacagcttttgtttattcagcaacgcctgcggttcgtaacagcgtttcggggcgacaatcacccggcaatgcgcgcgctggtcgtcctgggtgagtgtcagcgtgtgataaccttccggcagcttcgtcggtagattgaacgctttgccccccgttacatggcctttgtactgtgttccttcttcggtggtcagcagccagctatattcgccgctgccctccaccaccatcggcatttttttgccgctggtataaaccatgacattcgggactggcgttaccgccactttcgtggcggtacgttgatgcatcgcgtcaagcaaacgccgtttggtttcggcgctaatcgactgcggtttaccgtgggcattgatgtaattggggctaatccccgccgccagcgcggcattatccagacgtttgctttccatcgagcttccttagcgttttgcctgccagatacgagcctgataatcgcgaatagagcgatccgagctaaacataccgcagcgggcggtattgaggatcgccgcgcgagtccaggcctcctggtcgcggtacagcacatccacctgcttttgtgcctcaacataggctgcgaaatccgccatcaccagatacggatcgccgccttgtttgccgatactgtgcagcatctggtcgaaggcatgcttatcgccgtcgctgtatttaccgctttccagctctttcaatactgcgtccagcaccttatctttcttccgccatttcaccgggtcgtagcctttggccagaattgccttcacttgttccacggtatgaccaaaaataaagatattttcttcaccgactttctcggcgatttcaacgttcgcaccatccagcgtaccgacagtaagcgcaccattgagcgccagtttcatattgccggtaccggaagcttctttacctgcagtcgaaatttgttcggagatatccgccgccgggatcagtttttccgccgccgaaacgcaataatccggcaggaacaccaccttcaacttatcgccaaccagtggatcgttgttgatcacgtcagccactttgttgatcgcaaagataatattcttcgccaggtagtagcccggtgccgctttcgcgccgaagaggaagacgcgcggtacgcgatcagcctgcgggttttcacgaatttctttgtacaacgccagaatatgcagcagattcaggtgctggcgtttgtactcatgcagacgtttgatctgaatatcgaaaatcgcctgtggattgatctcaataccagtacgaactttcacaaactccgccagacggactttattcgcctgcttgatctcgcgatattgctgacggaatttcgcatcatcagcgaatttttccagattgatcagctgatcgagatcgttagcccactctttttgcagtgatttatccaacagagccgccagtgcagggttgcactgtttgatccagcgacgtggggtaataccgttggtgacgttatggaatttgttcggccatagctggtgatattccgggaacagatctttcaccaccagatccgagtgcagcgccgcaacaccgttcaccgcgaaaccgccaaccacacacaggttcgccatatgcacttgtttatcgtgcaccaccgccagtttggcccacactttttcatcgcccggccaggttttctccaccagcgttttaaagcgagtattaatttcgttaataatctgcatatggcgcggcagtaagcctttcaccagtttcacatcccagcgttccagcgcttctggcatcagggtatggttggtgtaagcgaaagttttgctggtaatggcccaggcgtcatcccagctcatctggtgctcatcgatcagcacgcgcagcagttctggaatcgcgatagttgggtgggtatcgttcagctgaataacttcgtaatccgccagttcgtgcagtttacgccccgccagatgatggcgacgcaaaatatccgctaccgaacaggcacactggaagtactgctgcatcaagcgcagctttttaccggcagtatggttgtcgtttggatagagaactttggtcagtttttccgcattgatgccctgctgttcggcacgcaggaaatcaccgtcgttaaatttagtcagatcaaacggatgcgcgtgcgtcgcctgccacagacgcagcggctgcgccacgccattacgatagccgacaacggggagatcccacgcttgaccggtaatggtaaactccggctcccagcgtccgtctttcgtcactttaccgccaatccctacctgcacatccagtgcttcgttgtggcggaaccacgggtagttactgcgatgccagtcatccggcgcttcaacctgtttgccatcgacaaaagactggcggaacaaaccatattgatagttcagaccgtaacccgtcgcagactgaccgacagttgccattgagtcgaggaagcacgccgccagacgtcccagaccaccgttacccagcgccgggtcgatctcttcttccagcaggtccgtcagattgatgtcataagccttcaacgaatcctgtacatcctgataccagccgagattcaacaggttgttgcccgtcaggcgaccaatcaaaaactccattgagatgtagttaacatgtcgctgattcgccaccggcttggcgaatggctgagcacgcagcatttcggccagtgcttcactcactgctagccaccactggcgaggagtcatttcagccgcagaatttaagccataacgctgccactgacgtgaaagcgcttcctgaaattgcttatcgttaaaaataggttgtgacataggagttccacttttcttagattttcaacacaacgttatcgctagtttgccaggctcgatgttgaccttcctcatcctgcgggggattaggcagggaggagttgcggggatgagcaaggaaatgtgatctcaaccacttaaagctagtgcaaaccacaggattagcagcaaatcaatgcaatacagcgcagaaaatctgtatctaagtgcaaaaaatggccgttgcgtattttcaaaaagcggaaggtaactctataaattaagtaaaggagtgaaacagtttcataagtaaaatatccagtgtgctccatctcattcttaatagatttattaagatcatctttttagatggcactttcatcaggaatgaagaagaaacccttgcttaaatgaatctgatgaacataagggaaaccagtattcacgctggatcagcgtcgttttaggtgagttgttaataaagatttggaattgtgacacagtgcaaattcagacacataaaaaaacgtcatcgcttgcattagaaaggtttctggccgaccttataaccattaattacgaagcgcaaaaaaaataatatttcctcattttccacagtgaagtgattaactatgctgattccgtcaaaactaagtcgtccggttcgactcgaccataccgtggttcgtgagcgcctgctggctaaactttccggcgcgaacaacttccggctggcgctgatcacgagtcctgcgggctacggaaagaccaccctcatttcccagtgggcggcaggcaaaaacgatatcggctggtactcgctggatgaaggtgataaccagcaagagcgtttcgccagctatctcattgccgccgtgcagcaggcaaccaacggtcactgtgcgatatgtgagacgatggcgcaaaaacggcaatatgccagcctgacgtcactcttcgcccagcttttcattgagctggcggaatggcatagcccactttatctggtcatcgatgactatcatctgatcactaatccagtgatccacgagtcaatgcgcttctttattcgccatcaaccagaaaatctcaccctggtggtgttgtcacgcaaccttccgcaactgggcattgccaatctgcgtgttcgtgatcaactgctggaaattggcagtcagcaactggcatttacccatcaggaagcgaagcagttttttgattgccgtctgtcatcgccgattgaagctgcagaaagcagtcggatttgcgatgacgtttccggttgggcgacggcactacagctaatcgccctctccgcccggcagaatacccactcagcccataagtcggcacgccgcctggcgggaatcaatgccagccatctttcggattatctggtcgatgaggttttggataacgtcgatctcgcaacgcgccattttctgttgaaaagcgccattttgcgctcaatgaacgatgccctcatcacccgtgtgaccggcgaagaaaacgggcaaatgcgtctcgaagagattgagcgtcaggggctgtttttacagcggatggatgataccggcgagtggttctgctatcacccgctgtttggcaacttcctgcgccagcgctgccagtgggaactggcggcggagctgccggaaatccaccgtgccgccgcagaaagctggatggcccagggatttcccagcgaagcgattcatcatgcgctggcggcaggcgatgcgctgatgctgcgcgatattctgcttaatcacgcctggagtttgttcaaccatagcgaactgtcgctgctggaagagtcgcttaaggccctgccgtgggacagtttgctggaaaatccgcagttagtgttattgcaggcgtggctaatgcaaagccaacatcgctatggcgaagttaacaccctgctagcccgtgctgaacatgaaatcaaggacatcagagaaggcaccatgcacgcagaatttaacgctctgcgcgcccaggtggcgattaacgatggtaatccggatgaagcggaacggctggcaaaactggcactggaagagctgccgccgggctggttctatagccgcattgtggcaacctcggtgctgggtgaagtgctgcactgcaaaggcgaattgacccgctcactggcgctaatgcagcaaaccgaacagatggcacgccagcacgacgtctggcactacgccttatggagtttaatccagcaaagtgaaattctgtttgcccaagggttcctgcaaaccgcgtgggaaacacaggaaaaagcgttccagctgatcaacgagcagcatctggaacagctgccgatgcatgagtttctggtgcgcatccgagcacaactgttatgggcctgggcacggctggatgaagccgaagcgtcggcgcgtagcgggattgaagtcttgtcgtcttatcagccacagcaacagcttcagtgcctggcaatgttgattcaatgctcgctggcccgtggtgatttagataacgcccgtagccagctgaaccgtctggaaaacctgctggggaatggcaaatatcacagcgactggatctctaacgccaacaaagtccgggtgatttactggcaaatgaccggcgataaagccgccgctgccaactggttgcgtcatacggctaaaccggagtttgcgaacaaccacttcctgcaaggtcaatggcgcaacattgcccgcgcacaaatcttgctgggcgagtttgaacctgcggaaattgttctcgaagaactcaatgaaaatgcccgcagtctgcggttgatgagcgatctcaaccgtaacctgttgctgcttaatcaactgtactggcaggccggacgtaaaagtgacgcccagcgcgtgttgctggacgcattaaaactggcgaatcgcaccggatttatcagccattttgtcatcgaaggcgaagcgatggcgcaacaactgcgccagctgattcaactcaatacgctgccggaactggaacagcatcgcgcacagcgtattctgcgagaaatcaatcaacatcatcggcataaattcgcccatttcgatgagaatttcgttgaacgtctgctaaatcatccggaagtgccagaactgatccgcaccagcccgttgacccaacgtgaatggcaggtcctggggctgatttactccggttacagcaatgaacaaattgcgggcgaactggaagtggcggcaaccaccatcaagacgcatatccgcaatctgtaccaaaaactcggcgtcgcccaccgtcaggctgccgtgcagcacgcgcagaaactgctgaagatgatgggttatggggtgtgagtttagccggataatgcattggatccggtttacatctttacatcattcaatactcacccgcgttacgccatctgtttctatcaaaccaaaccgcaccggcaagaaacgctccaccaccgcgatattggtcagcagatggcatgaaggatgggcgaccttaaattctcccgcgcccgccagcgccatcggcagtaccagttggtcggcgagatattcccccaccgccgctgggcttgccaggtagcgtttcacctctttcactaactgcgcggctaccacctcggcactgacgcgcttttcaccgacgacgaaaaagcgttcagtgatattttcactttcgacttccagcgagacggtattacccggcccctggtcgcgcggcaggttatgaatattctgttcatgcagggaaaaactccccgccagtgtagcgatttcacgctcagcaacatggcgcggcacaccagctaatagaacttctccacacatctgcacaatgttcccgcgctcgccaagttgcaaggtgttaaacgatgccacgggcgagacttccgttgccaccacaccgcctccggcaggataaaaaccgtgacgtaacagcgtggtttgctgatgaattcctattttcgccagcagcggctccagcacccggcggataaaatccgcaggcggggccgacgggttatcggtgcctccgctcacttcaacacgcgaaggtccatcggcaaaccacagcgcgggcagcaccgtttgcagcaccagcgtacagcttccggcactaccgatagcaaagcggtactcgccgccgcgcacggtgccaggccggaagaccagacgctgcgaccccagctccgcgccttccaccgttgccctacaaatttccgcagccgcttttaccgcggtcagatgctggcgcaacagccccggtttcgctcgcccggcacgaatgctggtgatggtaaatggctggccggttatcatcgacaggctcagcgccgagcgcaggatctgcccgccaccttcgccctgtgcgccatccagcgcaatcatccttttcatcatttatccttttacgcacaccacctgacgcagggtatagataacttccaccagatcgctttgtgccgccatcaccgcatcaatatctttatacgccatcgggatttcgtcgatcacttcggcatctttacggcattccacatgcgcggtggcacgaatttgatcttccacgctgaacagttttttcgctttagtacggctcattacccgcccggcaccgtggctgcacgaacagaacgactcttcatttcccagcccacggacgataaagcttttcgctcccatcgaaccgggaataattccatattgaccagcacgcgcagacaccgcgcctttacgcgtcacgtagatctcttcgccaaagtgctgttctttttgcacatagttgtggtgacagttgatctcttccatcgccagcgtttgctgttgtcttaccgttttctgcgtaacgctctgcaacgctgttactacgttttccatcattgcatcgcggttaaggctggcaaaaagctgcgcccaggccaccgctttcaggtaatcatcaaagtattccgtaccttccataaagtacgccagatcacgcgacggcaacgtttcaagctggtcctgcatctctttttgcgccagatcgataaagtaagtcccgatggcgttaccaattccgcgtgaaccggagtgcagcataatccacacctggtctgactcatcaaggcagatttcaataaagtggttacccgttcccagcgttcccaggtgtttatagttgttagtgttaaggaaacgcggatatttttgcgttaaccactgataaccggcttcaagctcagcccatttcgcatcgacgttaacaggcgggttttcccatgcgcctttatcacgtttacaacggccagtggtacgcccgtgcggcacggccatttcaatcgcctgacgcagctctgccaggttttcaggcaggtcttccgccgttaacgcggtacgcagcgcgttcattccacagccaatatccacgcccaccgccgccggaataatcgcccctttggtcgggatcacgctaccaatggtggaacctttacccaggtgtacatcaggcattaccgcaatatgtttgaaaataaacggcatcttcgccgtattaataagttgctgacgcgcatcggcttctaccggcacgcctttggtccacatttttaccggggcattttcagtggtcagtaattcgtaattcattttgtttttctcttttcgttgtttgctgtcgtgataattgcaaccgtcgtgccagaaaattaaataagcagattaattttttaattcattgtttttaaataggttaaatctttacgtccgtaaacggagattttccacaaaaccaattcaccgataatgaaatatcgtcttttataaggatatctaagatgcgtaaaacagtggcttttggctttgtcggtaccgtgctggattatgccggacgcggcagtcagcgctggtcgaaatggcgtccgacgctttgtttatgccagcaagaatcgttagtcatcgatcggctggaattgttgcacgacacccgctcgcgctcgctattcgaaacgcttaaacgcgatatcgccagcgtttcgccagaaacagaagtcgtgggcgttgagattgaactgcataacccgtgggatttcgaagaggtttacgcctgcctgcatgatttcgcccgtggttacgagtttcagccagaaaaagaagactatttaattcacatcaccaccggcacccacgtcgcgcagatttgctggtttctgctggcggaagcgcgttacctgcccgcccggctgatacaatcttcacctccgcgcaaaaaagaacagccgcgcggcgcaggtgaagtgacgattatcgatctcgatttaagccgttataacgccatcgccagccgctttgccgaggaacgccagcaaacgcttgattttcttaagtccggcattgccacgcgtaacccccacttcaaccgcatgattgagcagatcgaaaaagtggcgatcaaatcccgcgcgccgattctgcttaacggtccaaccggcgcgggcaagtcatttctggcgcgacgcatcttcgagttaaaacaggcgcggcatcagtttagcggcgcgtttgtggaagtgaactgcgccaccctgcgcggcgataccgccatgtcgacgctgtttggtcatgtaaaaggcgcgtttaccggggcgcgggaatctcgtgaaggtttattacgcagcgccaacggcggaatgttgtttcttgatgagattggcgaactgggcgcagacgaacaagcaatgctgctaaaagccattgaagagaaaaccttttacccgtttggcagcgatcgccaggtgagcagtgattttcagcttatcgccggaacggtgcgcgatttgcgccagctggttgccgaaggcaaatttcgcgaagatctgtacgcgcggatcaatctctggaccttcaccctgccgggtctacgccagcgccaggaagatattgaaccgaaccttgattatgaagtggagcgccacgccacactcactggcgacagcgtgcgttttaacaccgaagcgcggcgcgcctggttggcttttgcgacctctccccaggcaacatggcgcggtaactttcgcgaactttctgccagcgtcacgcggatggccacctttgccactagcggacgcatcactctggacgtggttgaagatgagataaaccgtctgcgctataactggcaggagagccgcccctccgcgcttacggcgttgctgggcgcagaggcagaaaacatcgacctttttgacaggctgcaactggaacacgtgatagctctctgtcgccaggcaaagtcgctttccgctgccggacgcctgctttttgatgtttcgcgccagggcaaagccagcgtcaatgacgcggatcggctacgcaaatacctggcgcgttttggtctgacgtgggaagccgtgcaggatcagcacagctccagttgaatatgatggtccgtcagcacctgcattacgcttactggcggcggggcgtcggtgtagacggcatctaccatgctgatgctgcccatattgaccatcgcgttacggccaaatttcgagtgatcgacaaccagcataacgtggcgcgagttctcaataatggcgcgcttggtgcgaacttcgtggtaatcgaactccagcagcgagccgtcgctatcgatgccgcttatccccagaatgccgaaatcaaggcggaactgggagataaaatcgagcgtcgcttcgccaatgatcccgccatcgcggctgcgtaattcgccaccggcgagaataatgcggaaatcttcttttaccatcaacgtgttagcaacattgagattgttggtgacaatacgcaaattgctgtgattaagcagcgcgtgcgccaccgcttccggcgtggtgccgatatcgataaacagtgtcgagccgttggggatttgctccgccactttgcgggcaatcctctctttttcttcggtctgggtggctttgcgatcgtgccacggcgtgttaaccgaactggaaggcagcgccgcaccgccatggtgacgcaggatcaggttttgctccgccagctcattgaggtcgcggcgaatagtctgcgggctgacggagaaatgctctaccagctcttcagtactgacataaccctgctgtttaaccagttcgataataccgttgtgacgttgtgtttgtttcatttataaatccctggaattattttcgttttcgcgcattgagcgaatcaacaaaagccatcgctaaacccacggctaacccggcgatgtgtgctccgttcgccatcgacatcccaaacaaatcaaaccatccggcgacaatccagatcagcgcaaagataattaacccacgttgcaggtaaatgccactttgcggatcgcgttcaccacgtagccagacgtagcccatcagcgcatacaccacgccagaaagcccgccaaaccacggcccgctgaatttttgctgcacatagccgcttaacagggcgctaatgagagtaataacaattagcttaccgctaccgaggcgtttttccaccgcaccgccgagataccaccaccagagcaggttaaagaggatatgcatcagcgagaagtgcattaacgcgtgggtgaagtaacgccagaactcaaatttcagtgttggatcgaatggccaggccagccataacatcacttcctgatcgccgagaatttgcatggcgataaacaccaccacgcaggcgatcatcaccacccaggttaccggacctgcgcgttcacgcaaggcggcaaagaaaggataacggcgataatgcaggccactgccggtatggcctgcctgccagctggccgccagataacgcggatctgccgggttttcgagaaaacgcgccagctccgcccgtacgcgctcggcctgggactcatccgccagccagacatcgctttggttatgttgttgaatcgtgaggataacaccctgcgtcgccatataatcaacaaacgcctgcgccacgcgggggttagcaaaagaggtaatcatcaacatcgttgctgtcgcttattccacacaaaaggggacagtataaagcgttacgcgccgtacgccacctctgcgggaaactgacgctgccaggcttcaaaaccgccgtcaatgctatagaccacatcgtagccctgttgcagcagatactgcgccgcgcctttgctgctattgccgtgataacacatcaccatcaccggagtgtcaaagtcgttatcacgcataaacgcgcccagcgtgtcgttggttaaatggaaagcctgcaccgcatgccccatagcgaaactctgtggatcgcgaatatcgaccagcaccgcctctttttcctgcaacttctggtgcgcgtcggcaacgttaatacattcgaactgatccatgcgtctctctttctttacaaacaagtgggcaaatttaccgcacagtttacgtcgaagcggcagataaacgccataatgttatacatatcactctaaaatgttttttcaatgttacctaaagcgcgattctttgctaatatgttcgataacgaacatttatgagctttaacgaaagtgaatgagggcagcatggaaaccaaagatctgattgtgataggtggcggcatcaatggtgctggtatcgcggcagacgccgctggacgcggtttatccgtgctgatgctggaggcgcaggatctcgcttgcgcgacctcttccgccagttcaaaactcattcacggtggcctgcgctaccttgagcactatgaattccgcctggtcagcgaggcgctggctgaacgtgaagtgctgctgaaaatggctccgcatatcgccttcccgatgcgttttcgcctgccacatcgtccgcatctgcgcccggcgtggatgattcgcattggtctgtttatgtacgatcatctgggtaaacgcaccagcctgccgggatcaactggtttgcgttttggcgcaaattcagtgttaaaaccggaaattaagcgcggattcgaatattctgactgttgggtagacgacgcccgtctggtactcgccaacgcccagatggtggtgcgtaaaggcggcgaagtgcttactcggactcgcgccacctctgctcgccgcgaaaacggcctgtggattgtggaagcggaagatatcgataccggcaaaaaatatatctggcaagcgcgcggcttggttaacgccaccggcccgtgggtgaaacagttcttcgacgacgggatgcatctgccttcgccttatggcattcgcctgatcaaaggcagccatattgtggtgccgcgcgtgcatacccaaaagcaggcctacattctgcaaaacgaagataaacgcattgtgttcgtgatcccgtggatggacgagttttccatcatcggcaccaccgatgtggaatacaaaggcgatccaaaagcggtgaagattgaagagagtgaaatcaactacctgctgaaagtgtataacgcgcactttaaaaagcagctaagccgtgacgatatcgtctggacctactccggtgtgcgtccgctgtgtgatgatgagtccgactcgccgcaagccattacccgtgattacacccttgatatccatgatgaaaacggcaaagcaccgctgctgtcggtattcggcggtaagctgaccacctaccgcaaactggcggaacatgcgctggaaaaactgacgccgtattatcagggcattggcccggcgtggacgaaagagagcgtgctgccgggtggtgccattgaaggcgaccgcgacgattatgccgctcgcctgcgccgccgctatccgttcctgactgaatcgctggcgcgtcattacgctcgcacttacggcagcaacagcgagctgctgctcggcaatgcgggaacggtaagcgatctcggggaagatttcggtcatgagttctacgaagcggagctgaaatacctggtggatcacgaatgggtccgccgcgccgacgacgccctgtggcgtcgcacaaaacaaggcatgtggctaaatgcggatcaacaatctcgtgtgagtcagtggctggtggagtatacgcagcagaagttgtcgctggcgtcgtaaggatgatgcccggttgtgaagtgcaaccgggctatttggattccttagactattcattgtaaataattgaataacggcccctgagctaaaatcgccaaacttaagcacgttacccaatcgccccacttcttcctctggtttctattttttctgcaccaatggcaataatatcccaatgcaaaaccaagctgtgcactaatcgggccgacaaaatcagtccaaggctgcggccaaaaaggggaaaaattcaggggaagccagacaaacgtcagaaagaaatttcggatattttccagcaacgctgatttctctggagaaatataaagaatgaaattcgagagaattaaccagaaatagaccggcgaaaagaccagccagcaatgcagtctgttttttaattcaggaggcgttctgcgggagaattgccaaccgatgccagccattacactgaaaaaaagtgcatattcaaccattaactcaagttgtagttcctgaagagaaatacgcacaaccaggagcggaaaggagaatattatttctgccagaaaagttaacgtgaatataagtacggctaagacaataaccgtcggccataccaataatggcacgataacaaaaccgagaattacagggggaatataaagccggaatttaatcatttttattttcctggtgattcggatgatgcgtcatacatcgcgcataaacactcatcaattatccagtcgtctacccagacctgatgctgtgtgccctgttctggctgctttggtgggttctcaatcgcctgccgcgcgcgttctttcaagatggattgattgttgaaggcccaggcattgatttgggtggtaatgacgttatcgatatcgtcctggttatctctgatataatcctcacaatatctgttcaataaacaggcaagagaaacggtcgaccaaaagccgggaactgaattaatggcatccagcaatggcgcaagagcgatatcggcacggaaaaacatttccagcatatactgtaattcgacagcttcatcgccggatacccaatcagtcatatactggcaggcaaatcgttgcaaaattttccattcatcctcacgccaattttctttactggcaaggtttatacgccgtagagaaaatacttcgtgaatattgtcaaactgcccctgtgcaacaaattccagtaaacgcggcagaaaatagcggacctcatcgctattttgcggatcaggccctgggctactattccatgcattgattaaggaatacgagatcgctcgtaacgatgtactccgtaataccttttgttcctgctgactcaggcaatattcacaacaaaccacaaatttctgcggcaccggataacgacgaaaaatatgataaatctgctcaattaatgcctgcatggcggggctgggttgcataattaccccctcgcccgctgatcgcgtgtaaacggttgataaacaaaacgagcattcgccacgttcaggcgaataatggcactacgagagagggaaaagctggggcgaatgcaactattgcagtctcgacagctttcttcagcgcaattttccactgtgtaataacgagcgtagagtttcagttccgcttgcttatcacgaaatccgcgtaaactgttatcgttatgaaatttccaggcatctttaaagacctgaaaaatgtagatatcctcaatccaggactcacattttttaagcgggcgctttgctatgatcacccgctcatccgggtttagcatcgccgtaaattgaacggtgaggtcatttgtcgtgttcagatcacattgaacatctggtacatcactgatataggggtcaaatccaaagtcagcaccacaggcacaaagacggctaatggtggcggtatcgagggaaaatcccggccatacattgctggacgttaagccaatatttaatgtgacattatatcgaagcaatccctcaagaccgtcagcaccgacgaacttttccccttcatccagggcctggttaatgagttgctgaacaatgccttcatcccagtatgccgatttgcagttggcaatcgtaatatccacgcctgtgaatggatcagtaccgacaaggcttgcaaataatgtattaactaattccatttttattatccgccttaatgcaacgttttatacatcggcacataacctacatcttccaccaggctctgcccctgcggcgttaaaaaccactccaccaatttttgtgtttctgacgtcatattttcccgcgttaccataaaggcatcgacgatatagggatatttgccgttgcgaatgttttcggcagtcggtgcaataccgttaatcgctagcagttttatatttttatcggcgttcatttgtgttgcgtaataacggaaggtgtaacctattgcgttgtttgtattacggtattcggcaacgactttaatcattccctccatcatacttgccacttctgtttcctgcggcgagatcatgcggacatttttcatgacctgggattgcatcaccgtctggctaccagagtcttccgggcgttgccaggtctggatctcctgatcgttaccgccaaccgtgcgccagttggtaattgcaccactgaagatgtcacgcacttgttgttcggtcagggaattaaccgggttatctacattgacgatgaaaacaaacgcttcacgggcaaaaggcgtgtaaatcaaagtgacgcccgattcctccgcgcgttttttctgcccaccggaaggttgagccacaaagataatatcggcattacctttaacaatcttgttatatgcttcgggagtacgagagttcgccagatattcccattcgtgaaaatcttccggcaaaacgcttagtgcataaaaggcagaggcataaatggggtacgccgccgttgcgccatcaagtcgcggccagttttgcgtgaactgaatttgcggtttaccacgcagtggtgtcagttgattattgagtttatcgggtcgccaggcccaggtatcaatattttcacgcacaccgacgccgggattaagctgtttatataaataagcctggtaaccggcgacaaaaccaagcatgagaaggataaacaagagagaattacggcaacgtaacccggacgtgcccgttaaaggatatctggtcggccagccgtaccccagcgaaaaactgatatgcgcgccaacaggtataatgactaaccaccagtactcaccaccgactaatgaggctaacaaaacgcccagccaggggagcataagatcagccaaccaacccgctcccatctggcgaaattgataatctgccagatgcagcgcgattatccagacccccagggttaataatgcgggtactaaaaaaagacattgtcgccagacggctatttctcttttttctggtgcactatcgtccgcccacactcgccccgagaaaaatagcattaatgcgcccagcgccagcataaaaatgttgagcagaaggtaaattgttggcgtgataaagatattacaaacttcaataataccggcaagtccgacacccagcatggcaataaccgccgccaaaaactgcgccagaatggggatgccgaaaaaagtcattaccagcgaggtcaaaatccattttctgttttgcattattctttccattctttctgaatggcgaaattatactccccgagtccccttgccccttctggacacttttccgaaatgatggcgaaaaaaacgggaccctttggccccgttctatttattagtgaaattacaatctcaccggatcaatatgccagatatgatcggcgtactctttgatagtacggtcagaagagaagtagcccatattggcaatgttcagcatcgcttttgcggtccactcttcctgaagctcgtagagttcgtcgactttatcctgacaatcgacatagctgcgataatccgccagaacctgatagtgatcgccgaagttgatcagcgaatcaaccagatcgcgatagcgacccggatcttccggactgaatacaccgctgccgatttgcgtcagcacctgatgcagctcctcatctttctcgtagtattcacgcggtttgtagccctgacgacgcagttcttccacttcttccgcagtgttaccaaagataaagatattgtcagcaccgacatgatccagcatctcgacattcgcaccgtccaacgtaccgatagtcagcgcaccgttaagcgcaaacttcatgttactggtgccggaagcttccgtccccgccagcgaaatctgttcagacagatcggccgccggaatgatcaactgcgccaggctaacgctgtagttcgggatgaacacgactttcagcttgtcgccaatctgcggatcgttgttgatcactttcgctacgtcattgatcaaatgaataatgtgcttcgccatgtaataggccgaagccgccttaccgccaaaaatattcacgcgcggtacccacttcgcatccgggtcggccttgatgcggttatagcgggtaatcacatgcaacacattcatcaattgacgtttgtattcgtgaatacgtttgatttgtacatcgaacaacgcctttggattcaccaccacattcagctgctgggcgatatactctgccagacgctttttgttctccagcttcgcctgatgcacagcgtgattaaccattgggaaatcacagtgttgttgcagctcattaagcaggctaaggtcggtgcgccagttacggcccaggtgttcgtccagcacggctgaaagcgatgggttcgctaccgctagccagcgacgcggcgtcacaccgttggtgacgttggtgaaacgacccgggaagattttcgcaaagtcggcaaacaacgattgcaccatcagattagagtgcagctccgatacaccgttaactttgtggctcacaacaaccgccagccaggccatacgcacacgacgaccgttggattcatcaatgatcgacgcccgtcccagcagatcggtatcgttcggatactgttcctgcaaggttttcaggaaatagtcgttgatttcaaagatgatctgcaggtgacgcggcagaattttacccagcatatcaaccggccaggtttccagcgcctcgctcatcagcgtgtggttagtgtaggagaagacctgacaacacacctcaaacgcgtcgtcccagctaaattggtgctcatcgatcagcagacgcatcatctcaggaatcgacagtaccggatgggtatcattgagatgaatcgcgattttatccgccaggttatcgtaggttttatgcaactgataatggcggcttaaaatgtcctgaatggtcgaggaaaccaggaagtattcctgacgcaggcgcagctcacgcccggagtaggtggagtcatccggatacagtacgcgagatacgttctcggagtggtttttatcttccactgccgcgaagtagtcaccctggttgaatttaccgaggttaatttcgctactggcttgcgcactccacaaacgcaacgtgttggtcgcgtcggtatcgtaaccagggattatctgatcgtaagcgactcccagaatctcttcggtttcaatccagcgcgtttttttaccttcctgctgaatgcgaccaccaaaacggactttatagcgcgtgttgtggcgtttgaattcccacgggttaccgtattccagccagtagtctggcgactctttctggctaccgttaacgatgttctgcttgaacataccgtagtcatagcggatgccgtaaccgcgccccggcaaccctaacgtcgccagagaatcaaggaagcaagccgccagacgtcccaggccaccgttaccgaggcccggatcattttcttcatcaatcagctcttcgagatttaaccccatcgcttccagtgcgccctgtacatcttcgtaaattcctagcgacaacatggcgttggagagcgtacggccaatcaaaaactccatcgacaggtagtaaacctgacgagtttcttgcgacaactgggcacggtttgaacgtaaccagcgctccacgagacgatcgcgcacagcaaataacgttgcgttcagccattcatgtttattggcgacgaccgggtcctttccaatcgtaaacatcagcttgtaagcgatagagtgcttaagagcttctacgctaagcgtgggcgatgaatatgtaaacggagcattcatataggcgtttcctgaaaactatttcaagcgatagtaaagctcacggtacgacttcgccgcgacctgccagctaaaatccattgccatagcctgacgttgcacaaaccgccacagtgaaggacgggaccacagtacaaaagcacgccgaatagcccgtaacagcgaccaggcattactatcttcaaagacaaacccactggcgacgccatctgcaaggttctcaagagaacagtcagaaaccgtatcagcaagcccaccggtgcgccgcactaacggcagcgtaccgtacttcaatccataaagttgcgttaagccgcacggttcaaaacggctgggcaccagaatgacgtccgcgccgcccataatgcgatgcgaaaatgcttcgtgatagccaatctgaacgcccacctggccggggtattccgctgccgccgcaaggaaaccttcctgcagcaccggatcgcccgcgccgagtagcgccagctgcccgccctgctccagaagacccggtaaggcttccagcaccaggtcgagacctttctggctggtcagacggctcaccactgcaaaaagcggcactttatcgtcaaccttaagccccattgcgatttgtaactggcgcttattttccgctttatcttccaacgtatcgcgggtgtaacgcgaggccaacagtaagtccgtctctggactccagattttctcgtccacgccgttcagtacgccggaaagacgcccttcacggtgacgctgttgcaacagaccttccataccgtaggcaaactgcggttcggtgatctcgcgagcgtaggttggactgaccgccgtaatgtgatcggcatagtacagaccggccttcaggaaagagatttgtccgttgaattccagcccatgaatattaaagaatgaccatggcaattggatgtcattcatatgatgtgcataaaacatgccttgataggccaggttgtgcacagtaaacaccgacttcgccggacgcccgcgcgccgccagatacgcaggcgcaaggcctgcatgccagtcgtgcgcatgcaccacatcaggacgccagaatgggtcaagcccgctggccatttctgccccaacccaccccagcagcgcaaaacgcaatacgttgtcggtataggcaaataagttggtatcgtgatacgggcttcccggacgatcatagagatgcggcgcgtcaatcaggtatatgccaaccccgttgtaatgaccgaacaacagcgtgatatgtccggcgaaggtatcacgacgggatactacctgcgcatcggtaacgccacggcgaatatcgggaaatgtaggcaacagtacgcgagcgtcaacgccgtctgcgatttgtgctgcgggtaatgccccaataacatcagccagaccgccggttttaagcagcgggaacatctctgaacatacatgtaaaacctgcattatcgctcctgtttatgccctaacttccgtagcatttcgcgcgttaccagcacgatgccttcttctgaacgatagaaacgacgtgcatcttcctctgcgttttcaccaatcaccatgccttccggaataacacaagcacgatcgatgacgcagcggcgcagacggcacgagcgacctacccatacttccggtaacaatacggcggaatcaatgttgcagaatgaattcacgcgaacgcgcgagaacagaacggactgcaccaccaccgaaccggagatcacacagccgccggataccagtgagttaagggtcatcccgtggctaccggagcgatcctgcacgaatttcgctggcggtaatgattcattgtaggtgcgaattggccaattgcgatcgtacatatccagttccggcaccacagaggccagatcgaggttcgctttccagtaagcttccagcgtacccacatcgcgccagtacggctcggcatccgggtcggattgtacgcaagagagcgggaacgggtgcgcataggccagaccggcttcggtgatcttgggaatcaaatctttgccaaagtcgtggctggagttctcatcacgatcgtcttcttccagcagttcatacagatagtcggcgtcaaagacgtagatacccatactcgccagagatttgctcggatcgttcggcattgacggtgggttagcaggtttttcaacgaattcgataattttatcgttctcatcaaccgccataacgccaaatgcggaggcttcttcaatcggtactggcatacaagcaacggtgcaacgtgcgcctttttcgacgtgatcgataagcatacgcgagtagtcttgcttgtagatatggtcgcccgccaggatcaccacgtattccgctttataacggcggataatgtcgaggttttgggtgaccgcatctgcggtgccgcgataccagttttcccctttcattctctgctgtgctggcagcagatcgacaaactcgttcatttcttcattgaagaatgaccagccgcgctgaatgtgctgcaccagagtgtgggactggtactgggtgatcacgcccatacgacggatcccggagttgatgcagttagacagcgcaaagtcgataatgcggaacttaccgccgaagtgtacggccggttttgctcgcttattggttaaatccttcaggcgggtaccacgtcctcccgccagtatcagggcaacagatttcaatggcagctggcgcgccaacattaagtgatcgttcttctctaaactaaccatgactaactccttttttatcatctctggaacacacacaatccgtgtgcaggtccctgccagacagccgtaatcactgggttatcctctccagcgaatgggggaatggcgtgccactccccagcaggtaaaacaatctctgttacctcaagcgtggcgttaattgcgatcaaaaagcgatccgagagcagaatttgcagctgtttcggcccgttttgccactcatccgtgcttaaaggttgagcatatcgatttagccaacggacattgccgtcgccttcttcccaccagcgattctccaccaaagcgggaatgcgcttgcgcagatggattaacgcggcggtaaatgcggttaaaccactgcttgcctgcgaccagtccaaccaggttaattggttatcctgacagtaggcattgttattgccatgctggctgtgaccatgttcgtcaccggccagtaacatcggcgtaccctgggagagcaacaacgttgttaacagggcgtgaatgctgtcgcgccgccgttcaaccaggtcaagagaaccgcctaacccttctttaccatgattgttactgtaattgttgttggtcccgtcgcgattttcttctccgtttgcttcattgtgtttatggttgaagcaaacgcagtcgcgaagcgtaaaaccgtcatgcgcggtgacgagattaatcgcggcactcggcagacgaccattacgtttaaaaacatcgctggaggcagcaaaacgcccggcaaacgcccccagaggcaaatcataatgtagccagaaacgacgggcagcatcgcggaaatgatcgttccactcggcaaacagcggcgggaaatttcccacctgataaccaccaggagcgatatcccacggttcagcaattaacttcacctgcgagagcaccgggcagttctggatagcggtaaacaacggcgcatcctgacggaactctggcgtacggcccatgactgccgccagatcaaagcggaaaccatcgacgtggcaggtttctacccaataacgcaggcaggcgctggcataatccaccaccgccggatgactcaaattgagcgtgttgccgcaaccggtccagttgtgataatcgccgtcttctcttatccaataatagctacggttatcgatcccacgcagcgagaataacgggccgtcgaggtccagttccgcactatggttgagcacgatatcaagaatgacttcgatacccgctttatgcagtgctttgattgcatcgcgaaactcatccagcgccgtttctggcgagcaggcatacgccggatgcagcgcaaacatcgccaccgggttgtaaccccagtagttacttagccccatgcgttgcagacgtggttcactggcaaactgcgccactggcagcagttccagcgcggtaatgcccaattgtttcaaatagttgatcatcaccggatgcccgagggctttataagtgccacggatctcgaccgggatctccgggtgcaagtacgttaatcctttgacatgggcttcataaatgatggtgctgccccacggcgtgcgcggcggggcatcatcttcccagtcatagtgatcaaccaccactacgcatttcggcgcaatggcggcgttgtcgcgatagtcaggttcattatgaccggcgtgcagcagcgggttatctttaaactccccgtcaatttgccgcgcgcaaggatcaatcaacaacttcgccgggttaaagcgatgcccctcggcgggttgccaggggccatgaacgcgataaccataacgcaaacccgggcgcgcatccggcagataaccgtgccaaatgtcgccactgtgccctggcaagtcatagcgatgttcctggccattggcgtcaaagacacacagttctacccgctcggcatgagcggagaaaagtgtgaagttgacgccctgaccgtcgtaatgcgcgccgaggggagcgggtttgccaatggcgagttgtgtcattctgcctcccgaaccagccagatagtggccagcggtggtagcgtcaggcttagtgaatgctgacgaccgtggctggcaatctcatcgctgtgtaccgtgccgccattgcctgcattactgccgtgatagtgcatggaatcggtattgaggatttcacgccatttgcccggctggtttatgccgaagcgataatcatgacgcggtaccggcgtaaagttactggcaacgatgatttcgttaccctctttatcgcgacgcacaaagatcagcaccgagcgttctttgtcatccaccaccagccattcaaagccgtacgggtcaaaatccagttcatgcattgctttatggtggcggtaggtgaggttcagatcgcgcaccagacgctggacaccgtggtgccagttatcgccgccttccaacagatgccagtcgaggctggcgtcatggttccactcgcggccctgggcaaattcgttacccatgaacagtagtttcttgcccgggaatgcccacatccagccatagtaggcgcgcaggttcgcgaatttctgccatgcgtcgcccggcatgcggtcgagaatcgattttttaccgtggaccacttcatcatgcgacaacggcaggacgaagttttcagtgtagttgtagagaatcccgaaggtcagtttatcgtgatgatactgacgataaaccgggtcgagcttcatgtagtccagggtgtcatgcatccagccgaggttccacttgtaccagaagcccagaccgcccatatcctgcggacgagaaacgccagggaaatcggtagactcctcagccattgtcaccgcaccggaaacctgctcaccaagaatacggttggtattacgcaagaattcaatcgcttcaagattctcgcgcccgccaaattcgttcgggatccactccccctctttacggctgtagtcgcgataaatcattgacgccaccgcatcgacgcgcagcgcatcaataccaaaacgttcaatccagtaaagcgcgttaccgacgaggaagttactgacttcacggcgaccatagttgtagatcagcgtgttccagtcctgatgatagccttcacgcggatcgctgtgttcatacaagttcgtgccatcaaattcggcaagcgcaaagtcatcagtcgggaagtggcctggcacccagtcgagaatcacgttcagaccagctgcgtgtgcggcatcaatgaaataacggaagtcgtcgcgagtaccaaaacggcgggttggtgcatacaggccggttggctgataaccccaactgccatcgaagggatgctcgttaatgggcagtagttcgaggtgggtaaagcccatccatttagcataaggcaccagttgatcggccagctcgcggtagctcaaccagaaattgttgtcggtgtggcgacgccaggaacccaggtgaacttcataaatagagattggcgcatcaaactgattcgcttttttgcgctctttagtctgtacaaccttttccggcagcccgcaaataagagacgcggtttccgggcgcatttgcgcttcgaaggcataagggtcggacttcagacgcaagttgccattggcatcaatcatctcgtatttatagagctgaccgttatgcgccccagggataaacagttcccagatgccgctctctttacgcaggcgcatcgggtgacggcgaccgtcccagtagttgaattgcccaaccaccgagacccgacgggcgtttggagcccagacagagaaacgcgtacctgtgacgccatccatagtatctgcatgcgcgcctaaggtttcatacgggcgcaggtgagtaccttcagataatagccaggcatccatttcctggattagcggaccaaaacggtaaggatcatcaatcaggttttgctgaccatgccagacaacagccaactgatagcggaaaaaattcttacgtcgcggaatgacgccgctaaagaatccccgtgagtcgagacactccagttttgcgagtttgcgcccggttttcggttcaatcacccacacatcggtagcgtcgggtaaaagggcacggacttccagtcccgcggtggttttatgcattcccagtacggaaaaaggatccgcaaaatggcctgcaattagcgcgttaatcacgtctctatcgatacgatcggacatgcttgtcttcctgttttattgtgtcaccccatccaattggatttttgacttctggttgtgacatttttttgacctgaacggcgcagcactctgtgcatcctctctgcgtcgtcctcacttcaggtaaggctgtgaatactcatgtattcagccacccttaaagaatagccaatgctctatttaactcccggtaaatcatgaaacatctgcgcttactcctgtattacgcactaacaggggcggcatcgcgccccagatttaatgaataaagattacgccagttgacgaagcatccgacgcagcggctccgcggccccccacagcagctggtcgcccactgtaaaggctgacaggaactctggtcccatattcagcttacgcaggcggcctaccggcgtggtcagcgtgccggtaacggcagctggggttagctcacgcatagtgatttcccgatcgttcggaacgactttcgcccacggattgtgcgcagccagcagttcttccacggtcggaatagacacatcttttttcaatttaatagtgaatgcctggctgtggcagcgcaatgccccgacacgcacacataaaccatctaccggaattacggaagatgtgttgaggatcttgttggtttccgcctgccctttccactcttcgcggctctgaccgttatcgagctgtttgtcgatccacggaatcaggctacccgccaacggcacgccaaagttatccaccggcagctcaccgctacgggttaaggttgtgactttgcgttcgatatcgagaatagcagaggacggggtcgcgagttcatctgccacatggccatacagatggcccatctgggttaataactcacgcatatgtcgcgcaccaccgccggaagcggcctggtaggttgcaacggacacccaatcaacaagatcattggcgaataaaccacccaacgacatcaacatcaggcttacggtacagttaccgccaacaaaagtcctgatgccattatttaatccgtcggtaatgacgtcctgattgacggggtcaagaatgatgatggcgtcatctttcatgcgcagagacgatgctgcgtcaatccagtaaccttgccatccgctttcacgaagctttggatagatttcgttggtataatcgccgccctgacaggtcacaatgatatcgagggcctttagcgcctccagatcaaaggcatcctgaagtgtgccagtggttccgccaaaagacggcgcagcctggccaagctgagaagtagaaaagaagacagggcgaatggcgtcgaagtcgcgctcttcaaccatgcgttgcatgagaacggagccgaccataccgcgccagccgataaaaccaacatttttcataagcgtttttttcctgcaaagatgtgtgctgtataaatgtgccggtctcctcttggcacatctttcaccatacaaaaagcagccaaagtcgcaagtgaaattaatcaatgatagcgaagccatcagtaatgcgacttatcctgctttgttagcacgcagaaagtccgcggcaattatcagggaatttgagttatgaatgaaatcatttctgcagcagttttattgatcctgattatggatccgctcggaaacctacctattttcatgtccgtactgaaacatactgaaccgaaaagacggcgggcaatcatggtgcgagagttgcttattgctctcctggtgatgctggtgttcctgtttgcgggtgagaaaattctggcatttctcagcctgcgagcagaaaccgtctccatttctggcggcatcattctgtttctaattgccattaagatgattttccccagcgcttcaggaaatagcagcgggcttccggcaggtgaagagccatttatcgtgccgttggcaattccgttagtcgccgggccgactattctcgccacgctgatgttgttgtctcatcagtacccgaatcagatggggcatctggtgattgctctgctgctggcctggggcggcacctttgtcatcctgctacagtcttcgctatttttacgtctgctgggcgagaaaggggtgaacgcacttgaacgcctgatgggattgattctggtgatgatggcaacccagatgttcctcgacggcattcgaatgtggatgaaggggtaacgaggagagtttttcgaaaagaacccggtagtgtcacaactaccgggcgaacaaacttaactcaacagctggaacgcaatcatcccaacgatggcaccgacagtgccgaggatggtttccatcatggtccaggttttcagcgtttcggcttcggtcgcgccggtaaatttaccgaacaaccagaaaccggcgtcgttaacgtggctgacaacaatcgaaccaccagcgatacaaatcgacagcgccgccatttgcgcaccggagtagttcagttgttcaataaccggcatcaccagtcctaccgccgttaaacaggctacggtggcagaaccctgaatgatgcgcactgcagctgccagcacgaagcaggtgatagcaatcggcaggcccatgccggttaacgcttcgcccagtgccggacctacgccagagtcaaccagcacctgtttgaacacgccgcctgcaccaatcaccagcagaatgatccccgccggttgcagcgcgtgaccgcaaatctccatcactttgtcttttggcatgccctgacgcattgccaggccataaatcgctaccagacaagcaaccagaatcgcggtaaacggatgaccaataaactcgaaccattcgtaagcggtagagccttctggcacaaaacgcgcggcaatggttttcagccccaccagcaccagcggcaacaggatcagcgacaggctgaatccgaaagatggcattttgccttcgccgagatgcggttcgctgatgtcgtcaggaatatgcaactccacgtagcggctgatgaaattaccccacagcggcccggcaataatcattcccggaattgccgcacacaggccaatcaggatcatccagccaaaatcggcgttcatctgcgatgcgaggagcattggcgctggcccaggcaccaggaacgcagccgcggccgccacgcctgcgaataatgggattaccagcttcaccaggttcgtaccggtgtggcgcgccattgagaaagcaacgctaatcagcagaacaatcgccacttcaaagaacagcggtagcgcacagaccagccccgcaaggccgatggcataatgcgcgcggctgtgaccgaaggatttgagcattttgacggcaatctgatcgactgcgccggtttcatgtaagatcttgccaaacatagctcccagggcgacaaccaccgccaggaagccgagggtgcctcccatccctttttccatcgtcgctgcgattttatcgagcggcataccggaaaaaaggccagcccccatggacaccaccatcaaagccaggaaagcgtgcatacgcgccttcatgactaaaaacagcagcagtaaaacagaccctactgctgttaaaacaagcgttaatgtagtcactacttatttgccttttttaataacctcaatggtgcttgccacaacaccttccagcggttgatcgatatccaccaccagtacatcagtttcgtccgcacccggctcctgcagcgtttcaaactgcgtcaccaacatttgggttttaaagaaatggcctttgcgcgctttcaggcggctttcaatcacgtcaaaatcgcctttcaggtagatgaaagagagattcggattaccttcacgcagcaagtcgcgatagtgttttttcaatgcagaacagacgatcagtgacactttattagtgcgctgcatagcaaacgcggcgtcgttcagcgcctgcaaccacggtttgcgatcgtcgtcattcagcggttcgccagacgccattttttcgatattgcgccgtggatggaggaaatcgccatcaagaaacgcggcatgaagttgatgcgccacttcactggcgaccgcagatttgccgctgcctgagacgcccatcaagacgtaaatgtggtgatcatggttagtcgtgctcaaagtggtgcccccacaatacaagaattaaaaatgttacgggtaactgttatcggtaacattgtccggccggacaatatcagaagcaatatccatccgtgccttaagtgtataagtgtgagctacttcaaatttgtgggcttaaatagatccgcccggtgacaaggtgaaacctaaatctaacattttcggtgtcacagattcgccacgaatacgcgccagcaggcgttcagcgccaatactgcccatccgctcacgcggcgtcagcacgctcgccagtcgtggctccatcacctgaccaatgtcatgaccgtggaaaccggcaatcgccatatcgtcaggaacttttaaccccagacgctgacattcaaacgccgcgccgaccgccagatcatcattagtacagaacacgccatccagctgcggatattcccgccgcgcctggcgaatcagttcaataccggaagagtaagaagaagattgctcaaccatcacgctatacggcaccaggcctgcatccagcatcgcctgttcgtatcccttctgtttgatgatagtacgttcgtcgagacgtgcgccgagataggcaatgtggcgatgcccgcgcgcaataatggcggtagtcatctggcgtgccgcttcaaagttatcaaaaccgacggcgatatcgaggcacggcgactggctgtccatcaactccaccaccgggatccccgccacttcaatcatctttaaggtgcgcggcgtgtgggtacgttcggtgaggatcaggccgtcgatattccaggacagcatggattcgagacgttcttgctccatttccggtttataaccgtagtgcgccagcatcgtctgataaccgtgcgcgtcggtgacgctttcgattccgcgtaatacttccgcgaaaacctggttggtgagagaaggtaacaggacgccaatcgcccggctggtagcgttagagaggatatcgggcgcacgattgggaatatagcccagttcatcaagagcggcggcaatcttgccgcgtagagcgacggaaacctgctccgggttacgcaaaaagcggctgaccgtcattttggtcacgcctacacggtcagccacatcctgaagtacgggtcttttctttttcatcgtcctgaaggtacaaaagagatagattctcttagtttaacacggacgcatcagaaccttcccggggaaaacagtgcttgtttacaattattagatatacactaaatcaattgcatcgcattgtgctaacgacgcggcaaaaccccggaagcgtgcatcagcacgcgaccggagcgagcgaggaagcctgcaaaaaggcaggcttcaaagatgccgttgagttttaaaccggcggcagatcgaacagtaacacttcgctgtcgctatccgcatggatggagattgcctgctcatcccagattgccagaccatcgctggtcgaggctttcacgccgttaatggtgacattgcctttcaccacctggatccagacgcggcgttcagcggcaatctgatgcaccgactgctcatctttcagcaacgcccaacgatacagttccatatcctgatgcactttcagcgaaccatctcgcgcatccggcgagagcaccagctgtttgccctgcacggcatcgaagcgacgctgttcataacgcggcgtaatgccattttcttcaggcatgatccagatctgatacagatgcagacgctcggtgctgcttgggttgtactctgagtgacgaatacccgtacccgcactcataatctggaactcacccgccggaacctgctctttattgcccatgctgtcctgatgctcaacagtaccttccagcacgtaggtcaaaatttccatatctttatgcgggtgagtgccgaagccctgccctgcttcaatcacgtcgtcgttaatcacgcgcagcgcggaaaagcccataaagttcggatcgtaatagttggcaaaagagaaagtatgccaggagtccagccagccatgatttgcatgaccacgttcatttgctttgcgtaagtagatcatttgtattcgccccatgaatgatttcgatgggcttagtgtggacccgatctgcctgggatgatagagggtgaaaattgacccctctgttcaaaaaaattgaactattcgaggggccatcaaacttacttagcgagagttactgtggagggagaggcttgctcaaatccgcgttcaaggatttccagattcgtaagaacttcagattccttgacgtaatttggcgcaccgtgggtgatggtttgatacaacgcatcataaacgcgcccgtaatcgcccatctccggcttcatctcttctctgaccgtcacgccctcgtcattgacatactccagcacaccgaccgaatcatccgctgcgaatcccggttcgcccggcataatattagccttcaggctggtttcctgctggtcgataccgtatttaataaacgaacctttcttaccgtgaacgataaatttcggataatcgattttcaccagatggctggttttgacgatggctttcaggtcgccataaaacagttgcgcttcaaaggtgtcgtcaggattggctttattacgcaggctgcggatgtcataagcgacgtgatccgggcgaccgaacagagaaataatctggtccatcgtatgcacaccaaggccataaaacgcgccatcctgcggcagcctaggtttggtctctgccaccgggcggtaatagtcaaaatggctttccacttcaacaatctctcccaacttgccactttcaatcgcttttttcgctgtcaggaagcaggagtcaaagcgacgattctgatacggcgtgacggtcagccctttgcttttcgccaacgcaaacagctccttcgcctgggcaagcgtcggggtgaacggtttttcgaccagcacatttttcccggcttccagcgcgcgtttcgcgtactcgaaatggctgtccgcgtgggtgcagacaacaaccagcttaacatcgggatcgtttagtacttcgtcgagatctctggtgaaatggatatgggaataaatgggagcctgttcttccggcttcgcatggcgacgaaaaatatgcgcgacatgccagctatccttgcggttaagtacatacggcagatggtaacgggtggtgcttttgccgaagccaataaaggcgcagttgatgaccatgatttcgtcctttttaaggtggttatttacaccttagcgcaaagcggacgtggttcctactggagtgcgcataacgaacacaagcactcccgtggataaattgagaacgaaagatcaaaaaaaaagccagcacccggctggctaagtaatactggaagcaatgtgagcaatgtcgtgctttcaggttctccgcgagggtcttcctgatcgcgagacaataataatcattctcattcgcacttgtccaacactttttgcaaaaaaatgcatttgactcgcatttgaaagtcaatgatgttgaaagggacatttaccccaaagaggacaaaggaatgagtgagatagtaatacgccacgcagaaacacgggattacgaggccatcaggcagattcacgcccagccggaggtgtattgcaacacactacaggtgcctcatccttccgatcatatgtggcaggagcgactcgccgatcgtcccggcatcaagcaactcgtcgcctgtattgatggagacgtcgtgggccatctcaccattgacgtgcaacagcgcccacgccgcagtcatgttgccgattttggtatctgtgtcgactctcgttggaagaaccgcggcgtcgccagcgccctgatgcgagagatgattgaaatgtgcgacaactggttgcgggtagatcgcattgaactaaccgtgtttgtcgataacgccccggcaattaaggtctataaaaaatacggctttgaaattgaagggactggtaagaagtacgcattgcgtaatggtgaatatgtcgatgcatattatatggcgcgggtgaagtaagatagtgccctttttctgagatggaaaaagggtgtcattcaaaatcgacataccttcctttaaggtatttatttgcccaatacataaattgagatttaactcataattacttcctaaagtgtaatattttttttaatatatacgcctacaatttcctggagtaaataaataacaattaacaagcataatattgccattgataaaatagcatgccataaaaggacttttcagggatgagtaatattgtttacctgacagtaacgggagaacaacaaggaagcatctccgcaggttgtgggacttctgagtctacaggtaatcgttggcagagcgggcatgaggatgaaatatttacattctcactcttaaataatattaataatacggggcttggttcacagttccatggtataacattttgtaaattaattgataaaagcactccattatttattaattccattaacaataatgaacaattatttatgggatttgacttctatcgaataaatagatttggtagatgggaaaagtattattatatacaactaagaggcgcttttttatcggctattcatcaccagatcattgaaaaccaactggatacagaaacaataactattagttatgaatttatcctctgtcaacatcttatcgcaaataccgagttcagctatttggcactccctgaaaattataaccgtttgtttttaccaaattcaaaaaaccaaacaaataatcgtttcaaaacgttaaacagcaaagctattggcaggctacttgctgctggtggcgtatacaatgggaacattgaaggattcagagatactgcggaaaaactgggtggagatgcaataaaaggctatgatcaaatactaaatgaaaaaacagcgggcatagcgatagcaacagcatctattcttttaacaaagcgttctaatgttgatacatatacagaaataaatagttacttaggcaaacttagaggtcaacaaaaacttcttgatggtatagagataatagaaataatatacattaagagaccttcaaaagacttagctaacttacgaaaggagtttaataaaactgtaagaaaaaattttcttatcaaacttgcaaaaacctccgaagcatctggaagattcaacgccgaagaccttttaagaatgagaaagggcaatgttcctctaaattataatgttcaccataaactatctctagatgatggtggtactaatgatttcgaaaatttagtattaatcgaaaacgaaccatatcataaagtttttactaacatgcaatcacgaatagctaagggaatattagtaggtgaaagcaaaatcactccctgggccattccatctggctcaatttatcctcccatgaaaaatattatggaccacacaaaatgatgactaaaacccaaataaataaattaataaaaatgatgaatgatttagactatccatttgaagcaccgctcaaggaatcatttattgaaagtataatccaaatagaatttaattctaattcaactaattgcctggagaagttatgtaatgaagttagtattctttttaagaatcaacctgattatcttacttttttaagagcaatggatggattcgaagttaatggattacgattatttagcctctcgattccagaaccttcagttaaaaacctttttgccgtaaatgaattttatagaaataatgatgatttcataaaccctgatctacaagaacggttagtgatcggggatgatagcatttcaatatttacttatgacattaaaagtaacttttttgaaattagagataatattggcacagaaaatatattcagttcgtttagtgatttctcttcattcttaaacgaaatcatggacagttgttcataataatcaaaaggaaacaaaaatcattgtaaaccatgccatctttttagagattaccagcagaaaattccttgttcgaaatttagcagtgcaagctatggaaaaacttacaacggaactacactccttaagtgagatggaccgaagacatgtagtctctattttagccgaaatagctaatggctatgatgattttaatgacatgttgatttatttagaattttacccgaatcataagattctgatatcttaaataagaaaatcccgttcgacgttctgaaaaagaaatcataaaatattagcagatacttatttcgtgactatatcttatccgatgaacttttttcaaaaccagcatttaataatatctttgacgaagatgaacgcgtctttgctcaatgtatcacacaggaataataatataacactcaacaataatatttattataattatgattacttatcacgacgcattcgcgaaagcgaaccattaccttgatgatgcagatctcccggtcgtcattactctacatggacgctttagccagggctggtatttctgtttcgaagcacgagaatttctcgaaactggagatgaggccgcgcgcttagctggtaacgcaccttttattattgataaagacagtggtgaaattcattctctgggaacggcaaagccgctggaagaatatctacaggattacgaaataaaaaaggctaccttcggcttgccctgacaaaatagccctcttcccacgaagagggccgctaaccttagtaccccgccgttaaatcatccaccgagcgcgggtcggatgcgccgtacaactcaccgtccggcccaaccataatgctttgtgtactgcccatcgcctctttcagcgccactttctgaccttttgcttccagcagcttgagcgtatccgggctaaaccctttttcgacacgcagctcgtccggcaaccactgatggtggaaacgcggcgcattggtcgcttcggcgacgttcatgccataatcgatgctattcaccaccatttgcagcactgtagtgatgatccggctaccgcctgggctaccggtaaccagccaggttttaccgtctttcaccacaatggtcggcgacatcgacgacagcgggcgtttgttcggcccgacggcgttggcatcaccgcccaccagcccgtaaacgttcggtacgcccggtttggcggagaaatcatccatctggttattaagcagaataccgctctcgcccgcgacaatgcccgtaccgaaggtggtgttcagcgtataggtcaccgccaccgcgttaccatctttatccaccactgagtaatgggtagtttgattactctcataaggcgcaagcttgccggggcgaatttcgctggatggcttcgctttattgatatcaatttgatcggcaatagatttggcataggctttattggtcagcgcctgccacggtactttgacaaaatccgggtcgccaagatattccgagcggtcggcgtaggcgtatttctccgcttctgccatgatttgcatcgcatcggcgctgccaaagccgtatttcttcatatcgaagttttccagaatattgaggatttgtacgatatggatcccgccggaggatggcggtggcatggagtaaacctgatacccgcgataatcgccgcttatcggagtgcgttcgaccgctttataggccgctaaatcttctttagtgatcaagccaccgtttttctgcatctcctgggcgatctgttccgcaatcgtgcctttatagaattcgtccgggccgttttcagcaatcatctccaggctctttgccaggttcgcctgcaccagcgtgtcgccctttttcagcggctcgccctctttccagaagatagctttactgttttcgtgattcggcaacacttcgctaccgtaggttttgagatcgtcagccagcgcgtcgttaacgataaaaccatcgcgtgccagtttaaacgcgggctgcacgactttgttcagcggcatggtgccgtatttatccagcgccagcgagaaacctgctaccgtacccggtgtgccggaagccagatgcgaagtgagtgattttttgctgtccgggttgccctgatcatcgaggaacatatcgcgggtcgctttggcgggtgccatttcgcggaaatcgatagccgtggtattgccatttttcgagcggattaacataaaaccaccaccgcccagattccctgcctgcggatgcgttaccgccagcgcgtagcccaccgccacggcggcatcaacggcattcccgccctccttgaggatatccacccccacctgagtggcagtggcgtccacagacgctaccattccctgtttcgcgcgtaccgggtggaagacatcttcctccacaccatacgagacgggcggcgcaggaggcgcggcggcggcgctaaaacaacttcctgagagcagagcagcaatggccacccggcgtaaaaacgtcggttttatcatcgttattctccagagattaaggggcaaccccagctaagcctggtatataactctgaattaatcatcgttttgtcgggaagcgagtaaacttaaaggatatcttcagaggaggatacgcgatgaaacgacttctgattcttacggcactcctgccgtttgtcggctttgcacagcccattaatactctgaacaaccctaaccagccggggtatcagatacccagccagcagcggatgcaaacccagatgcagactcagcaaatccagcaaaaagggatgctgaatcagcaactgaaaacgcaaactcagttgcaacagcagcatttagaaaaccagataaacaataattctcagcgggtgttgcagtcacagccgggggagcgaaatcccgcccggcagcaaatgctgcccaacaccaacggcgggatgttaaacagcaaccgtaatccggatagttcgttgaatcagcagcatatgctgccggagaggagaaacggcgacatgctgaatcagcccagcacgccgcagcctgacattccgttgaaaactattgggccgtaaagttcggaccaatcacgtcaatcgcatcggtacagatgcaatccacgccccagcgcagcaactctgccgcgcgctggggtttattgacggtataaaccagaatccgcagtccggcgtctttcaactgcatcactcgcactttatcgagtaacttatgattgagatgaatagagacgcagcccagccgcgcggtcagttcgcgccagtcgtcgcgccactcatcaagcaataaaccacgcggcagttccggtgccgccagctgtgcagcttctaaagcatcaatctcaaacgatgacagcagcggcggcgtcataccggcccacagttggcgtgccgccagcgccaccattttgcccgttaatggtccagtgccagtggtgggtttgatttcgatattcgccatcatcccgtgttcgcgacagcgttccgccacctgcgaaagcaacggcagcggctcacctttaaacgctttgctgtaccaactgcccgcatccacgcgcagtaaatcctgccagttcagttcacccgcgacgccccagccgttgctggtgcgttcgagattgtcgtcatggagcaggaagatctcgccatctttcgataacttcgcgtcaaattcgatcatcttatgaccgtattttgccccgacgtcgattgccgccagggtgttttccggggccagcttaccgccgccacgatgtgcgacgatgcggggataaggccagttattcatactcgttgtcctgtttcaccatcaaaaagatgtagctgattttccggcagatgcagccacagcgtgctgcctgccgtcgggcgctcctgatgcgccagtcgcaccaccagcttctgctcgctccagcgtccgtgcgccaggttatctgcgccgaggatctccagcgtatccatcaccagcggtacgccaccttctgcttgcgagcttagcgcaatatgttccgggcgaatgccgagggtcattttacgcccggcatactgacggtagccaccgtttagcggcagcacaataccgccgtccagttcgaaatgcgtgccttcgttattcacgcggcctgtcagcaggttcatcgccggactgccgataaaactcgccacaaacaggctggcgggcttttcgtagacttcaaccggtgtgccaatctgttcggcaacgccgccgttcatcaccattactcgctgggcgagggtcatcgcctcaacctgatcgtgagtaacgtagagtgaagtcgttttcaggcgacggtgcagctgttgcagctcaaggcgcatctgcacgcgcagcttggcatcgaggttagagagcggctcatcaaacaggaacaccgccggatcgcgcacaatcgcgcggcccatcgctacacgctgacgctgaccgccggaaagctcgcgcgggcgacgtttgagcagaccgtccagctccagaatgcgcgccgcttctttaacgcgctcggctatttgctgcttgcccatgccgcgaattttcagcccccacgccatgttttcttcgacgctcatatgcggataaagcgcgtaattctggaacaccatcgcaatcccgcgatctttcggctccatttcggtcacgcgctggtcgttgatccagatatcgccttcggtcacccgctccagcccggcaaccatacgcagcagcgtcgatttcccgcagccagacggcccgaccatcacgataaattcgccatccgccacatcaagggtcagtggtttaatcacctgggttttgccatcccagcttttggttactgcctgtaatttcagtcctgccatcttatttctcactatcgaccaggccgcgcacgaaggcacgctgcatcactaaaacaatcaccaccggagggataagcgttaacaacatcgccgccatcaccgagttccattccgtggtgccttcgcctgtggcgatcatccctttgatccctgccacggtggtgccgagatccacgtcggtaataatcaacaacggccacaaatactggttccagccgtaaataaaggtgatcacaaacagcgccgccagattggttttcgacaacggaaaaacgatgtcgcaaaagaagcgcattggcgacgcgccgtcgatccgcgcggcttccaccagttcatccggtagggtcataaagaactggcggaacagaaacgtggcggtcgccgaggccattagcggcagcgttaaaccggcgtagctgtcgagcattttcaggttggcgatgacttccaccgtcgggaagatacgcacttcaaccggcagcatcagggtgataaaaatcatccagaagaagaggttacgtagcggaaaacgaaaccagacaatggcaaatgccgagagcatcgagacggtaattttgccgagcgtaatgctgaacgccatcacaaagctgttaagcaacatccgccagaacggcgcgctattcgtgcctaccccgtttacccagatgttgtggatgttttccagcagatgtgtgccggggatgagcgtcatcggcgcggcgtagacggcctgtttatccagcgtcgccgcgacaaacgccacgtacagcgggaagaggatcaccgcgatcccgaggatcagcatggtatggctgaatatcgtcagccacggacggttctcaatcattggtaacgcaccttgctttcaacatagcgaaactgcaccaccgtcagcacgatgacgaggaacatcaacaccaccgactgcgcggcagacgaagccagatccagtccggtaaagccttcgcggtagatcttataaatcagcgtcgtggtggcctgaaccggcccgccggacgtggcggcgtcgatcaccgggaaggtgtcgaagaaggcgtacaccaggttcaccaccagcaggaagaaactcaccggggcgataagcggcagcgcaatcttaaagaagcggcgaatcggccctgcaccgtcgatggctgcggcttcgatcaacgaacggggaatggattgcagcgcggcatagaagaacaggaagttgtagctgatttgcttccatactgaggcaaacaccaccagaaacattgcctgaccgctgttttgcgcgtggttccagtcgtagccgaactccgcgagaaaatgggtgatcagcccgcgaccggggttaaacaggaagatccacaatacggcggcaacggcgggagccacggcgtaaggcagcaacattaaggtttgatagaaacggctgccgcgcacgatgtactccaccagcgccgcaaagaacagcgataccagcaaaccgctgacggtgacaaaggtgctgaattttatcgtcgtccagaaggagtcgagatagtagctgtcatggaacagcgtgacgaagttatccaggccgacaaactggctggagaaaccaaacggatcgacgctttgtagcgagtaccacaacgcttcgcccgcaggccagataaaaaagataacggtgatgatgagctgcggcgcgaccagcagataaggcagccagcgcgagcggaacaccggacgggatgatgacattacggttaattcctgaactgtgccggatgcgcttcgcttatccggcctacacgcgatgccaggtcagataagcgaaacgcatccgacattacactgattaagacttcgtcgatttctcaaagcggcgcagcaactgatttccacgctcaacggcggtatccagtgcctgctgtggtgtcttcttaccggtccacacgctctccagctcttcatccacaatcacgcggatctgcggcatgttgcccagacgcagccctttggtgaacggcaacggcggcttattcagcatctgacgcgtcgcggtatccgcccctgggtttttctcgtaaaagccctgctcacgggtcaggtcatacgctgctttggtgattggcagataaccggttttctgatgccactcggcagcgttttctggcttcgcgaggaagtcgaggaacttcgccacgccggtatacgtttctttatttttgccctgcatcacccacaggctggccccgccgataatggcgttttgcggtgcatctttcgcatcggcgtcgtaaggcatcatgcctacgccatagttaaatttggcgtactcacgaatattagcgagagaaccggaagaggcggtggtcatcgcgcaatcaccgttatagaacttctcggtggattcatccttacgaccgacgtagctgaagtcgcccttcttgttcatctcctcgagcatggcgatgtgtttcacctgctccggcttgttgaactccagcaccgcgtccgtgccgtcaaagccgttgtttttgctggcaaacggcagaccgttccaggcgctaaagttttccagttggatccagccctgccagccgctggcgtagccgcacttcataccggaggctttcagtttcgcggcatagtccgccagatcctgccaggttttcggcggttgttccgggtctaatcctgctttcttgaaggcgtctttgttgtaatagagaacgggggtcgagctgttgaatggctgggagagtaagtggcccgttttgctgtcggagtagtaaccggaaaccgtcggcacaaactgcgactcatcgaattgaatccccgcctctttaaacacgtcatataccggtttaatggctttcgatgccatcatggtggcggtgccaacttcataaacctgcaaaatagccggagcgttgccggtacgaaatgcggcaatccccgcgcttaaattctgttcgtagttgcctttataggtcggtacaattttgtaatccggattttcggcgttaaaacgttgggccagagaatccacctctttacccagttccccttccatagaatgccagaacggaatggtcgtcactgcctgtgcattccccattaacgccagtccgagcgccagtgctgaagctgtataatgtaacggtttcatcgtttatctctcttgttgtaccgaatgcgcgaattcacgcgttttatgctcgcggggtaacatgacatgctcgaattacagaaaaataacttttttgttacatttgtaagatagtaaggtgtcagaaagatgacaaggcggtgacggcgtgggtgagggaaaatgggagatggggcacggataagcggaaaatagaaggtctgaatcaaactctacagattactcatcgtttcatgccggatgcggcgtaaacgccttatccggcctacaagatcgtgcaaattcaatatattgcaactcacccagtaggcctgataagcgcagcgcatcaggcaattttacatttgtcacctgtctcaaaggagtcttttgactccttatcaatcaacgtgttattacccgcctaaatacgcacttctcactgcttcgttcgccagcagcgcgtcgccggtatcggagagcaccacatggccgttttccagcacgtagccgcgatccgccagctttagcgcctggttggcgttctgctcgacgaggaagatagtcatcccctgctcgcgcagctgctcgatggtgtcgaaaatttgctggatgataatcggcgcaagaccgagcgatggctcatcaagtagcagcaaacgcgggttgctcatcagcgcgcgaccaatcgccagcatttgttgctcaccgccggacatggtgcctgcccgctgaacacggcgctcatgcagacgtggaaacagttcatacacccactttatgcgctcctggaactggtcgcgttcggcaaaaaagccgcccatcgccaggttctcttccaccgtcatccgcgagaagacgcgacgcccttccgggacaatcgctaccgcttcgcgcatgattttcgccgtctgccagtcggtaatgtctttatcatcaaacacaattcgcccgctggtagcgcgcggatcgccgcataacgtgccgagcaatgtggttttccccgccccgttcgcgccaatgagggtgacaatctcgccctgattgatatgcaggctcacctcatgcagcgcctggattttgccgtagtgggcgctgactttgtcaaaggacaacatgactttttccatcttatgcctcacctaaataggcacggatcacgtccgggttattacggatttgctccggcgtaccgtttgccagtggcgtcccctgattgaccacataaattcggtctgaaatccccatcaccagcttcatatcgtgttcaatcaacaagatagtggtgttgtgatgattgcgcagttcggcaatcagctcatccagctctttggtttcttttgggttaagacctgccgccggttcgtcgagcattaaaatctccggctgcgtcaccatgcagcgggcaatctccagacggcgttggtcaccataggccaggttactcgcctgacggttggcgtgttccagcaaaccaatgcgctcaagccaggtggcggcgcggtcgagcgcttcgctctgggcgcgacggaaagaaggcgttttcaacaggccagagaacagcccggttttcagttgttgatgctgcgccaccagcaggttttcaatcaccgtcatttcacggaacagacgcacatgctggaaggtacgcaccacgcccatgcgggcaatttgctgccccggtaaaccttccagatgctgatcacgcagtaaaatagtgccgccggtgggtttgtagaatccggtcaggcagttaaaaaccgtggtttttccggcaccgttagggccgattaacgagacgatctcctgcgggtacagttcaagattgacgttgttcaccgccagcaagccgccgaagcgcatcatcagaccgttaacagataataatggctgactcatgcctgctctcctttcgctgcgccgtttttcagcttcagttgcgggcgcgtcatgggcagcaagccctgcggacgccagatcatcatcagcaccatcaaaccaccgagcattaacatgctgtattcgttgaaatcacgcatcaattcgcgcgataccaccagcaaaattgccgccagaatcaccgcaaactgcgatcccataccgccgagcaccactatcgccagtacaaacgccgattcagcaaaggtgaaggattccgggctgacaaagccctggcgcgcagcaaacagcgttccggcaaaaccggcaaacgcggcacttatggtaaaggcagtcagcttgatacgacgcgggcttaagcccagcgaacggcaggcgatctcgtcttcacgcaacgcttcccacgcacgccccagcggcatccgcagcaggcggttaatgacaaacaggcttagcaccaccagcagcaacgccaccaggtagaggaagatgacacgatcggagggatcgtatttcaggccaaagaaattactgaacgtgtcccagccgccttcacgagcggtacggctgaactcgagtccgaagagtgtcggtttcgggatctgactgattccgttcgggccgccggtaatttcggtgttattgagcagcaatatgcgcacaatttcgccgaaaccgagggtaacgatcgccagatagtcgccgcgcaagcgaagcaccgggaagccgagcaggaagccggccgccgctgccattaacccggcaatcggcagacaggtccagaagcccaggccgtaatagtgattgagcagcgcaaaagtgtaagcgccgatggcgtaaaagccgccgtaccccagcaccagcagaccagaaagaccaacaaccacgttcagcccgaggccgaggataatgtagatcatggttagggtggcgatatccaccgtcccacgcgacaccataaacggccacgccaccgcaagcaccagcagcgccacgaggaatagtttctgcttcaccgtggagccatcaatcgcgggcagaataaacttcggtccggaaacgctttttagccctttctggaaagccggtcgcaaaagctggaagaaaaagaccaccgccgtgccgataaacacccactgccaacggatgtctgaagccgtgtcgaccaccagtttggtgccatccagctccagttgcacgcccataaagacgcccgccaggacaaaaaacatcgcggcagagagcagcgccattgcaatatgcatcggtttcatactttctctacctccgggcgacccagaataccggtcggcatcaccagcagcaccagaatcagcagggcgaatgagaccacatctttatattccgtactcagataggcagaagagagcgcctccgcaatccccagaatcagcccgccaatcatcgctcccggaatgctgccaatcccaccgagcaccgcagcggtaaaggctttcatcccggccataaagccgatgtaggggttaattacgccgtagaactgaccgagcagcacacctgccaccgccgccatcgccgcgccaatcacaaaggtcagcgcaatcacccggtcggtgttaatgccaagcaggctcgccattttcaggtcttccgcgcaggcacgacacgcgcgccccatacgggaatagcgaatgaaaaccgtcagcgccagcatggcgaggaaggtgacaatccagatcaccgcctgcatggtggtaatagaggcagagaagttttcgctatgccccaccacccactgaccgttaaacagactgggcagcgccacgtcacgcgaaccttcagtcaggctaacgtagttttgcaggaagatggacatgccgattgccgagatgagcgcaatcaggcgcttagagttacgcaccgggcgataggctacccgttcgatactccagccgtaggcgctggcgatgacgattgcgccgacgaatcccgccgccaccagcagccagccggtatcaatgcccatcatcatcagcgcggcgatgatcataaatgagacatagctgccgatcatataaacctcgccgtgggcgaagttgatcatgccgataatgccgtaaaccatggtgtagccgatggcaatcagcgcgtaggtactgcccagcgtgacgccgttaaacatctgctgcaagaaatataaaaactgctcagacataaggtaacctttctaaacccgcccgtttttcacgggcggtgggatgatcacttggctgccgtggatgaaccgtcggcgtgccactggaagacaccaaaatcaaatcccttaagatcgcctttttcatcccagttcagcggcccaatcacggtgtttgcaccgttagcttttaaatctttcaccagcgccagcggctcatcgctgccagtacgctcaagggcagtcgccagagattgcaccgccgcgtaggtgatccagacataaggcccggacggatctttcttgtctgctttcagcgcatcaacgatgccctggtttgccggatcctggtcatagcgttttggcatagtgaccaacatgccttcggcagcatcgccagcaatattcgacaatgatgcgttacccacaccttccggccccataaactgagttttcaggccaacggaacgggcctggcgcagcatctgccccatttccgggtagtaaccgccgtagtaaacgaagtcgatgttttcttttttcaggcgggcgatcagcgcggagaaatctttctccccggcggtaataccgtcgaagaagacgacgttggcgttagccgctttcagcccgtcctgcaccgaacgcgccagcccttcgccatactgttgtttgtcgtgaatgatggcgatgcgctggggcttcaccgtctcaagaatgtattttgccgccgtaggcccctgggaagagtccagcccggcagtacgcataatgtgttgataaccgcgttgggtcagctccgggttggtcgctcccggcgagatcatcagaataccttcgtcttcgtagatatctgacgcaggttgggtagaagaagaacacagatgaccaataacgtatttaatgccgtcgttaacgattttgttggcgaccgcaacggcttgtttcgggtcgcaggcgtcgtcatattccacgcccaccagcttatcgcctttaattccccctttggcattaatgtctttaatcgcctgacgcgcgccgttaaattccatatcgccccactgggcaatcgggccggacatcgcgccgacaacggcaactttaatatcgtcagccatagcggtgtgtgaaattgccagtgcaatcatccctgcgatgatagttttcgcattccgtttcatagtcaaaaatccccattcgtgatgttgtgttgctttgtttttatgtgttaacaaatcagactgttctttttttatactgcactgtttttgcctgtctgattaagggtttagcgcagtattttgtgataatagcgattaaaatccctatttttcagtcgattaagaacagataatattctgaatttattgatagataaacagaaaaaagcgccgttgtcagcataaaataacggtacaaagagcggaataattcactaccattcaggggattatgctgggtatttttcattctctaatgttttaactttgtaattattgctgttaaaaaattaatcacctgccaaaagaaataaaaaagagaaagcctccgattaaattatttcgctacactggttccacttttgtgatttacacgggttccccatgaagctgaccatcattcgattagaaaactttagcgaccaggaccggattgacctgcaaaagatctggccggagtattccccttcctctttacaggttgacgataaccaccgtatctacgccgcgcgttttaacgagcgcctgctagcggccgtgcgggtgaccttaagcggcaccgagggagcactggattccctgtgcgtgcgggaagtcacccgccgtcgcggtgtggggcaatatctgctggaagaggttttgcgtaacaatcctggcgtttcatgctggtggatggcggatgcaggcgtggaagatcgcggtgtgatgacggcgtttatgcaggcactgggatttacggcgcaacagggcggctgggagaagcgttaatcgctctgtgtgaaaagcagttcgatggatttggttgggaaaaataacgcattttcgttttctccgaccaacgggataaagcccagcgattgataaaacgtatgggcttttttattcagcgcctcgacaaaaagaccgtgaatacctaccgctaaagaggctgaccagacgactttcatggcatgagcaaccagtgttgctccccatccctgcccctgtaatgaacgatcaattgccagacgcccaagagtaacgctgggaatatttttgtagggaatttttttctgtttcgatttcgagggcaatgcggctcgttcaaaacaactgccgcataatgtgtaatatcccagcacctgacgttctggagtgttgcgacaaaggatatacgctcgcagaattttgttgcgatgttgacgaacgagatgtgtcgtcagaaagagatttaacgcttcctcgccgcagtcgaatcgctgtagatcataatctgcatcatcggtcagaatctctatcgtcagatcatccataaattattacattccctgaagacgttttgccgcacgttttagcttttcaccaggtgacggtggattactcagcgcatccatcacccgcgtccaggattcctcattgaggatcacccgccgatgctgttcaatcacttccgcagcccgctgcgaagcgctgttcaacataaattggctgacggactgattagatatcgctgccgcttcctcaatcatacttttgtcatcgtcagttaaacgcagatcgatacgctgctttttaacagcagacatgtgaactctcctgctccgtataatatgtacggtatgtcaccgtacattaagcatatcctggattgtttaatctttctacaaccatttcgacaaacacaaaaaaacccgatggcagttcagcgcatcgggcattttcatttatctatctgttacttcgcatcggttgccgtgccgttggcgtgccagtcaaatacgccgaactcaaagcctttcagatcacctttctcatcccacgtcagcggacccatcacggtatccacggagttcgctttcaggtatttggcgatctcagccggatcgtcagactgattcaggcccgcctgcaaagattgcagcgcggcgtaggtggtccaaacgaatgcgccgcttgggtcctgttttttcgctttgatggcgtcaacaatgggtttgttcgccggaacctgatcgtagttcttcggcttggtcaccagcagcccttccgctgattcgcccgcaatgttagacagcgaaacgttagccacaccttccggccccataaactgagttttcagccctgccgcgcgtgcctgacgcaggatttgccccatttccgggtgataaccgccgtagtaaacgaagtcgatattctcttttttcagacgggccaccagcgttgagaaatctttttccccggcggtgataccatcaaagaacaccacgttagcattgcctttcttcaggccgtcctgcaccgctcgcgccagaccttcgccgtattgctgtttgtcgtgaacgatagcaatacgctgcggtttcactttctcaagaatatatttcgccgccgtcggcccctggtcggagtccaggccggtggtgcgcaggatcagctgatagccacgggcggtcagctccggcgcggttgccgctggggtgatcattaaaatgccttcatcttcatagatgtctgacgctggctgcgttgatgaagaacagaggtgaccaatcacatatttaatgccgtcgttaacgactttgttcgccaccgcaaccgcctgttttgggtcacaggcatcgtcatatttcacgatttgcagtttgttgcctttaatgccgcctttagcgttgatatccgcaaccgcctgctctgcgccagtaaactcctggtcaccgtactgggccaccggaccggacattgcgcccacgaccgcgactttaatatcttctgccagagccatattgctgaatgccagcgcgatacatcctgccagtaacgctttacccttcatgttcatcctgaggttccccattcttctggttattacgtgtgttgtgatgttgttgttcagcactttatttcgttttatgcatgactacccgtgctttagcagcatactctgctaaaacatacccgatttttatgatattggaatagctatttgacagtttattaacaatctgcgtggggattggcgttttgccggagggggaaactgattattgcagaggcccaaaaaacaaaaaccccggattctcatccagggttctctgcttagtagtagaaattacgcttcaatggcagcgcgaagttttttcatcgcgttcttttccagctggcgcacacgctcggcggaaacaccgtaacggtcagccagttcctgcaacgtggacttgttgtcttcgtccagccagcgcgcacggatgatgtcctggctgcgttcgtccagaccctgcatcgcgtcggtcagacggtttgccgcctgctcttcccagttatcatcttcgatgccgtcggcaaagttagatgatttatcctgcagatagagcaccggtgccatcggctggctgtcggaatcgtcgtcggaagacaggtcaaaggtcatgtcctgtgccgccatacgtgattccatctcacgaacgtctttgctggttacgcccagttcacgggccaccatttcgacttcatcctggttaaaccagcccagacgctgcttggttttacgcaggttgaagaacagtttgcgctgcgctttggtagtcgcaactttgacgatacgccagttacgcagaacgtattcgtggatctctgctttgatccagtggacggcgaaggagaccaggcgcacacccacttccgggttgaaacggcgcactgctttcatcaggccgatgttaccttcctgaatcaaatccgcctgtggcaggccatagcccgcataattacgagcaatatgaacaacaaaccgcaggtgagacaggatcagcgttttagctgcttccagatcgccatggtaatgcagcttttcagccagcgcccgctcctcgtcagccgacaacatcggccacgcgttagctgcccggatgtaggaatccaggttgccaactggggctaaagctaaactttgcattttgtcagtcattcaaatcctctcaatcgatatcttctggcgcttcagtggtagcaacaactgtgccagagcttaagagcaacgaggttatcattcactgttttatcagaccgtgattttatccacaagttcaatgcaagcttgtgaataaattacgcacaaaatgtgacatagagatgaaataccgggaagagacaacgggatctctttccctgctacggaacccattgcagggaaagagtataacacgcttttattattcaggcgtaaagtggcgtaaatgttgtaccgtggcaagccacgctgccacccagccaatcatcgagcataccagcagcaatagcaggcattcatcgaacgataaaccattgatatcaaacttcgttccgaaaacctgtgccacttccgcaaccgccgatgacaatcgcagcaccagaatttctgacaaaattaatgacaacaatgcgccagaaaatcccagcagtgcgccaccatacaggaacgggcgaaggatgaaaccatccgtcgcaccaatcagtttctgcacgttgatggagtcacggcgagcaaagatgctcagacgtacgctgttgccgatgacgaggaacactgccgccaccatcaacacgccgatcatcgccgaaacgcgcccgaccagcccggtcaacgccgccagacgggcaaaccagctgtcatccatccgcacttcgtcaatgccgttaatctgcgtgatacgatcacgcagcgtattgagtgattccgtcccctgaaaatcgagtttcgggatcaccaccgccactgccggaagcgggttttcttccagcatatccagcgcaccaccaaaaccagaccagttacggaactcgcccagtgcgtcttcacgagaaagatagttcactttctccacgccttgctcggcctgcaactgtgccaccacgcccgcagcggcgtcatcgtccagcgttttttgcaagtaaacagtgatttgcggtgacggataatactgcgtcgccgcctgattaacgtttttgtacaccatataacagacgctgggcagcgtcagggagatggcgataaccatcaccgttaaaaacgtggcgaacggtttgcttttcagatcctgcaatgcgccgtggaaggcatagcgcacctgttcgttgaaaacgttggttttgcgatttaccggttttggcgaggatttcgcgcgtttcggtgcgttacgaccgccgtcgcctgagccgccgaccgatttacggaagcgatccagacgcccgccaaactgccgaatatgattgattgcatcgcgcttattcatggcccacgcctccatgcaagtgaccatcgctcagggtgagcatgcgataggaacgccgcgagatcaggttgatgtcgtgcgttgccatcaatacggttaccccaacgcggttaaactcttcaaacagacgtagaatcccttccgacaacgcgtcgtccaggttaccagtcggttcgtccgccagcagtaccgcgggcttgttcaccaccgcgcgggcaatgccaacacgctgttgttcaccgccggaaagctgaatagggaagttcttcgctttgtccagtagcccgactttatccagcgccgccgacacccggcgacgaatatcgtcaccgctggcaccggcgataatcagcgggatcgccacgttatcgtagacagtacggtccatcagtagatggtgatcctggaaaatcatgccaatctggcggcgcagaaacggaacttcacggtttttcagacgcgtgatgtcatgaccgctaaaccagattttcccggcgctgggccgctcaatcccacagatcagcttcaggagggtacttttccctgcgccggaatgaccggtcagaaacgccatctcacccggctgcatatggaacgtaacgccctgcagcgcctgtctcccaccgagataagccttgctgacatgttcaaagcgaatcattgttaatcctctcgggcaaaaagtgcctctataaagtcgtccgccttaaacggacgcaaatcctcaatacgttcgccgacaccaatgtagcggatagggataccaaactggtcagccaccgagaaaattaccccgcctttcgccgtgccgtccagtttcgttagcgtgatgccggttaagccaacagcttcatggaacagtttggcctggcttaccgcgttctgcccggtgctggcatcgatagtcagcataacttcatgcggcgcttcaacgtcgagtttcttcatcacgcggacgattttcttcaactcttccatcaggtgcgatttgttctgcaggcgtccggcggtatcggcaatcaggacgtcgatattacgcgctttagcggcctgaatggcgtcgaagataacagaggcggaatccgcaccggtatgctgggcaatcaccggaatattgttgcgctgcccccagacctgaagctgttcaaccgctgctgcacggaaagtatcgcccgccgccagcatcaccgatttaccctgctgctcaaactgacgcgccagcttaccaatcgtcgtggttttacccacaccgttgacgcctaccatcaggatcacgaacggcgttttaccttcaacattcagcggctcatcgactttcgccagaatctcgcccatctcttctttcagcaggccatagagggcctcggcatcacgaagctgcttgcgggatgcgccttccgtcagattggtgatgattttacgtgtggtttccacgcccacatcggcgatcaacagctgttcttccagctcttcaaacagatcatcgtcgatttttttaccgcggaacaggctgataaatccggaaccgagattttctttggtttttaacaggctgcgtttcaggcgcgcgaagaaaccttctttggtcggtttttcctgctcctgagcgatttcttccaccggctgctcttctaccggaggaaccaccatcaccgcctcttctgccgcttcggcagccagcgcctgtgcttccagctcttcgtcggtgatttcttctttagccgcttcttcttccgccgcttcgacaatctctacggtttccgcttcagcctgccactcttctggcgaaacctcttcggcgttgacgtcttccggcaacggcagctcttcacgctcgatagccactggctccggcgtttcttctacgaccggttccggctgtgcaacgacttccgcttcaggctgcgctttttcactttcagcaacctgttcagtgacttccacaacgtcggcagcaaaagtttccgcctcggcttcagtatgcgcctgcggctgctcttcgacggcttgttcagaagccttcacaggctcttgcgcctgaacgatttcttctacaaccggttgttcattctgaacttctgtctctttttccggggtctgctctttttgaccaaagcccagccaggaaaaaaagccacgttttttttctttcgccatttgcgactacactcctcgctgttgcttcatggcacagcgttaacgctatgtacatagcagctaaaaaaatgatgaaatagtctatcacttaacttaattcacatcaccgcctgcaagtatgtgttatctggcggattgagcaatttatcatgaaaaaaccgaatcattccggcagcggccaaatccgcattattggcgggcagtggcgaggccgtaaactcccggttcctgatagcccaggtctgcgccccaccaccgaccgcgtacgcgaaacgttgtttaactggctggctccggtcattgttgacgcccaatgtctggattgcttcgccgggagcggcgcgctggggctggaagcgttatcgcgctacgctgcgggggccacgttgattgagatggatcgcgcagtttctcagcagttaattaagaatctggcgacactaaaagcaggcaatgcacgcgtggtgaacagcaacgcaatgtcattcctggcgcaaaaaggcacaccgcataatatcgtgtttgtcgatccaccgttccgccgtggcttgttagaagagacgataaatttactggaagataacggctggctggctgacgaagccctgatttatgtcgaaagcgaagtcgaaaacggtctgcccactgttccggcaaactggtcattacatcgggaaaaagtggcgggtcaggtggcttatcggctgtatcaacgcgaagcacaaggagaaagtgatgctgattaatattggtcgtttgttaatgctctgcgtttggggatttttaatcctcaatctggtgcatcccttcccgcgcccgctgaatattttcgttaacgtggcgctgatttttaccgtgctgatgcatggtatgcagctggcgctattgaaatccactttaccgaaagatggcccgcagatgaccaccgccgaaaaggtgcggattttccttttcggcgtgtttgaactgctggtctggcagaagaaatttaaagttaaaaaataaccttattgttcgcctacaaagctgacaaagcgcgttcctttatagctcagcgtacctttatcgcccactgtcagggcgtggtactgctgggcgtcgaggcgaaacgtctgctccattcctccgctttgcggtttgaagcttgcctcatagcgcatactggtgcctgccggagtcacttcctgctggcgcgaacggcgatcgttaatcggtttttcccgcttgttgctcaccaccaccagcttttgctggagcggtgccatatcattatcagctttttcccgtcgctgttgcataaaacgaaacgatgcggcgacgatgattaagccaatgataacaataaagaaaagaggtggtttgctcatctttatccctcatcggaaaatgcgaaaataagcataccctgccagttatggtgttgtcatccgtccaccctcgccactaaactggaagcaagaccgtaggcattccgcttacgaaaaaataacgaattcaaggaactaagatgctttggtcgtttatcgctgtctgtctttccgcatggctatctgtggatgcatcgtatcgtgggccaacctggcaacgctgggtgtttaaaccgctaacccttcttctcctgctgttactggcctggcaagcgccgatgttcgacgccattagctatctggtgctggcagggctgtgcgcctcactgctgggcgatgcgctaaccctgttgccacgtcaacgtctgatgtacgccatcggcgcgtttttcctctcgcacctgctgtacaccatctatttcgccagtcagatgacgctctctttcttctggcctctgccactggtgttgctggttctgggtgcgctgctactggcgattatctggacgcggctggaagagtaccgttggcctatctgcacgtttatcggcatgacgctggtgatggtgtggctggcaggtgaactgtggttcttccgtccgaccgctccggcactctctgcgtttgtcggcgcttcgctgctgtttatcagtaactttgtctggctgggtagccactatcgccggcgcttccgtgcggataacgcgattgctgcggcctgctactttgccggtcacttcctcatcgtccgctcactgtatctctgataaaacttgactctggagtcgactccagagtgtatccttcggttaatgagaaaaaacttaaccggaggatgccatgtcgactcctgacaatcacggcaagaaagcccctcaatttgctgcgttcaaaccgctaaccacggtacagaacgccaacgactgttgctgcgacggcgcatgttccagcacgccaactctctctgaaaacgtctccggcacccgctatagctggaaagtcagcggcatggactgcgccgcctgtgcgcgcaaggtagaaaatgccgtgcgccagcttgcaggcgtgaatcaggtacaggtgttgttcgccaccgaaaaactggtggttgatgccgacaatgacatccgtgcacaagttgaatctgcggtgcaaaaagcgggctattccctgcgcgatgagcaggccgccgacgagccacaagcatcgcgcctgaaagagaatctgccgctgattacgcttatcgtgatgatggcaatcagctggggtttggagcaatttaatcatccgttcgggcaactggcgtttatcgcgaccacgctggttgggctgtacccgattgctcgtcaggcattacggctgatcaaatccggcagctacttcgccattgaaaccttaatgagcgtagccgctattggtgcactgtttattggcgcaacggctgaagctgcgatggtgttgctgctgtttttgattggtgaacgactggaaggctgggccgccagccgcgcgcgtcagggcgttagcgcgttaatggcgctgaaaccagaaaccgccacgcgcctgcgtaacggtgagcgggaagaggtggcgattaacagcctacgccctggcgatatgattgaagtcgccgcaggtgggcgtttgcctgccgacggtaaactgctctcaccgtttgccagttttgatgaaagcgccctgaccggagaatctattccggtggagcgcgcgacgggcgataaagttcctgcaggagccaccagcgtagaccgtctggtaacgctggaagtgctgtcagaaccgggtgccagcgccattgaccggattctgaaactgatcgaagaagccgaagagcgtcgcgcacccattgagcggtttatcgaccgtttcagccgtatctatacgcccgcgattatggccgtcgccctgctggtaacgctggtgccaccgctgctgtttgccgccagctggcaggagtggatttataaaggcctgacgctgctgctgattggctgcccatgtgcgttagttatctccacgcccgcggcgattacctccgggctggcagcagcagcgcgtcgtggggcgttaattaaaggcggagcggcgctggaacaactgggtcgtgttacccaggtggcgtttgataaaaccggtacgctgaccgtcggtaaaccgcgcgttaccgcgattcatccggcaacgggtattagtgaatctgaactgctgacactggcagcggcggtcgagcaaggtgcgacgcatccactggcgcaggccatcgtgcgagaagcacaggttgctgaactcgccattcccgccgccgaatcacagcgggcgctggtcgggtctggcattgaagcgcaggttaacggtgagcgcgtattgatttgcgctgccgggaaacatcccgctgatgcatttgctggtttgattaatgaactggaaagcgccgggcaaacggtagtgctggtagtacgtaacgatgacgtgcttggtgtcattgcgttacaggataccctgcgcgccgatgctgcaactgccatcagtgaactgaacgcgctgggcgtcaaaggggtgatcctcaccggcgataatccacgcgcagcggcggcaattgccggggagctggggctggagtttaaagcgggcctgttgccggaagataaagtcaaagcggtgaccaagctgaatcaacatgcgcccctggcgatggtcggtgatggtattaacgacgcgccagcgatgaaagctgccgccattgggattgcaatgggcagtggcacagacgtggcgctggaaaccgctgatgcagcattaacccataaccacctgcgcggcctggtgcaaatgattgaactggcacgcgccactcacgccaatatccgccagaacatcaccattgcgctgggactgaaagggatcttcctcgtcaccacgctgttagggatgaccggactatggctggcggtgctggcagataccggtgcgaccgtgctggtgacagcgaatgcgttaaggttgttgcgcaggagataaggcaaaccgatcgcaacattgagcgcgatcggtcccctcgcccctctggggagagggttagggtgaggggaaaaggcggcatcgaagccaatcagcccccatcaaccgcctttacgaatcaaataacgataaggcagtccatccgtctctttcgcaaccagttcgtgttccataaaggtacaaaacccaggaatatcgcgggtagtggccggatcgtcggcgataatcagcaacgtttcgccgggctgcatattgcgcacagttttgcgcaccatcattacgggttccgggcagcgcaggccaagtgcgtcgagtgtgtggtcagggctggaaaagagatcggtcattttcttctcatcacataaaaaaacggcgctagtttacgccctgtgagtccgtaagcaaaccaggttaacgattgcgtgaaaattaaccattgcattgtcaacgtaaagcagtatcatgcggcggctcgaaaaaagggtaagcacgttattatgttaagataacagacgtgtcgtacgtattgggttccctcaccccaatggttaatcaaaaaggtacaatatgaacgttttctcgcaaactcaacgctataaggcgttgttctggttatcgttatttcatctgctggtgatcacctccagtaactatctggtccagcttccggtctccatttttggttttcataccacctggggcgcgtttagcttcccgtttattttccttgctaccgacctgaccgtgcgtatttttggcgcaccgctggcccgtcgtatcatctttgcggtaatgatccctgcgttattaatctcctacgtcatctcgtcgctattctatatgggttcctggcagggattcggcgcactcgcccacttcaacctgtttgtcgcccgtatcgccaccgccagtttcatggcctacgcgctggggcaaatcctcgacgtgcacgtttttaaccgcctgcgtcagagtcgccgctggtggctggcaccgacagcgtccacactgttcggtaacgtcagcgacacgctggcctttttcttcattgccttctggcgtagcccggatgcctttatggctgaacactggatggaaatcgcgctggtcgattactgtttcaaagtgttaatcagtatcgttttcttcctgccaatgtatggcgtattactcaatatgctgttgaaaagactggcagataaatccgaaatcaacgctttgcaggcgagttaaaggttcgttatcagagttgtgataagatggatgaatgagccgttatggccgtttatcgaaaggaagaagtcaatgcgcaatctggttaaatatgtcggaattggcctgctggttatggggcttgcggcctgtgatgataaagacactaacgctacggcgcagggttcggtcgcggaaagtaacgctaccgggaatcccgtcaacctgcttgatggcaagttaagtttctcgctgccagcggatatgaccgaccagagcggtaagctgggaacgcaggccaataacatgcatgtctggtccgacgccaccgggcagaaagcagtcatcgtcatcatgggcgatgatccgaaagaagatctggcggtgctggcgaagcgtctggaagatcagcaacgtagccgcgatccgcagctgcaagtggtaaccaataaagccattgagctgaaaggtcacaaaatgcagcagttagacagtattatctccgcgaaaggccagacggcgtactcttccgttattctgggtaacgtgggtaatcaactgctgaccatgcaaattacgctgcccgctgacgatcagcaaaaagcgcagaccaccgcagaaaacatcattaatacgctggttattcagtaagttttaagatgatgaggcggcctcagggacgtgttccggaggccgtttttttaatcgccacgtcagtaataacgcgattgcgaccagtcccgccgccgccagataaatcaccggtacgcccgcccagctcatcaccagcccagccagtggtccagtcacgccaagcgataaatccataaatacggtgtaagttgccagcgccgccccctgattttgctgcggaaccgcttttaccgccactacacccaatgccgggaacaccagcgaaaacccggcccccgccagtaagacgccgattttcgccatccacggcatagtcgccacgccaaccagtagcaggccgattatctcaacgctaaagcaaatcatcgctacgtttaagccaccgatacggttaatgccgttagggaataacaaacgcgtaccgacaaacgcacagctaaacagcgtcagcgcgaaagccgcaccgtcccaacctttagcgtcataaaacagcgtgataaaggtggcgatgacgccaaatccggcggaagccagtgccagcgccataccgtacagccagacgctcccaagcaccgcgcgaaacggcagcggtttgcctttactggcttttaccgtcggacgcgggatcgccaacaaaatggccaccagcgccacgcccataatgattaacgctaacgcctgcaagccgccccagtgataaaacacgacgcctaacggcgcacccatcgccatcgccccgtaagtgacaatgccgttccacgaaatcacccgcccgatatgcagcgagccaaccacgccaacgccccacagggtcgatcccgttccggcaaaactttgcccaatcccaaggatgacgcgccccaggcaaagtaataacaggctgatgacaggcagactggcggttaatcctgccgtcagataccccagaccgctcaaaaagcagccgcataaaccgaagacgacaatctttttgggtcccagcaaatcggcataacgtccggcatgagggcggctcagcaaggtggcgaaatattgcaggctgataaccaatcctgcccagaaagcgctaaagcccatcacatcatggacatagcccggtaatacagcgagcggcaacccgatggtgaggtagctggcgaagttaaacatgacaatggagacaatgcgcaaattcaggcgcaatccgtttagcgcgggttcggctacgggttcgggcatgaggatcaccacatttttacaacagtgtttcatttttaccatgtgctgacgtgaaaatcagcagtaagaatcagaatattgctggcgtgactcccgctacacttaatacaaaaagtcacaaggaagccccaatggaaacccctcaacccgataaaacgggcatgcacattctgctcaagctggcctcgctggtagtgatcctcgcgggcattcacgcagcggcagatatcattgtgcagctgttactggcgctgttttttgccatcgtcctcaacccgctcgtcacctggtttattcgtcggggagtacaacgccccgttgccattacgattgtagtggtggtgatgctgatcgcactaaccgcgctggtcggcgtactggcggcatcgtttaacgaatttatctctatgctgccgaagtttaataaggagctgacgcgcaaactttttaaattgcaggagatgttgccttttcttaatttgcatatgtcgccggagcgaatgctgcagcggatggactcggaaaaagtggttaccttcaccacagcgctaatgaccgggctttccggggcaatggcgagcgtgcttttgctggtgatgaccgtagtttttatgctgtttgaagtgcgccacgtcccttacaaaatgcgttttgcgctgaataatccacagattcacatcgcgggattacaccgcgcacttaaaggcgtttcgcactatcttgcattgaagacgctactcagtttatggacaggtgtcatcgtctggctggggctggagctgatgggggtacagtttgcgctgatgtgggcagtactggcgtttttgcttaactacgtgcccaatatcggcgcggtaatttccgccgtaccgccaatgattcaggtgctgctgtttaatggtatttacgaatgtattctggtcggcgcattgtttttagttgtccatatggtcatcggcaatattttagagccacggatgatgggccatcgcctggggatgtccaccatggtggtatttctttcattgttaatctggggatggctgctcggcccggtagggatgctactttcggtgccattaaccagcgtgtgtaaaatctggatggaaacgacgaaaggtggcagcaaactggcgattttactggggccgggcagaccgaaaagtcggttaccgggatgaggcgacaagtgatacgatacgcactttcattttccattaaacgttggccctgatatgtatcggatagttctggggaaagtttcgaccttaagcgcagctccactgccaccgggtttacgcgagcaagcaccgcaaggtccacgacgcgaacgctggctggcggggcgtgcattgctttcgcacacgctttccccgctaccggagatcatctatggcgaacaaggcaaacctgcattcgcgccggaaacgccgctatggttcaacttaagccatagcggtgacgatatcgctctgctgttgagtgatgaaggcgaagtcggctgcgatatcgaagtgattcgcccgcgcgccaactggcgctggctggcgaacgccgtattcagcctcggggaacacgctgagatggacgccgtgcatcctgatcagcaactggaaatgttctggcgcatctggacgcgcaaagaagccatcgttaaacagcgtggcggcagcgcctggcaaatcgtcagcgtagacagcacctatcactcctcgctgtcagtcagccattgtcagcttgaaaatttaagcctggcgatctgcacccccaccccctttacgctcaccgccgacagtgtgcaatggatcgattcagttaactgatccgcccacccgactgcccatctattgatccagaacaggtaatcagtatgacgaatacttaaaatcgtcatacttatttccgccatctattttaatccattggggttaccatgctctccacactccgccgcactctatttgcgctgctggcttgtgcgtcttttatcgtccatgccgctgcaccagatgaaatcaccaccgcctggccggtgaatgtcgggccactaaacccgcacctttacacgcctaaccagatgttcgcccagagcatggtttatgaaccattggtgaaatatcaggcagacggttcggtgatcccgtggctggcaaaaagctggactcattcagaagatggtaaaacctggaccttcaccctgcgtgatgacgtgaaattctccaacggtgaaccgttcgatgccgaggcggcggcagaaaacttccgcgcagtgctcgataaccgtcaacgtcacgcctggctggagctggcaaaccagattgttgatgttaaagcactcagtaaaacagagctgcaaattaccctgaaaagcgcctactatcctttcctgcaagaactggccctgccccgtcctttccgttttatcgctccctcgcagtttaaaaaccatgaaaccatgaacggaattaaagcgccgattggcaccggaccgtggattttgcaggaatcgaaactgaatcagtacgatgtcttcgtccgtaacgaaaactactggggcgaaaagccagcgattaaaaagatcacctttaacgtcatcccggacccgactacccgcgcggtggcgtttgaaactggcgatatcgacctgctgtacggaaacgaagggttattaccgctcgataccttcgcccgctttagccagaatccggcttaccacacccaactgtcacagccgatcgaaaccgtgatgctggcgctcaataccgccaaagcccccaccaacgagctggcagtacgtgaagctcttaattacgcggtaaacaaaaaatcgctgattgataacgcgttatatggcacccagcaggtcgccgacaccctgtttgccccttctgtgccttacgctaatctcggcctgaaaccgcgccagtacgatccgcagaaagcgaaagagttgctggaaaaagccggttggacgctgcctgcgggcaaagacatccgcgagaaaaatggtcagccgctgcgcattgaactgtcgttcatcggcaccgatgcgttaagcaaatcgatggcggaaatcattcaggctgatatgcgccagattggcgcagatgtctcgctgattggcgaagaagagagcagtatctatgctcgtcagcgcgacggtcgttttggcatgattttccaccgcacctggggcgcgccatacgatccacacgccttcctgagttcaatgcgcgtaccgtcgcacgctgacttccaggcacagcaaggattagccgacaagccgctgattgataaagagatcggcgaagtgctggcgacccatgacgaaacgcaacgtcaggcgctgtatcgcgacattctgacccgtctgcatgacgaggcggtttatctgcctatcagctacatctcgatgatggtggtatcaaaaccggagctgggtaacatcccctacgcgccgatcgccaccgaaattccgttcgaacagattaaaccggtgaaaccttaatgttgcgttacgtattacgccgctttctgctgctgatcccgatggtgctcgccgcctcggtgatcatttttctgatgctgcgcctcggtaccggcgacccggcgctcgattatttgcgtctgtctaacctgccgccgacgccggagatgctggcctctacccgcaccatgctgggactggatcagccgctgtacgtccagtacggcacctggttgtggaaggcgctgcatcttgactttggtatctcattcgccagccaacgcccggtactggacgatatgctgaacttcctgcccgccacgctggaacttgcaggtgcggcgctggtattaattctgctcacttccgtaccgctcggtatctgggcggcgcgccaccgcgaccgtctgccggatttcgccgtacgtttcatcgcgtttcttggcgtgtcgatgcctaacttctggctggcgtttttactggtgatggcgttttcggtgtatctgcaatggctacccgcgatgggttacggcggctggcagcacatcattttgcctgcggtttccattgcctttatgtcgctggcgattaacgcgcgtttactgcgcgccagtatgctggacgtcgccggtcagcgtcacgtcacctgggcgcgtctgcgcggcctgaacgacaaacagaccgaacgtcgccacatcctgcgcaatgcctcgctgccgatgatcaccgccgtggggatgcacatcggcgaactgatcggcgggacgatgattatcgaaaacatctttgcctggccgggcgtcgggcgctatgcggtgtcggcgatttttaaccgtgactatccggtgatccagtgctttacgctgatgatggtggtggtttttgtggtctgtaatttgattgtcgatttgctcaacgccgcgctggacccgcgcattcgtcgtcatgaaggagcgcacgcgtgaactttttcctctcttcccgctggtcggtacgcctggcgctgatcattatcgccctgctggcgctgattgcgcttaccagccagtggtggctgccgtatgaccctcaggctattgatctgccgtcgcgcctgctttcgccggatgcgcagcactggctgggcaccgatcacttagggcgtgatattttctcgcggctgatggcggcgacccgcgtgtcgctcggttcggtaatggcctgcctgctgctggtgctgacattagggctggtgattggcggcagcgccggactgattggcggacgcgttgatcaggccaccatgcgcgtcgccgatatgtttatgaccttcccgacctcgattctgtcgttctttatggttggcgtgctcggcaccgggctgaccaacgtaattatcgccatcgccctgtcgcactgggcgtggtatgcacgcatggtgcgcagcctggtgatttcactacgccaacgcgagtttgtgctggcgtcacggctttccggtgcgggccatgtgcgggtgtttgtcgatcatctggcaggcgcggtgatcccttcgctgctggtgctggcaacgctggatatcggccatatgatgctgcacgtcgcggggatgtctttccttggcctcggtgtgaccgcgccgaccgccgaatggggcgtgatgattaacgacgcgcgccagtatatctggacccagccgctgcaaatgttctggccggggctggcgctgtttatcagcgtgatggcctttaacctggtgggtgacgcactgcgcgatcatctggatcctcatctggtgacggagcacgcacactaatgccgcaacagattgaactacgtaatatcgcgctacaggccgcgcagccgctggtacacggtgtatcgttaaccctgcaacgcgggcgcgtgctggcgttagtcggcggtagcggcagcgggaaatcattaacctgcgccgcgacgctgggcattttgcccgctggcgttcgccagacggcgggggaaattttagccgatggcaaaccggtttcgccttgcgccctgcgcggcatcaaaattgccaccatcatgcagaacccgcgcagcgcctttaatccactgcacaccatgcacacccacgcgcgggaaacctgcctggcgttagggaaacccgccgatgacgctacgcttaccgctgccatagaagcggtggggctggaaaacgccgcgcgcgtgctgaagctgtacccgttcgagatgagcggcggcatgttgcagcgcatgatgattgcgatggcggtgctgtgtgaatcaccgtttatcatcgccgatgaaccgaccaccgacctcgacgtggtagcacaggcgcgcatcctcgatctgctggaaagcattatgcaaaaacaagcgccgggaatgctgctggtcacccatgatatgggcgttgtggcgcgtctggcggatgacgtggcggtgatgtcacaaggtaaaattgtcgaacagggcgatgtagaaacgctgtttaacgcccccaaacatacggtgacgcgcagcctggtttccgctcatctcgccctctacggtatggagctggcatcatgaccttacttaacgtctgcggcctttcccatcactatgcccacggtggatttagcggaaaacatcaacatcaggcggtgctgaataacgtttccctgaccctgaaaagcggcgaaaccgtcgccctgctgggacgcagcggctgcggaaaaagcaccctcgcgcggctgctggtaggcttagagtctccctcacaagggaatattagctggcgcggcgaaccgctggcgaaactcaatcgcgcccagcgtaaagcgttccgccgcgatattcagatggtatttcaggactccatcagcgccgtgaatccgcgcaaaaccgtgcgcgagatcctgcgtgaaccgatgcgccacctgctatcactgaaaaaatccgaacaactggcgcgcgccagcgaaatgctgaaggcggtcgatctcgatgacagcgttctcgacaaacgcccaccgcagttaagcggcggccagctccagcgcgtctgcctggctcgcgcgctggcggtcgaaccgaaactactgattctggatgaagccgtttctaaccttgatctcgtgttacaggcgggcgtcattcgcctgctgaaaaagctacaacaacagtttggcaccgcctgcctgttcatcacccacgacttacgcctggtggaacgcttctgtcagcgggtgatggtgatggacaacggacaaatcgtcgaaacccaggtggtgggagataaattaaccttttcctctgacgccggacgtgtgctacaaaacgcggtattacccgcattccccgtgcgccgtcgcaccacagaaaaggtttaacgcaaatgcaacgagtcaccatcacgcttgatgacgatttactggagacgctggacagcctgagccagcgtcgtggttataacaatcgttccgaagctatccgcgatattctgcgtagcgctctggcccaggaggccactcagcagcacggcacgcaaggtttcgcggtgctctcctatgtgtatgaacacgaaaaacgcgacttagccagccgcattgtctccacccagcaccatcaccacgatctctccgtcgccacgctgcatgtgcatatcaatcacgacgactgtctggaaatcgccgtgctgaaaggtgatatgggcgacgtgcagcattttgccgatgacgttatcgcccagcgcggcgtgcggcacgggcatttgcagtgcttgccgaaggaagattgagttatttctgaaacgaggaaagaaaagatattaactgaacttaatttataaaattaagttcagttgcatagatagatcctgtaaaggcagatattctgcgtaatgtacgccgctaaaatttataaatgattcaaacgctcattcagtgtttcaataatataggtattaacagagacttgttgctgcgcagccgcattattaaggcgttcactcagcgattctggatagcgtaacgtaaaggtcttaatcttttctgtacgcgcatacggctcaatacccgcagctttacaatcctcaagatactctcgcagggaaagttccccttctttttgcagcccctgaatgctgtcagagacaaaatcacaataacctgacaagcccaggaatttgccacgaaatgcattcagttctggcacgtaagtgataacagcaggttgcccggcaatctccatagagtttggcgtcttcagtttgatcatggttttacccctatacttagtaaccagtcacgcacgctttctacagcgcctttatcggtatctggcgacggatgaggccgatggaaacacgcaacgctcatatttagtatgaacttacagcgcgaccccctaccttccttaatttctccgcctaacgctttaaccagagattctatatcagtccatttgattccttgaggtaaaggtgatttaaatagctgatccagtgtgtttttttgtttctttcgtaaagcctgtacctgtgtttacatgacattcccttatgacttcactttatgacatcacagtatgaagtcaagtttcccttccttacgccattgtcccaatcgtcttcctgaatcgcagcagcgcgatggtgaaaaacgcgccgccaattgccatcagcgtcaggaactgcggccagacgatttcgaatccggcaccccggtagagaatggcctgcgcgaggctaacaaagtgtgtcgtcggcatggtcagcataatgtcctgcaccatctgcggcatactttcgcgcggcgtggatccaccggaaagcatttgcagcggcagcagcaccagaatcaccagcagccccagttgcggcattgaacgcgctatcgtccccataaaaatgccgattgacgtggtggcaaacagactgagcgccacgcccagcataaacagcgggatcgagccttcaatcggtacacccagcacgcctttcaccatcagcaccagtgataatcccgacaccaccagcaccaccagccccatcgaccagacctttgccatcatgatctcaaacggcgttatcggcatcaccaacaagtgttccaccgtgccgtgttcacgctcgcggatcagcgccgatccggtcaatacaatcgccagcatggtaatgttgttgatgattgccatcaccccgccaaaccacgcgggatcaaggttcgggttaaagcgcatccgggtttccagcgataccaacggttcgctgttatcacggtagcgcgcgacaaagctgttcacttcaccgttgataatattctggatatacccattgccggtaaatgcctggctcatgcgcgtggcatcgacgttcacctgaatatccggctggcgtccggcgaggacatcacgctgaaaattaggcggaatatttatcgcaaaggtataacgcccggcgtccagtccggcatccatctcatcggcggtgatcatctccggtggcaaaaaccacgggcgatagaagctgttaacgatccggttcgataactgcgattgatccatatcggcaatggcgatcggcgcgaggttcaacgatcctggcgtaacggtcgctgacgaatacaccgacaccgtaaacgagaagacaatcagcgtcagcatcgctttatcaccgagcagactgcgcaactctttgatacccagattaaaaatattgcgtaaatggcgcatcatccctcctgttttttcagcagcaggatacttaagcccatcaccagcgggatggctatcagcaacgggataaaaagttgccacaaatcagtcagatccagcgctttcgagaacgttccgcgggcgatagtcagaaaatgactggtcgggtaaacctcgccgatccaacgtccaggcccttccagcgaagctaccggatcgatcatcccggaaaactgtgtcgccgggatcaacgtgataatcgccgttccgaaaatggcggcaatctggcttttcataaaggtggagatcagcagccccattccggtggcaatgatgatatacagcagcgccgccagggtgagcgtcaggaaactgcctttatgcggtacgccaaacacaaacaccgacaggccgcagagcaggaaaaagttcagcatccccagcgcgatgtatggcaactgtttaccaagcaaaaattcactacgcgtggtgggggtcacgtaaaggttgataatcgacccaagctctttttcccgcaccacgctaagggcgcttagcattgacgggatcatcatcagcagaagcgggatcaccgccggaacaatcgctggcaggctttttacgtccgggttatagcgatagcgcgtctcaatattcatcagcccgctttggctggcgggtgtggattgtcggctcgccacatcctgtagccagctctggtgcattgcctgcacgtaaccttttaccgtttcggcacggctcggcatcgctccgtcgatccagacgccgagttccacaggcgtaccacgcgcgatatcgcgcccgaaattgggagggatctcaattgccaccgttatatcgcccgcacgcatccgacgatcaagctcgtcataactggtgagcggcggctgttcgataaagtaacgggaaccggagagattgagcgtccacgcctggctactgacggtctggtcgcggtcgagcaccgcaaagcgcaggttttccacatccatactgatgccgtaacccattatcagcatcaggatcactgttcccatcagcgccagcgtcgaacgtaccggatcgcgtcgcagttccagtgcttcgcggcggctgtagctaaacagacggcgcaggctaaatccctgacgcggcgcgtgggtggtgtcgtgtatcacgggcggcgcttcggcttcgttgctctgtcctgccgcttcctgcaaataggcgataaatgcctcttccagactggcggctccgcgtttctcaaccagttcctgcggtgtaccgctggcgagcacttttccggcgtgcatcagtgagatgcggtcgcaacgttccgcttcgttcataaagtgggtggagataaaaatggttactttgtcctggcgcgagagatcgaccatcaactgccagaacatatccctcgccaccggatcgacgccagaagtaggttcatcgaggattaacatctccgggcgatgaatcaccgccaccgccagcgaaagccgctggcgaatgccgagcggcaatgactccggcagaacatcttcaacgtcgttgagcttaaaacgctcgctcatttcagccactcgcgcgggaatttccgcttccgggatgtgaaacaaacgggcatgtaactcaaggttttgccgcacggtgagttcgttatagagcgaaaacgcctgcgacatatagcccacccgacggcgggtatcgatatcttttggatcaaccggttgcccaaacagccacgcctcaccttcgctggcgggcagcagtccggtgagcattttcatggtggtggatttaccgcagccgttcgatccaagaaaaccaaaaatctccccgcgtggaatgcggaaattgacgtgatcaacggcaacgaaggaaccaaaacgcatggtcagatcgcgcgcttcgatggcaatctctgcattttcaggttgatacggtgggatcactaccgcctgatgcgcctggcgttgcgcttgcggtaacagatttataaacgcctcttccagcgtggcgctttgcgtttgctgccgcagctcttcggcgctgccagttgccagcacttctccggcattcatcgctaccagccagtcgaagcgttcggcctcttccatataggcggtggcgaccagcacgctcatattgctctgccgctggcgaatactgtcgatcagatcccagaactgggcgcgggagagcgggtcaacccccgttgttggctcatcaaggatcaacagttccgggtcgtggattaacgcgcagcacagccccagtttttgcttcatcccgccggagagtttacctgccggacgatcgcgaaacggtgctaacccggtgctggtcagcagctcattaattcggacttcccgctccgctttatcgtgaccgaacaagcgagcgaaaaaatcgacattttcatacaccgataaggtgtggtagagatttttgcccagcccctgcggcatccaggcgatgcgcgggcagacgtcgcggcgatgcttcgggtcgcgcatatcgccgcccagcaccatcacattgccctgttcaatgacgcgggcaccggaaatcaacgacaacaagctcgacttcccgacgccatccggaccaatcagcccgaccatacagcgggccggaatatcgagagtaatattgttcagcgcaacggtttttccataatgctggctcacgcccgccagttgcgcgacaggcgggacgggaaccagttccagatgcgtcattgcggcaacctcaccacgaggtcgtcaggccacggaagttcttcattcacccgcacccacgctacgcccggtaaaccggttttgacatattccagatgctgctggagtaattccggtgggatacgcgctttgacgcggaacatcagtttcagccgttcatcgctggtttcgacggtttttggcgtgaactgggcgacactggcgacaaaactgatggtcgccggaatacgcagatctggcgcggcatcgaggatcagccgggcttcaccacccagtttcagcgtgcccgcctgttcggttggcaggaagaaggtcatatagacgtcgctgagatcgaccatattcagcacccgaccgcctgccgccagcacttcccctggctcggcaacccgatactgcacgcgtccgtcacgcggggctttcagttcgctgtcatcgatatctgcggcaatgcgccgttcagtggcttgtgccgcttcgacgcgggtttgcgcctgaatgatattggtacgtgccgcctctatagcggctttagaagcagaaacctgagcttttgccgattccagcgcagctcgggcgctctcagcggcggcgcggtcgtcatccagctgttgcgcagaaatagcccctcgttgggccagtgaacgggaacgcatatgacgttttgctacggagtccagttctgcctggcgttgattaaccagcgactgcgcggcgcgagtttcgctttgtcgttgctccagcaaagcctgcgcggcggcaacggcgctttgtgcctctttgatttgcgcgatggcttccagtcgctgttcctgcaacacgcgagtatccatcttcgccagcacttcaccttcgcgaacaaactggccttctttcaccagaatggtgtcgatacgcccggcaattttgctggcgatatccacttccgtcgcttcaatgcgcccattgctgacagcaaagccttccggcacacctgccgggcgcaacagccaccacgccacgatagccgccaccgccagtaacccgacaacccaccacgtcagatggcgcttactcttatccataatcgacccgccataatccctgtaagcaaacgacgcgtgttacaactgccgccgaacgacgttcagcggattcttccatccgggataagaaggaaacggcaaatacgaccagcgcgcagagcattgagcgccaacggggaaggcttagtgaaaacgggtagtaatgttgtcatcatcagcattcctggccgtaaatgaaacacgcatactcataagtgtgatctataaaactggctgacaaaacggtatccatcctgttggatagcgtttcacgcctgttcagttgcaggaacagagcattcctttttacgttttatcaacagtctcaaccagatagtaacattaatattcatgttgtctatggttcagagctgtaacattgtgcgccttctaatcaaaggcataagtccatttctgtttttttcatgctggtaagacttccagggagtggttatctcaggccctgcaccagggttaatttggcaattatgcatgctgaacattcttccagcatgtttactgtcacgggcgttaagacctaaaactgtccccgtttcgcctatgcgttctcttccaccatttccgttatgtgcaacaacttgatttatacctaacatttgtgaacatgctaatagtgcttcaagtttaggtctgtaatctgtcgaaacagaaaaataacgattaaaggatcgacaagagatagcccggctagttttaaactttttgccattaattatagcatgatgctttttattgataattgccgctaattcgaccggatcgagagcattggtcatttcatcaatagagactgttatcggtcctataatgtaacgttttcgctgctcatcaaaagttatcccatgatgatttgccattattttgtatttggggtcatagaaacatacaggataatcttttatcccagcgtaggtatcctcatcaagtggtttcatacgcgtgaagttctgcatatagttaccattgcaattcgtttcatgatttccagctaatacatgaacattttcattgatactcattatgcgttttaacaaatcgatgataaattgatcgccacagatattactaaatcgatcgccggtttggtcgccaagaaacgtacatggcgtcacagcgtctttattaataactaaataaggctgaagactttctaaaactatatctcttctgttcagaatactgattattgtattaacattagtgtcaagttgctcattaaagttctcccttagcaatacgttgagaacttcatcttctatattaagcaactggctaaggaaattttctccttcagccatgattctcaaatgtcccgttgcaaaaagcgcgtacaaaactgcaccgactgagccatcggtatcgccaaaataggttggtctggtacttgtgggatcaacaggtgaacaattggagaaataggttctgtcagcgaactgggggtttatcattgtttcgaatttaatatcagatacattgaattgcgatattttccagtcccagacgggtttgtacgactcagtaactgcaacatcattagcatcatcatttactgtcatattattaagtaaataaacaatgctgcaccaattaatatcggtattatcaagatagcagccgtaatttttactattaattgtcacaataaactgataattattatccctacgtagaatatgagcgcgcatgtccgatagcatactatatttttctgaatgattcgtttgtatggtaaatgatattttgtcatctcgaatagattgttggaaacgttctatttgccaatcatcaattttttccacaacttcaccgagcattgtcctggcaatacttgatatatcatcacctataccatttgcaatatacccaaacagttctttagtgaagttagtaacatgctcttgcaccatatcatttgttgcgattgtcgttgtactgtcgttagtgcctgccacagttccaattttcatcttttacctcatataattcaccgcgaggaatgcatagttaacatttaatcttatgacatacacctcatgttcgatggaaaaataattatattttgcacaaatcattcagccttaaagcataatatgaaatttcttatctcatagcagagaaagtccctaaagattgtagaggcgtcatcagaacatgcctctacaatcgattaagaaaacctatgaaatactggcaggattaaaaagatataccacagcactcatggagttttaatgtggttgaaaacaactaagccctgggacaccttttttatcaccacgttcgttaggagctatcttccaggaatttagccccatggtataattatcaattttttgatgctgatctacccctaatccataatggccatatttctgtttagtttttttgagcgtctgtccacatttgaagatatcttcaggttttggtctgaaagcagtagtgttattaaaataattgtcatatacaggtgtggatgctatagcattgcttctaattagatggataaaacgatcatccatgtgttctttatgttttttattaaaaatattggctaattcctcaggatcagtaggatttttcatctgattaaatggaacctgcaaagcaccgagacaataacattttttttcttcatctcttattattccgtgatgactggttaaaacttgcctttctgagtcataattacaaacatcgagcgttttaattaagttatacgtatcaccggcagagagtttatgatttgctagtcgtgcagtatagttaccattaaaattgatttcatgatttccagccagaacgacgacatttttattaatacggctatctttattaccctccatatttcgcatagaatttagcaaagtaaggatatatttatcaccaaaaatagtactaaatctatcgcctgtatgatccccaaggaagatacaaggggttatcgcatcgtcctttaaaaaaacatgttgatgcaactcattcaagatcatgtctctcgtatttaataaatcgtagagcactttattatttttatgtttgtatgcagatgaagccatctcttcgtgttttaataattcacataataaactccaacccttttccctgatgcctatatgccctgaaacgagcaatgcataaagtacagcgcctactcttccatctgtatcgccaaaataagccgtgttggcattttgtgggttaatcacaccacactgtttatagaagtctatttttgaaaacacaggtttaacatagctatcaaacttttccttagtaaacgtctctttagagacatcccaacgccagtcaggtttgaaattaccactaagaagagtaaagaaatttctcgctatgatagaaagcccatcaactttataaattatatctgatttatctccagaggaattaataaaataataaccgcccttacactcaacagtaacggtaatgggagacgataattttaacacatggttattgtctggtataattgtaaagataaacgtatcagtagtattgtcggcaaatctattatattcttgaatatctatagaaggttcactattataaaaccatactttctccatctggtgactacgatcatttaccttccagtgaccatgttgcaggaaatagatgatatgcaggccaaaatcgttatctatttgcgaatcattatccagtttatcaaattcaactatctttgcacgatgtgttttatcaaccttgccatggtgttgatgactgttaactttatctgaatgcttatcttgatggtttgaagagaagtgcttaaatatattgtgaaatactttcataaataacctgtaatatttttacttgttagtaacaaaataaacaatacatgtctgaaagacatatttacgatgatacaaagcaataatacttatatgttcgatgattttaagcaccgagactatccggtcttttactaaataatggaaaacaatccatccctggaagataattgtaaaaaaaacaacagaataagaattaatcttaggataaatatttatttatcatggccttttaaccggtaaaaaatggcactcggcacagtaaaccccgctatagttatgctatgcatttgtctttaatgatatctcgtcgttatattaacaggctgaaattatcattaatgcacatttcattattagcagggatacctgaggagtttaaagtgaacatatatatcgggtggcttttcaaattaatccctttgattatgggattaatttgcatcgcgttaggtggctttgtgctggaaagttcagggcaaagcgagtatttcgtcgcgggtcatgtgctgatttctctggcggccatatgcctggcattattcactaccgcatttattatcatttcgcagctcacgcgcggcgttaatacgttttacaatacattgttccccattattggctatgcggggtcaattatcaccatgatatggggttgggcactgttagcaggcaatgatgtgatggcagacgagtttgtcgccggccatgttattttcggcgttggtatgattgccgcctgtgtatcgacggtggcagcgtcatccggtcactttctgctcattcccaaaaatgcagcggggagcaagagcgatggaacgccggtacaggcttattcttcattaatcggtaattgcctcattgccgttcccgttttactcaccctgctcggtttcatttggtctattacgctgttacgtagtgctgacataactccgcattatgtcgcgggtcacgtattgcttgggttaaccgcaatctgtgcctgtctaattggccttgttgccacaattgtccatcaaacacgtaatacgttttcaactaaagaacactggctgtggtgttattgggttatttttctcggctcaatcacggtactgcaggggatatacgtcttagtcagttccgatgcaagcgcccgactggctcccggcattattcttatttgcctcggaatgatctgttacagcatattctcaaaagtctggctactggcactggtatggagacgtacctgttcgttagccaacagaataccgatgattcccgtcttcacctgcctgttttgccttttcctggcatcgtttcttgcggaaatggcgcagaccgacatgggatattttattccttcgcgggttttggtcggtttaggagcggtatgctttacgttgttctcaatcgtttcaatattagaagcaggttctgctaaaaaataattgcaacgtaccggataaaaccagcgttgaccatttgcgtaacgctggtttttcttaggcatcatgaaataacgcagcattaatgcatagtggttaaggataaaaaaacaacaaagttactgtttttttcaacctgttcatattttataaagatctggccactgggtgagttttcaatcacctttccttccatcttatattaagcctggagggtttcagttcacgggctcattagaaaataatcacaagatagccactatcaaaattagctcatttttaatgcggctctaataattttcatctttaggtaacaggtcaggacgacttcgctgcaatcaaatcctgcgcacaagcccacgcactcgaccacgcccactggaagttatagccccccagccagccggtaacgtccatcacttcgccgatgaagtacagcccaggcactttgcgcgcttccatcgtccgtgaagagagttcgttggtgtccacgccgccgagcgtcacttcggcagtgcgatagccttcagtgccgttgggttgtacgcgccagtcggtcaatgtgctaatcagtgcctgttggtcacgcacgttgagctgttttagcgaaacatccgggatttgcccgagttgctgtaagcgttcaaccaaccgcttcggtagatgaaccgccagtgtgtttttcaggctctgattcggatgtgcgttacgctgctcattcaggaaggtttcgagatccacatccggtagcagattgatactgacaaattcacccggttgccagtagctggaaatctgcaacaccgccggtccagacaagccgcgatgggtgaagagtaagttctcacggaaaacgatgccgttttcagcggtaatcacggaaggcaccgccacgcccgccagcacctgtaactcttcgagcaacggtttatgcagagtgaatggcaccagacccgcgcgggtcggcagcacgttgaggccaaattgttcggcaatcttataaccaaacggcgacgcgcccagccccggcattgacagcccaccggtcgcgatgaccagcttttcgcaaccgacagtcatgccgttcagttcaagcgtgaagcctgtttcatccttcgccacactcagcacttcgctacgcaatctgaaggttacattgcccttctcgcactcatccaccagcatgtcgacaatctgctgcgcggagtcatcgcagaagagttgtcctaacgttttctcgtgccaggcgatgccgtgtttattgaccagatcaatgaaatcccactgggtaaaacgcgcgagtgcagacttacaaaaatgcggattctggctcagataagcgcctggttcgacataaaggttggtaaagttgcagcgcccaccgccagacataaggattttgcgccctggttttttaccattatcgatcagcagaacccggcgtcctgcctgacctgccagcgcagaacagaacatacccgccgcaccagcgcctataataatggcatcaaacctttccacgttgcgctcctcttagaaaaaacgggcgtgaattgtaaagattcctcagtggtcgcaccagcatcaatattactaaaaggaagtatttgcctgaattatataagataattattttttgagtgaaatccatacaggaggcaaatcaaaaaaagtctatatttcactttgcccgcgccgcgaaagtcactgataatgcgccgcgttcatgtcctcaaaatggcgtaacgtcctatgctacatttgtttgctggcctggatttgcataccgggctgttattattgcttgcactggcttttgtgctgttctacgaagccatcaatggtttccatgacacagccaacgccgtggcaaccgttatctatacccgcgcgatgcgttctcagctcgccgtggttatggcggcggtgttcaactttttgggtgttttgctgggtggtctgagtgttgcctatgccattgtgcatatgctgccgacggatctgctgcttaatatgggatcgtctcatggccttgccatggtgttctctatgttgctggcggcgattatctggaacctgggtacctggtactttggtttacctgcatccagctctcatacgctgattggcgcgatcatcgggattggtttaaccaatgcgttgatgaccgggacgtcagtggtggatgcactcaatatcccgaaagtattaagtattttcggttctctgatcgtttcccctattgtcggcctggtgtttgctggcggtctgattttcttgctgcgtcgctactggagcggcaccaagaaacgcgcccgtatccacctgaccccagcggagcgtgaaaagaaagacggcaagaaaaagccgccgttctggacgcgtatcgcgctgatcctttccgctatcggcgtggcgttttcgcacggcgcgaacgatggtcagaaaggcattggtctggttatgttggtattgattggcgtcgcgccagcaggcttcgtggtgaacatgaatgccactggctacgaaatcacccgtacccgtgatgccatcaacaacgtcgaagcttactttgagcagcatcctgcgctgctcaaacaggctaccggtgctgatcagttagtaccggctccggaagctggcgcaacgcaacctgcggagttccactgccatccgtcgaataccattaacgcgctcaaccgcctgaaaggtatgttgaccaccgatgtggaaagctacgacaagctgtcgcttgatcaacgtagccagatgcgccgcattatgctgtgcgtttctgacactatcgacaaagtggtgaagatgcctggcgtgagtgctgacgatcagcgcctgttgaagaaactgaagtccgacatgcttagcaccatcgagtatgcaccggtgtggatcatcatggcggtcgcgctggcgttaggtatcggtacgatgattggctggcgccgtgtggcaacgactatcggtgagaaaatcggtaagaaaggcatgacctacgctcaggggatgtctgcccagatgacggcggcagtgtctatcggcctggcgagttataccgggatgccggtttccactactcacgtactctcctcttctgtcgcggggacgatggtggtagatggtggcggcttacagcgtaaaaccgtgaccagcattctgatggcctgggtgtttacccttccggctgcggtactgctttccggcgggctgtactggctctccttgcagttcctgtaatcgtacacaccaaaacgagcgggtcagtttactggcccgctttttttatgcgttattattgctgaagtgcttaatgccaaatcatcaatgcaatcaggctgaccaccaccagaccacacaatgcgctggtcagaataaactgccgacgcacccgctcacagcggcgaataaattcatcatcgtgatgatcgcgataacgttgggcatagatataccaaacgagacgcacctgtttgttgggttggccatgtgaggtaaaaaagccccctccatcaacatattgatagagcaatggatcgcagttacgcagtaccactaacaacgcgcgtagtgatgagaaatagcgcgccatgttaacaatgcaaacgacacataaagcccaaaataatgcgacggtgcttatcatacctcctccccggcgacctgcccgcggagttccaccccggggctaccgctcccgatacgctgccaatcagttaacaccaggtcctggagaaaccgcttttgtggtgaccaacatccgagcggctctatagatagtgtaggagatcaggttgttttttttccagaaggttaaccactatcaatatattcatgtcgaaaatttgtttatctaacgggtaagcaaggcggattgacggatcatccgggtcgctataaggtaaggatggtcttaacactgaatctttacggctgggttagccccgcgcacgtagttcgcaggacgcgggtgacgtaacggcacaagaaacgctagctggccagtcatcgacaactttatggaaggagtaacactatggcttataaacacattctcatcgcagtcgatctctccccggaaagcaaagttctggtagagaaagcagtctctatggctcgcccctacaatgcgaaagtttctctgatccacgtagatgtaaactactctgacctatacaccgggcttattgatgtgaatctgggtgatatgcagaaacgcatctctgaagagacacatcatgcgctgaccgagctttccactaatgcaggctacccaatcactgaaaccctgagcggcagcggcgacctgggccaggttctggtcgatgcaatcaagaaatacgatatggatctggtggtttgtggtcaccaccaggacttctggagcaaactgatgtcttccgcacgtcagctgatcaacaccgttcacgttgatatgctgattgttccgctgcgcgacgaagaagaataatcatccctccacgacgtgttcctgaacgcccgcatatgcgggcgttttgctttttggcgcgccttgttacctgatgcagcgtaaaccccttatctggcctacgatctgcgtacgcaatcaaaatctcctgccaatacaacatttaacaccatcatattttccatcattagtgtgatcagctggttattttctgttgtaatagtgtattaatctattcaccgcatcaatattaagaatctctgacagatgtaaactttttcgcgcgttatcccttacgcgttcatacttttcaggatggtattggaaggttaataaatatgaatacaacaacacccatggggatgctgcagcaacctcgcccatttttcatgatcttttttgtcgagttatgggagcgattcggctactacggcgtgcagggcgtactggcggttttcttcgttaaacagcttggattctcgcaagagcaggcttttgtcacttttggtgcttttgctgcgctggtctatggcctcatttccattggcggctatgtcggcgaccacctgctggggaccaaacgcaccattgttctcggagcacttgtgctggcgattggctacttcatgaccggcatgtcgctacttaagcctgacctgattttcatcgccctggggactatcgctgtcggtaacggcctgtttaaagctaacccagccagcttgctttcgaagtgctatccgccgaaagatccgcggcttgatggcgcattcaccctgttctatatgtcgatcaatatcggctcgttgatagcgttatcgctggcccctgtgatcgctgatagattcggttattcagtcacctacaacctgtgcggggcggggttaattatcgcattactggtttacatcgcctgtcgtggaatggtgaaagacattggttctgaacccgacttcaagccgatgagcttcagcaaactgttgtacgtattacttggcagcgtggtgatgatcttcgtctgtgcatggctgatgcacaacgtagaagtcgccaatctggtgctgattgttctctccatcgtcgtcaccatcatcttctttcgtcaggcattcaagctggataaaaccgggcgcaataaaatgtttgtcgcctttgtcctgatgctcgaagcggtggtgttttacattctctacgcccagatgccaacgtcgctgaacttctttgccatcaacaacgtgcatcatgaaattctcggcttttccatcaacccggtcagcttccaggcgcttaacccgttctgggtggtactcgccagcccaatactggcaggcatttacacgcatctgggtaacaaaggcaaagacctctcgatgccgatgaaatttactctcggcatgtttatgtgctcactgggctttttgacggcggcagctgcgggaatgtggtttgcggatgcccaggggctgacatcgccatggtttatcgtgctggtgtatttattccagagcctgggtgaattgtttattagcgcccttggcctggcgatgattgctgccctggtgccgcagcatttgatgggctttattcttgggatgtggttcctgacgcaggctgccgcgttcttgctgggcggctatgtggcaacatttaccgcggtgccggacaacattaccgatccgcttgagacgttgcccgtctataccaacgtgtttggtaagattggtctggtcacgctgggcgttgcagtagtgatgctgttgatggtgccgtggctgaaacgcatgattgcgacgccggaaagccattaattattcttgcagaaagcagggtagcgttatcgctaccctgctttacttttacacgggcgtacctgcatagatatcaaagcgatgccctttagtcacaaccgcgtttggcgtggcgacattcgctagcggtggcgcgtagtccgggcgctttactaccacgcgtttggtcgccagcaagcgtgcaggctccagcaatccatcggcatcaagatccggccccaccagcgactgaaagacacgcatctcttttttcaccagcgcgcttttctgcttatgcgggaacatcgggtcgagatagaccacctgcgggcgtggggtaatatcggttagcgccgtcaggctggaggcgtgaattaactgcaaacgctcctgcaaccagccgccgatttccgcatccgcataaccacgcgccaggccgtcgtcgagcaatgcggcaacgactggattacgctccagcatccgcacgcggcaaccgactgaagccagcacaaaggcatcgcgccccagccctgcggtggcgtccaccacatccggcaaataatcgcctttaatgcccaccgctttcgccaccgcctcaccgcgaccaccgccgaatttgcgtcggtgcgccatcgctccgccaacaaaatcaacaaatatgccgccaagttttggctcatcacgcttgcgcaattccagatgttccggcgttaacaccagcgccatcaggttgtcttcatcgtgctccagcccccagcgggccgccagaacagataaggcgccgtctccggcgcctgtttcatcaattaagcagattttcactgaatgatcagcccttaatgccgtaatgctccagcatcgcatccagctgcggttcacgaccacggaagcgtttgaacagatccatcggctcttctgaaccgccacggctcagaatgttgtcgaggaacgactgcccggtttcacggttgaaaatgccctcttcctcaaagcgcgagaaagcatctgccgccagtacgtcagcccacaggtagctgtagtaacctgccgcataaccaccggcgaaaatatggctgaaagcgtgcgggaaacggccccaggacggagatggcaccacggcaaccagtttcttgatttctgccagagtttcgaggatttttgccccctgatccgggcggaactcggcatgaaggcggaaatcaaacaggccgaactccagctgacgcagaataaacagcgccgcctggtagttcttcgccgccagcattttatccagcaactctttcggcagcggttcgccggtttcatagtgaccggagataaacgccagcgcctccggctcccagcaccagttttccataaactgactcggcagttcgaccgcatcccacggcacaccgctgataccggaaacaccagcggtttcgatgcgggtcagcatatggtgcaggccgtgaccgaactcgtggaacagggtgatcacttcgtcgtgagtgaacagcgccggtttaccatttaccgggcggttgaagttacaagtcaaatacgcgaccggtttttgcagcgaaccatcagctttacgcatctggcctacgcagtcatccatccacgccccgccgcgcttgttttcacgggcatacagatcgaggtagaagctgccgcgcagttcgttattttcgtcatacagttcgaagaaacgtacatccggatgccagacatcaacatctttacgctctttagcggtgatgccgtaaatacgtttcaccacttcaaacaggccgttaaccgctttgttttctgggaagtacggacgcagctgctcgtcgctgatgctgtagaggtgctgtttttgtttttcgctgtagtacgcgatatcccacggctgcaactcatcgacgccaaattccgctttggcgaaggcgcgcagttgtgccagctctttttcgccttgcggacgcgcgcgttttgccagatcggttaagaaatccagcacctgctgcgggttttctgccattttagtggcaagggatttaaaggcgtagttttcaaagcccagcagttgcgccagttcgtgacgcagagcgaggatctcttccatcaccttgctgttatcccatttaccggcgttcgggccttgatcggaggcgcgggtgctgtaagcgcgatacatctcttcacgcaaggcctggttgtcgcagtaggtcattaccggcaggtagcttgggatatccagcgtcagcaggtagccttccagctctttcgcttcggcctgggcttttgccgcagccagcgcgctttcaggcatccccgccagctccgcttcgtcggtaacgagtttggtccagcccatcgtcgcatcgaggacgttgttgctgtactggttgcccagctcggaaagacgagtggcaatctcaccgtagcgttgttgtttctctattggcagaccgatgccagagagttcgaagtcacgcagtgcgttatcaaccgcttttttctgagccgtgttcagcgtggcgtaatgatcgccatcgcgcaggtcgcgatacgctttatacagcccttcatgttgccctacccaggtgctgtattccgacagcagcggcagggtttgttcgtacgcttcacgcagttccgggctatttttcaccgagttcaggtggctgaccggggagaagatacgccccagcacatcgtccacttccgccaacggctggcagagattttcccaggtgtacggtgctccttgcgctactacgcgctccacattttcgcggcagtcgttcagcgccttagtcacggctggaacgacatgttccgggagaattttagaaaacggaggcaattcaaagggagtcagtaacggattcgtcattcgcgcagtcctggttaaagaggttaaggaagcgctcaacaggcgctttacataatgtgtgtagcatggggttaagtgtagtgaatttcaatgagaaacgttacgctttcgcggcggcggcctcttttcggtatactgtcctgatacgcttttgtgcgccccgaatacgggccgatttttacttaccggaacacctttacccatgctcagttatcgccacagctttcacgctggcaaccacgccgacgtccttaaacataccgttcagagcctgatcatcgagtcgctgaaagagaaagataaaccgtttctctatctcgacacccacgcaggggccgggcgttatcagttaggcagcgaacatgccgagcgtaccggcgaatatctcgaaggcatcgcccgtatctggcagcaggacgatttgcccgcagaactggaggcgtacatcaatgtggtaaaacacttcaaccgtagcggtcagttgcgttactaccccggttcgccattgattgctcgccagctactgcgcgaacaagacagcctgcaactgaccgaactgcacccgagcgattacccgttgctgcgttctgaatttcagaaagacagccgtgcgcgcgtcgaaaaagccgatggtttccagcagcttaaggccaaactgccgccggtttcccgccgtggtttaatccttatcgacccgccgtatgaaatgaaaaccgactatcaggcggtggtcagcgggatagcagaaggttacaaacgtttcgccactggtacttacgcactgtggtatccggtggtgctgcgtcagcaaattaagcgcatgatccacgatctggaagcgaccggtattcgcaaaattctgcaaattgaactggcggtactgccagacagcgatcgccgtggcatgaccgcttccggcatgattgtgattaacccgccgtggaaactggaacagcagatgaataacgtgctgccgtggctgcacagcaaactggttccggcaggcaccgggcacgccaccgtaagctggatcgtgccggagtaattgcagccattgctggcacctattacgtctcgcgctacaatcgcggtaatcaacgataaggacactttgtcatgactaaacactatgattacatcgccatcggcggcggcagcggcggtatcgcctccatcaaccgcgcggctatgtacggccagaaatgtgcgctgattgaagccaaagagctgggcggcacctgcgtaaatgttggctgtgtgccgaaaaaagtgatgtggcacgcggcgcaaatccgtgaagcgatccatatgtacggcccggattatggttttgataccactatcaataaattcaactgggaaacgttgatcgccagccgtaccgcctatatcgaccgtattcatacttcctatgaaaacgtgctcggtaaaaataacgttgatgtaatcaaaggctttgcccgcttcgttgatgccaaaacgctggaggtaaacggcgaaaccatcacggccgatcatattctgatcgccacaggcggtcgtccgagccacccggatattccgggcgtagaatacggtattgattctgatggcttcttcgcccttcctgctttgccagagcgcgtggcggttgttggcgcgggttacatcgccgttgagctggcgggcgtgattaacggcctcggcgcgaaaacgcatctgtttgtgcgtaaacatgcgccgctgcgcagcttcgacccgatgatttccgaaacgctggtcgaagtgatgaacgccgaaggcccgcagctgcacaccaacgccatcccgaaagcggtagtgaaaaatgccgatggtagcctgacgctggagctggaagatggtcgcagtgaaacggtggattgcctgatttgggcgattggtcgcgagcctgccaatgacaacatcaacctggaagccgctggcgttaaaactaacgaaaaaggctatatcgtcgtcgataaatatcaaaacaccaatattgaaggtatttacgcggtgggcgataacacgggtgcagtggagctgacaccggtggcagttgcagcgggtcgccgtctctctgaacgcctgtttaataacaagccggatgagcatctggattacagcaacattccgaccgtggtcttcagccatccgccgattggtactgttggtttaacggaaccgcaggcgcgcgagcagtatggcgacgatcaggtgaaagtgtataaatcctctttcaccgcgatgtataccgccgtcaccactcaccgccagccgtgccgcatgaagctggtgtgcgttggatcggaagagaagattgtcggtattcacggcattggctttggtatggacgaaatgttgcagggcttcgcggtggcgctgaagatgggtgcaaccaaaaaagacttcgacaataccgtcgccattcacccaacggcggcagaagagttcgtgacaatgcgttaaatgttaaagggctaagagtagtgtgctcttagcccttaattacgtttccgctatcagttcagaagctgaagcagaaagcggatcagttccagcagcgcaattaacgccccaagaacgatgattgctttatcaatcacccgttttctccatgcgatggagtgagaatgcatccgcttactcatccactgcctgtcacggcgcatgccctattgttagataatggcattctcactccggccagagcatcagttaacggcaccacccgtacttctgaccaggactttgaaagcgtttatgcgcattaccagagtgaaaatgcctcagagctaactggataatcatacagtacattcaggttataaaaccagcatgtccttgcaatagtttcagtatggtattagcattgatgcgttagataatggcattctcactccagccagtgccaccaactcagggctggaaagtaaaaaaccgacgcaaagtcggtttttttacatccggattcggacaaggcttaatatgacgatgacccagtgaaagtatataaatcgtcattgcgatatataccgaagtgccccctccgccagctgaagaaatcgctaattcttgcaatgttagccactggctaatagtattgagctgttagataagaactctctcactccagccagagccaccaactcagggctggaaagtaaaaaaccgacgcaaagtcggtttttttacgtcctgattcagacctcctttcaaatgaatagccaactcaaaattcacacctattaccttcctctgcacttacacattcgttaagtcatatatgtttttgacttatccgcttcgaagagagacactacctgcaacaatcaggagcgcaatatgtcatttctgttacccatccaattgttcaaaattcttgctgatgaaacccgtctgggcatcgttttactgctcagcgaactgggagagttatgcgtctgcgatctctgcactgctctcgaccagtcgcagcccaagatctcccgccacctggcattgctgcgtgaaagcgggctattgctggaccgcaagcaaggtaagtgggttcattaccgcttatcgccgcatattccagcatgggcggcgaaaataattgatgaagcctggcgatgtgaacaggaaaagattcaggcaattgtccgcaacctggctcgacaaaactgttccgcagacagtaagaacatttgcagttaaaaaatttagctaaacacatatgtattttcgcatgtgttttatccaggaggcattatgttactggcaggcgctatctttgtcctgaccattgtattggttatctggcagccgaaaggtttaggcatcggctggagtgcaacgctcggcgcagttctggcgttagttacgggcgtggtccatccgggtgatattccggtggtgtggaatatcgtctggaacgcgacggctgcgtttattgccgtcattatcatcagcctgctgctggatgagtccggcttttttgaatgggcggcgctgcacgtttcacgctggggcaatggacgcggtcgcttgctgtttacctggattgtcctgcttggtgctgccgttgccgccctgtttgccaatgatggcgcggcgctgattttaacgccaattgtcatcgccatgctgctggctttagggttcagtaaaggcactacgctggcgttcgtgatggcggccggattcattgccgataccgccagcctgccgcttattgtctccaacctggtgaatatcgtttccgctgatttctttggcctcggctttcgcgaatacgcctcggtgatggtgccggtggatatcgccgcgattgttgccacgctggtgatgttacatctctattttcgcaaagatattccgcagaactacgatatggcgctgctgaaatctcccgcagaagcgatcaaagatcctgctacgttcaaaactggctgggttgttttactgcttctgctggtgggatttttcgtcctggaaccgctcggcattccgctgagcgccattgcagctgtgggcgctctgatattatttgtcgtcgctaaacgcggtcatgcgattaatacgggtaaagtcctgcgcggtgccccctggcagattgtcatcttctcgctcggcatgtatctggtggtttatggcctgcgcaatgccggattaacggaatatctttctggcgtactcaacgtgctggcggataacggcctgtgggccgcgacgctcggcaccggattcctcaccgccttcctctcttctattatgaacaatatgccgacggtactggttggcgcgttgtccattgatggcagcacggcatctggcgttatcaaagaagcgatggtttatgccaatgtgattggctgcgatttgggaccgaaaattaccccaattggtagcctggctacgctactctggctgcacgtactttcgcagaagaatatgactatcagctggggatattacttccgtacagggattatcatgaccctgcctgtgctgtttgtgacgctggctgcgctggcgctacgtctctctttcactttgtaatgagatactgatatgagcaacattaccatttatcacaacccggcctgcggcacgtcgcgtaatacgctggagatgatccgcaacagcggcacagaaccgaccattatccattatctggaaactccgccaacgcgcgatgaactggtcaaactcattgccgatatggggatttccgtacgcgcgctgatgcgtaaaaacgtcgaaccgtatgaggagctgggccttgcggaagataaatttactgacgatcggttaatcgactttatgcttcagcacccgattctgattaatcgcccgattgtggtgacgccgctgggaactcgcctgtgccgcccttcagaagtggtgctggaaattctgccagatgcgcaaaaaggcgcattctccaaggaagatggcgagaaagtggttgatgaagcgggtaagcgcctgaaataaagcggcgatatccactgcccatagttggtaaagtgcgctttgtttatgtcggatgcgacgctaacgcgtcttatccgacctacaaaaccgtgcatggcatgaaatctgtagcgcgtagcgcatcaggcaattttgctatttacgcagcactcctcgcgtaagaattcaattatcgcttccagcattgcgtattgcgaaacacacatcagcgtccgactctcacggttttgtttgaccagtcctaccgataccagtgctgatatatggtggctgagtgtggagccaggtatcccaagctgcttttgcaactcaccgaccggcaacccttgttccccggctttgacaagatgtttaaatatgaacaaacgggtcgggtgacctagctctttcagcgctttagcgacttcttccaactgcatatgacacccctctgtctggttgatatttcgataataccagaaatatcttgatctgaatttcatttcgattattctggaaatatagatttatccaatgaggttacgtatgagtagttggcttgcgatgctgcaagatgccgcagagatgtttgtgtttctcgccgtcgagctttcgttgctgtttatagtgattagtgccggtgtcagcctgataagacaaaaggtgccagaccataaaatccagcagatgatgggggccagaaaagggagaggctatctcctggctgctctgttgggagccgttaccccgttctgtagttgctcgacaatacccatgttacgtggattgttgtcagcgaaagccgggtttggtccgactctcacttttttatttgtttcaccattacttaatcccattatcgtcggactaatgtggatgacctttggttggaaagtcaccttgttgtacgcgattatcgccgccggcgtctccgttcttgccagtattatcctggattctctggggtttgaacgtcatatcattgccagtaaaagctcatcagcaaattgttgtgctctagcaaaaacttcgccgggaacgacatatacgcccataaaagtgagttgttgtagtccagcggctaaagccattgagaaccccgtagttacctgttgcagtaccaaagctgtagtaagtattaatcccataaaactagccaccaaagatgcgttgcaacagtttaaagatgtactgccatatcttttgttaggagtattaataggatcttttatttatggctttattccctcagcgtggattgccgctcatgcaggagcagataatcccttcgccatcccattaagcgccgttgtcggtattccgctgtatatccgggctgaggcagttatccctctggcatctgttctgatgacaaaaggaatgggtctgggagcattaatggcattaatcatcggcagtgccggcgcaagcctgacggaagtgatattacttaaatcaatgttcagaatgccgatgatagctgcattcctgacggttatattaggtatggctatcttgatgggctatttgactcaattgctattttaaatagatgccagcagtaaactataagatgcatagttagtgccatatccttctaagtagaaaatcatagacaggataatccttaaaaatcacaaatgatttaactaatgcattgagaatgatgacggctcggtcaacaagtcatcaacagacaataaccacgtaatcatgcttctctgacattttatcggagaagcaatgactctttgtctcagtaccctcctcctttttaaaaggcagatttcagtcgctaatacaacacatttttaaatacactttaacctggttcattattacacatctaaaacatcacaaaaatattacttcacacactatcggagaacataataactttttaaaatgagcgctttttgatagttgttaacgttttcctttacgatactatcactgccttttttttatacacaaatattaccgggtggaaatgaaagggaatttaaaggtaattatatcaggaagatataacgcattatatttattgtgtgtagaagaaaatccattcctgttctaattattcaatttaaaaaccttagcataaaacagatgatgaataaggaatgttatgtcaattgactttaccccaggtataataaatacatatcacggcgatatttataactgcacaacaaataccgataatgttaaaacgccagacacaccgaagtggccttgtgataattgggaagaacaacaacccattaattccatattctctggagaaggatacaaccctgaacaatttgatttagcgcaacaacaactccaacaaattaatgcatgccacacgaacaccacatatacaaatgcagactactcaaaagttgtggttcaacttgtaagtcttattaataacattgaaacgataagttcgacaccacttacgcaacagacacaatcaatacttaatcagattaataacattagatatgaaaaaaacaaaagtgctgaatgtcgaatcattgttgtcgctaatcctaaacccgacaaggcaatcataactaaaattagcgtagaagagggaatacccataacattcagtgtccaaaccatgttttcagatactaattttattgctgaacaacgagctgacttaccaactaatataaaagatattcaaagcctgtatcaaaaaatgacgaagttatatattgagcacagtgaaaataaaaacaggatgaaagtctttgccggaaccaactttattgatttcaatatgacaggacagaacctgtccgggttcgttctaaccttgtcaaggttttatttcgaagatctacttaatataaatttcactgacgcaaatttaggtgacactattttttacataaagaacaccctacccccaaattatataaagatggacaatatcttgacaaacaaatcgaaggtttattttcaacattattaaccattaatgacaactttttacgagcaaaagcggaaattgcttcgacaataattaaatttttagaggctaggataaccaatctttcatacaatgacatattaacatatcagcaagaattccaaaaacaatgttataagcaagttaaagcctttgcgacactctctcgatacaataaaattcaaacatgggcagaaatgtctgaatatcagttcgaagtatttcaatacgagacgcttaaccccaaaaaaatgtcacacacgccttatttaaagagccacttcctaatgaaaaagatataaattatggggtggaaatagaaataccatctggcaaaagaattcgcttatcaaatcattatcagaatataataccataatattgattattagcactttataatcattgaataaaaatagattttatgtaattttaaaacaaagggttatattattgggcgatggatactcataccacgccccaaaataacggaattgaactaaacagaagggatataaacatcagacaggtttacgttactatcaggcatatcacctcagaatcagatgaaaactataaagaaatatctattatggttttaatatttgttgataaggatagtaacatgaacatgacaaaaggtgcactcatcctcagcctttcatttttgcttgccgcatgtagttcaattccgcaaaatatcaaaggcaataaccaacctgatattcaaaaaagttttgttgctgttcataaccagccggggttatatgttggtcaacaagcgcgctttggtgggaaggttatcaacgttatcaatggcaaaacggatacgttgttagaaatcgctgtattaccgttggatagctatgcgaagcctgatattgaagccaactatcagggccgactgctcgccagacaaagcggcttccttgatccagtgaactatcgtaatcactttgttaccatcctcggtaccattcagggtgaacaaccaggctttatcaataaagtcccgtataacttcctggaagtgaatatgcagggcatccaggtgtggcatttgagagaagtggttaataccacctataacctgtgggattacggctatggtgcattctggccggaaccgggctggggtgcgccttactacaccaatgcggtgagtcaggtaacacctgagctggtcaaataacaccaccgaaagatgcagatgctttctcagcatctgcatcatgtattacataaaattaatatacagtaagctaactattattattataagccctgtcctgttaattacctttggcaaactgattataaagttaatgtccgcaccaggagtcggttatgtttcttataattaccagggatacgatgttcttcaccgcgatgaaaaacattctgagtaaaggtaatgtcgttcatatacagaacgaagaagagatcgacgtaatgttgcatcagaatgccttcgtcattattgatacattaatgaataatgtatttcattctaattttctcactcaaattgaacgattaaaacctgtccatgtgattattttctccccctttaatattaaacgctgcctggggaaagtgccggtgacctttgttccgcggactatcactatcattgattttgtcgcactcatcaatggcagttactgctctgtgcctgaagcggctgtgtcactttcgcgcaagcaacatcaggttctgagctgcattgcgaatcaaatgacaacggaagatattctggagaaactgaaaatatcgctaaaaacgttctactgccataaacacaatatcatgatgatcctcaatcttaagcggatcaatgagctggtacgccatcagcatattgattatctggtgtgaatttcaggcttacggtgagtctggctacgctgccacacagattagctaattgaaacgcctttcacccctgccataccttttaataatcgcaacaggtcttctatcgacgttgtggcatgaagctggatatcaatggcgaccacttcatgatcttcattttcctgcaacgaaactaaatccgtttttattttttgctgcttaaaccagtcgagcattgataccgtattaccgttcactaatgtcagctgtaaatggtaatttttgttcatcaggcggaaggttaattgatggaagacttccagcaccaacaaggtcatcactgaaccataaatacccagttcgtacataccgctgccaataaccatacctatggcggcggtcacccagatatccgctgccgtcgtcagacctacaatattttggttacgaacgagaatgttacctgcaccgataaacccgacgcccgtcaccacctgagcagcaatacggctggggtcgagtccgacgtgatctaaagacagcacgtcagcaaaaccatatttcgaaacaatcataaacagggcgcttcccatgccaattaatacatgtgtgcgtaaccctgctcctttgccgcgcatttgcctttccatgccaatagcgccacaggcaattgccgcgagtataagacgtataataaattctgctgtcatataaaaatgcaaaaaggagcagcaagatggctcaacttgctactcctttttacttgtacctcattaattcggcaagtcattagatgcttgatttttgaaggtatacaaatttttctgcgggtttttcttacagtattcgatcactttaggaatttgagtgagatcggtttcatttaaagtaacggtatcgccacctttatatactgtttcttcatgcagcatccaccatgcaaccggggtcattgcttttggattcagatcaataaattcctggcaggtcatatctttagcggattcattggctgccagcgcagattgtgcgttcaccagtgacaaagccgctacagcgcccataaaaataaacgctttacggagagatgaaatattcattttgtaacccattcaatatagagattatatatgaacaggaggaatagctgcttttaaagaagatattccggcctgttcaatatgcaaggaagtacgatgtaacgcattcccggaattacatatctttcttaattttgtcccattcgcctttaactttatctttaaagttggcttgtttatcctgagtacaagcctgaacgatagctggggttacggttgcaataccctgaacatctaaaaccgcatcttctggtttatctttgttgttcagcgcttcagcaaaaccaactgcagttggctggaaggattcgtccacagccaggaaatcttcacaggtccaggagttgaccggttttttgttatcagctgctttttgcgcatccgctgcattgctcacaactggcagaagaagcagaccaccaagaataacgcctaatacttttttcatcgtaatatcctcaactataaagtgaaagagccgtcacgaatcaatttcgacactgaggttataacctggttttctgtatatgtcatgttgatggaaaatatcaaaatcagatatttttatttcaatacaatgagttacagatgcatcagatactgcaattaggaaatttttattaaatcgactgcattcttagacgcgtttttggcatagattgatagcaggggattttcttcttaattttatagggtggttctatgttatatatagataaggcaacaattttgaagtttgatctggagatgcttaaaaaacatcgcagagcaatccagtttattgccgtgctgctgtttatcgtcgggttgctgtgtatcagtttcccgttcgtctctggcgatattttaagcacagtagtgggtgcattattaatctgctcgggtattgcgcttattgtcgggttattcagcaaccgcagtcataatttctggccggtattatccggtttcctcgtcgcagtcgcctatttattgatcggctatttcttcatccgcgcaccggagctgggcatttttgccattgcggcatttattgccggtttgttctgtgttgcaggagttattcgcctgatgagttggtatcgtcagcgttcaatgaaaggcagctggctacagctcgttattggtgtgctggatatcgtcattgcctggatattccttggtgcaacgccgatggtgtctgtaacgctggtttccacactggtgggaattgaactgatatttagcgccgccagcctgttcagcttcgccagtttgttcgttaagcagcaataattaccccggttgtcacccggatcatagtcacttgatgtgactatgatccgattaatactctctccgctacgcagtgttgtagatcaattgcgcactatcattgaaataattacctgctagtgattatttcaacctactgaatttcatctaattttttttactccatggcaaattagccatttcaaacattatcatggctgatattttccgtagtcaggtttaatgttttaaaagtgctgtgggaaagtgaacaaagagttccgtaagcgttgatgctatgggcggttaaataagtaatccgggttcatttttttgcaactggcgttgattacattgcataaatatccgtgtctccagacgctatataaaaacctgaagacatgaatgcgttatttactcaggtaatttcaatgcgttaaaagaaagctggcaatccaattgccagcttaagtcgaaacaaggagactcgatatttaaatcggattacattttaactttagtaatattcttcagagatcacaaactggttattgataacttattcttgggcagtaatccgcaaacgttaactttttgtttactatttacaagctgataacaaccaggaatcttacttaggatcaatatatggagtgcgtgatggataaatctgaagtattgattagtgttaatagacgtattagttcacgaagggtaaagttcttataggcgtttactatattgaacaacgattcggacaaggatgtaaataatgaaaaggatgacatgttcgaaacgataacggctaaggagcaagttatgatttttctcatgacgaaagattcttttcttttacagggcttttggcagttgaaagataatcacgaaatgataaaaatcaattccctgtcagagatcaaaaaagtaggcaataaacccttcaaggttatcattgatacctatcacaatcatatccttgatgaagaagcgattaaatttctggagaaattagatgccgagagaattattgttttggcaccttatcacatcagtaaactaaaagctaaagcgcctatttattttgttagccgcaaagaaagtatcaaaaatcttcttgagattacttatggtaaacacttgccccataagaattcacaattatgtttttcacataatcagttcaaaattatgcaactgattctgaaaaataaaaatgaaagcaatatcacgtcgacgctcaatatttcgcaacaaacattaaagattcagaaattcaacattatgtacaagctgaaactaagacgtatgagcgacatcgtcaccctgggtatcacatcttatttttagtcaggacataagcaactgaaattgatggctggcatgacgagggatgcagatgctgatttcattacccccggtgattactaaaggagaggctaaaacgactttattcccctggtatgtgtatccaccagtagaacccttcgttgcccgaatgctggcaggaactgttggcagaacggcaacattttttttgtcgttgacctcaccatgtcgatcactgtgcctgtatcccaccttactggctgacaaccccactatgccgctggtctgtaaatccctcatatctctcctcgcgcgcaatttaaagaaccgttatttctcaagaattttcagggactaaaatgaacagaagaagaaagctgttaataccgttgttattctgcggcgcgatgctcaccgcctgcgatgacaaatcggcggaaaacgccgccgccatgacgcctgaggtcggtgtcgtcacactctcccccggttcggtcaatgtgttgagcgaattgcccggtagaaccgttccttatgaagttgccgagatacgtccccaggtgggcggtattatcattaaacgcaactttatcgaaggcgataaagtgaaccagggcgattcgctgtatcagattgatcctgcacctttacaggccgagctaaactccgccaaaggctcgctggcgaaagcgctctctaccgccagcaatgcccgcatcacctttaaccgccaggcatcgttgctgaagaccaactacgttagccgtcaggattacgataccgcgcgcacccagttgaatgaagcagaagccaatgtcaccgtcgccaaagcggctgttgaacaggcgacgatcaatctgcaatacgcgaatgtcacctcgccgattacgggcgtcagcgggaaatcgtcggtgaccgtcggcgcactcgttaccgctaatcaggcagattcgctggttaccgtacaacgtctggacccgatttatgtcgatctcacgcagtcggtgcaagatttcttacgcatgaaagaagaggtcgccagtgggcaaatcaaacaggttcagggcagtacgccagtacagctcaatctggaaaatggtaaacgctacagccagaccggcacgctgaaattctccgacccgacggtggatgaaaccacgggctccgtgacgttacgggcgattttccccaacccaaatggtgacttgctgcctggcatgtacgtcacggcattagtggatgaaggtagccgccagaatgtattactggtgccgcaggaaggcgtcacccacaacgcccagggtaaagcaacggcgctcattctggataaagacgatgttgtgcagctacgcgaaattgaagccagcaaagccatcggcgaccagtgggttgtcacctctggcttgcaggctggcgatcgggtgatcgtttccggtttgcaacgcattcgtccgggtatcaaagcacgagcaatttcctccagccaggaaaacgccagcaccgaatcgaaacaataacgttgcaggcttaaggggactttcatggctaactattttattgatcgcccggtttttgcctgggtacttgccattattatgatgcttgcaggtggtctggcgatcatgaacttaccggttgcgcagtatccgcagattgcgccaccgaccattaccgtcagcgctacctatccaggtgccgatgcgcaaacggtagaagactcggtcactcaggtgattgagcaaaatatgaatgggcttgatggcctgatgtacatgtcttcaaccagtgatgcggcgggtaatgcctctatcactctgaccttcgagactgggacatctcctgatatcgcacaggttcaggtgcaaaataaactgcaactcgctatgccttcattacctgaagcggtgcagcagcaggggattagcgttgataagtcgagcagtaatattctgatggtagcggcgtttatttctgataacggcagcctcaaccagtacgatatcgcggactatgtagcgtctaatatcaaagacccgctaagccgtaccgcgggcgttggtagcgtacagctctttggttccgagtacgccatgcgtatctggctggacccgcaaaaactcaataaatacaatctggtaccttccgatgttatttcccagattaaggtgcaaaacaaccagatttccggtggtcaactgggtggcatgccacaggcggcagaccagcaactaaacgcctcgatcattgtgcagacgcgtctgcaaacgccggaagaatttggcaaaatcctgttgaaagttcagcaagatggttcgcaagtgctgctgcgtgatgtcgcccgcgtagaacttggagcggaagattattccaccgtggcgcgctataacggcaaacctgctgccgggatcgccatcaaactggctaccggagcaaacgccctggatacctcgcgggcagtcaaagaggagctgaaccgcttatcagcctatttccccgcaagtctgaagacggtttatccttacgacaccacgccgtttatcgaaatttctattcaggaagtttttaaaacactggttgaggctatcatcctcgtcttcctggtcatgtatctgtttttgcagaatttccgtgccacaatcatcccgacgattgccgtaccggtggttattctcgggacgtttgcgatcttgtcggcggtcggtttcaccatcaacacgttaactatgttcgggatggtgctggcgatagggttactggtggatgacgccatcgtggtggtggagaacgtcgagcgtgtcattgcggaagataagctaccaccgaaggaagcgacgcataaatcgatggggcagatccaacgtgcgctggtcggtattgctgttgttctttccgcagtgtttatgccgatggcctttatgagcggcgcaaccggggagatctaccgccagttctccatcacgctgatctcctccatgctgctttcagtatttgtggcaatgagcctgacccctgccctgtgcgccaccattctgaaagccgcgccggaaggcggtcacaaacctaacgccctgttcgcacgcttcaacacgctgtttgaaaaatcaactcagcactataccgatagcacccgctcgctgttgcgttgtaccggtcgctacatggtggtctacctgctgatttgcgccgggatggcggtgctgttcctgcgtacaccgacctctttcttaccagaagaggatcagggggtatttatgaccaccgcgcagttaccttccggtgccaccatggttaacaccacgaaagtgctgcaacaggtgacggattattatcttacaaaagagaaagataatgttcagtcggtgtttaccgttggcggctttggcttcagcggccaggggcaaaacaacggcctggcgtttatcagtctcaagccgtggtctgaacgtgtcggtgaggaaaactcggttaccgcgatcattcagcgggcaatgattgcgttaagcagtatcaataaagccgtcgtcttcccgttcaacttacccgcggtggctgaactgggtaccgcgtcaggttttgatatggaactgctggacaacggtaacctggggcacgaaaaactaacccaggcacgaaacgagctgttatcactggcagcgcaatcgcctgaccaggtcaccggggtacgcccgaacggcctggaagatacgccgatgttcaaagtgaacgtcaacgccgcgaaagctgaggcaatgggtgtggcgctgtctgatatcaaccagacaatttccaccgccttcggcagcagctacgtgaacgacttcctcaaccaggggcgggtgaaaaaagtgtatgtccaggcaggcacgccgttccgtatgttgccggataacatcaaccaatggtatgtacgcaacgcctctggcacgatggcaccgctttctgcctactcgtctaccgaatggacctatggttcaccgcgattggaacgctacaacggcatcccgtcaatggagattttaggtgaagcggcggccgggaaaagtaccggtgacgctatgaaatttatggcagacctggtcgctaaacttccggcaggcgtcggctactcatggaccggactgtcgtatcaggaagcgttatcctcaaaccaggctcctgcactgtatgccatttcactggtcgtggtgttcctcgccctcgccgcactctatgagagctggtcaattccgttctcggtgatgttggttgttccgttaggcgtcgttggcgcattactggccaccgatctgcgcggcttaagtaatgacgtctacttccaggttggtttgctgaccaccatcgggctttccgccaagaacgccatcctgattgtcgaatttgccgttgagatgatgcagaaagaagggaaaacgccgatagaggcaatcatcgaagcggcgcggatgcgtttacgcccaatcctgatgacctctctggcctttattctcggcgtgctgccgctggttatcagtcatggtgccggttctggcgcgcaaaacgcggtaggtaccggcgtgatgggcgggatgtttgccgcaacagtgctggcaatttacttcgttccggtctttttcgttgtagtggaacatctctttgcccgctttaaaaaagcgtaacgtgtaaatgagagtaaggttgaacgtgaaggttcagccttactctttcctgctaaccattcaccactcaacaaccagctaaccgtcaggaataccaggcttagtacacagcactgaaagtagaaaccactccagccattcgtcatcaatttgaacagcacaatactgacccacattcccgtaatcgtatgaattgtcagcttaataatcccaaacatgccgagtcttttcctcctgaaaatacctataccgcctggcaaactgcgaaagagaactagccggtagcccggcagaaatcatcagggaagagtttcacatgaagcaggtgtgagatcctgaccaatattcaaatgcaaaatatgtcaggaaaaggtacctggcgaatgttgcgcaaactgatgtggcgttacaccataatattgtcgaaatgtgtttataaagtacgacgtactgctatagccacatttttctgcaatagtatgcagaggaatttgacgtaactcgagtaatcgtctggccatcgacatcctggaagcgagtaatattttactgaaacaggtattttcatcctgcaacttttttttgatgagactctcgctggtatacattctttccgcgatatcgcgcagataccaacgtttggcgatatcaaagctaataaggcgttcaacttttcctgaaacagtgctgatgctattgaaaagtaaggggatcagttctttcttatgagaaaacatcgataaacaggaaaggtagagcatattgctcagtatcggtgaatttaccccggattcattgaagctatcaaaaatcgccgtcaccagcggcatggggggtgactggttaattaatagacggtctttgctatgtaaccctaaattgcgtggtagctgacgaatattttgtaagtaatggcaaactgtcagctcatcgatatccagtcgtcgcgtatccggtgaacaaaacgcaaaatcgtctgccaaatttttctccagcagcacgatactctcgttatgcagcgatattttatgctgttcatgataaatatcgaatgaacgacgaatgaggatcaccgagcagacatgagtcatgattatcccttatatttcatactgcgattatttcaatttcagtatactaatgaaatgttgccagactgtttcttagcgaaaaaactgccagatttggtaggaccaaaatttatccacaaagtagttttgcataacagttaattgataataagtaaatgcagcacgaatatattttcgcactgcgtatagcttatgtttataaaaaaatggctgatcttatttccagtaaaagttatatttaacttactgagagcacaaagtttcccgtgccaacagggagtgttataacggtttattagtctggagacggcagactatcctcttcccggtcccctatgccgggttttttttatgtctgagtaaaattctataatcttattccttccgcagaacggtcagtgccgtaaaaatttccttgcgcaacaatacttgccgccgagtcacggttcggcaatccctgcgccgatcgctcctgatactctgtgggcgtcatcccataataatttcgaaagacgtaaatgaaatacgacacgctgtgatatccacaggacactgcgactcgcttaattgaaaagccatgtataacaataagttgcaaagcacgttgcattctacactcagtaagcaactgtgaatatgatgtctcttcttcgcgcaattttttctttaacaggcttggactcatcaacagctcgctggcgattcgggctagtgtccactcatgggcgatattattattgataaccgtacaaactcgtgttcgcatgttcggttgcaaaacgttcaaaagcagcggtataaagtgctcatcctcaagaaaaacagataacaacgcaaagattaatgctcttttacgtagcatttctgcatagcgaagattcttattctgcgatagttgcgcaacttcctgaaaaacaggaatatctctgctacagtgatgaacgagtaatgaagaaatttttttatgtgcatgaagatttaatgcctcctccttgagcatcggcagaaataatgaaagcgtatcccttgatactaatacaaaattttcaacacacttatctactcgaatttggcttgcatccgcaaaaaccaggtcaccgccattaaaatagcgatattcaccattaaccatggtgagaatatatttatgtcttgcgtacgcaattagacaattcccatgtaatgattgcatagttgacttaatattacataaacatattactgttaattaatgtagcacgccgccctcttaagtcaaattgattgataaataaatttaaacgaagcgggagaacaggatgataatgtgtgatgttctacgggcaggatgactggatttataatacaaaaacgtgtttaagaacgcagtgaaattaatagcaagcaaataatcccttttcgtgacattaaaggcaatcgctacatttaataaacattcatataacatatatcttatcaacacgatgaatagacagccaatatattattgcgattaataagcaaccgaatgcccagctgtttttttaaaggctgggcattcggtttttacaacgttatgttatcaggtgtgtttaaagctgttctgctgggcaataccctgcagtttcgggtgatcgctgagatatttcagggaggctttgtagtcttccagcaacagttcagcaaagtccatttcgaagccgcgacgacacataa

SEQ ID NO: 20 - DNA, 174433 bp, Escherichia coli
  source 1..174433: mol_type = genomic DNA
aaggcagtccgctgcataaatctacgcaacaggttagaacccaaggcccgatacggcatgcggactgcaggcagagaaaactggccgattttctctgcactggagggataatacaaggcctgataagacgcattagcgtcgcatcaggcagcgcacggacttagcggtattgcttcagcaccgcgcgacccagcgtcaggatctgcatttcgtcagatcccccggagacgcggtctacacgcaggtcacgccagaagcggctgatgcggtggttgcccgcaatcccgacaccgcccagcacctgcattgcgctatccaccacttcaaatgccgcattggcgcagaagtatttgcacatcgctgcatcgccagaggtgatggtgccgttgtctgctttccacgctgcttcatacagcatgtttttcatggagtttaatttgatcgccatgtgggcgaatttttcctgaatcaactggaaacggccaatagcctcgccaaactgcacgcgctggttggcgtagcgcgccgcatcttcaaaggcgcacatcgccgtaccgtagttggtgagagctaccaggaaacgttcatgatcgaactcttctttgacgcggttaaagccgttaccttcccgaccgaacatgtctttctcgtccagttccacgtcgtcaaaggtgatttcacagcagctatccatacgcagaccgagcttttcaagtttggtcactttgatgcccggtttgctcatatcaacaaaccattcggtgtagacaggtttgtccggagaagccccgtcgcgcgccatcaccacgatgtacggggtgtaggcgctgctggtaataaaacacttactaccattaagataaatcttaccatttctacgggtataagtcgttttcaggctacccacgtcggagcccgcgcccggttcggtaatcgctgagttccacatctgcttaccggtgccgcggaaagccataatcttgtcgatctgctcttgtgtgccttcgcgcaggaaggtgttgaacccgcccggcaactggtacagcacataggttggtgcccccagacgtcccagctccatccacacggcggcgagagtaacaaaccccgcgtccagaccaccgtgctcttcagggatcagcagactgtcgatacccatatccgccagtgctttgacaaaacgttccgggtagacgctgtcacggtcgcactcggcaaaataggcctcccagttttcgctggccatcagttcgcggataccggcgacaaacagttcctgctcatcatttaaattaaaatccatctttcaacctcttgatattttgggggttaattaatctttccagttctgtttcgcgtctttaataaaggagagcgtcaccataatgttgacgaagaacagcgggcatcctccggcgataatggcggtttgaatcggtttcaggccgccgagcgccagcagaacaataccgataatgccaaccagaattgaccaaccgatacgcaccagcagaggtggttcttcaccatcgcgtacttcgcggcaagtggacatcgccagggtataagagcaggcgttaaccagcgtaacggtggcaataaagcagaggatgaagaagccccacatggtggcggtgctgagtggcagagcggcccaggtttcaatgatggcgcgcgccacaccgtactgttcgatcagatttggaatgttgatgatgtttttatctatcaacagcagagtgttactaccgagtacagtccacaggatccaggttgacgctgtcagccccagcaccatgccgaagcacagttcacgcacagtacgaccacgggagatgcgggcgaggaagatactcatctggatagcataaatcacccaccatgcccagtagaacacggtccagccctgcgggaagccgcctttagcgatgggatcggtatagaacaacatgcgcggcagatacatcagcaacatccccaccgaatcggtgaagtagttcatgatgaagctggcaccgctgacaatgaacacccaacccagcatcaggaagctcaggtaactacgcacgtcactggcgatacgtacccctttttgcagaccgcaagcgacgcaaatggcgttgaggataatccagcaggtaatgatgatagcgtccagttgcagggtatgcggaatgccaaacaaccattgcatacactcggtcaccagcggcgtggcaaggcccagactggtacccatcgcgaagatcaaggcgacgagatagaagttgtcgacgatagtgccgaacaaccctttggcgtgtttttcacctaccagcggcaccagtgtcgagctggggcgaatcacttccattttgcggacaaagaagaagtaagcgaaggcgactgaaaggaagctgtaagtggcccacggcagaggtccccagtggaacaagctgtaagccagccccaactctttcgctcctgtcgagttcggttctaagccaaacggcggggtggagatgtagtagtagatctcaatcgatccccagaacagtacggcagcagacgtacaggaggcgaacatcataaagatccaactggcggtactaaattcaggtggttcgttacctaaacgctttttggcatacgggccaaacaccagccagaaccaaccgaaaagcatcaccaccatataccattcaaatgcccatccccatacattggtgacgtaactgaatacagcattaataacgacattcgctgcatccagatctctgactgtaagccaacaaagtatgccgacgattattaacggcggaaagaaaaccttcggttctattcccgtttttctcttttcattcttcatgagttaattccactgtgaaaacgaatatttattttgcgttcccgtttgttttatttttgttaacatttaatataattattattaacctcgtggacgcgttaatggctaactcataatgggtattcaataagctgcattctgtgattgttatcacatttttgtttcgggtgaatagagggcgcttttctcgttaattttgattattaatcagtttgttatgttgtgttgtgagtaaaaaaatagcatctgactttcaatattggtgatccataaagcaatattgaaaatttctttttgctacgccatgttttcaatattggtgaggaacttaacaatattgaaagttggatttatctgcgtgtgacattttcaatattggtgattaaagttttatttccaaattaaagggcgtgatatctgtaattaacaccaccgatatgaacgacgtttccttcatgatttctggagatgcaatgaagattattacttgctataagtgcgtgcctgatgaacaggatattgcggtcaataatgctgatggttcattagacttcagcaaagccgatgccaaaataagccaatacgatctgaacgctattgaagcggcttgccagctaaagcaacaggcagcagaggcgcaggtgacggccttaagtgtgggcggtaaagccctgaccaacgccaaagggcgtaaagatgtgctatcgcgcggcccggatgaactgattgtggtgattgatgaccagttcgagcaggcactgccgcaacaaacggcgagcgcactggctgcagccgcccagaaagcaggctttgatttgatcctctgtggcgatggttcttccgacctttatgcccagcaggttggtctgctggtgggcgaaatcctcaatattccggcagttaacggcgtcagcaaaattatctccctgactgcagataccctcaccgttgagcgcgaactggaagatgaaaccgaaaccttaagcattccgctgcctgcggttgttgctgtttccactgatatcaattccccacaaattccttcgatgaaagccattctcggcgcggcgaaaaagcccgtccaggtatggtcggcggcggatattggttttaacgcagaggcagcctggtcagaacaacaggttgccgcgccgaaacagcgcgaacgtcagcgcatcgtgattgaaggcgacggcgaagaacagatcgccgcatttgctgaaaatcttcgcaaagtcatttaattacaggggatgctatgaacacgttttctcaagtctgggtattcagcgataccccttctcgtctgccggaactgatgaacggtgcgcaggctttagctaatcaaatcaacacctttgtcctcaatgatgccgacggcgcacaggcaatccagctcggcgctaatcatgtctggaaattaaacggcaaaccggacgatcggatgatcgaagattacgccggtgtcatggctgacactattcgccagcacggcgcagacggcctggtgctgctgccaaacacccgtcgcggcaaattactggcggcaaaactgggttatcgccttaaagcggcggtgtctaacgatgccagcaccgtcagcgtacaggacggtaaagcgacagtgaaacacatggtttacggtggtctggcgattggcgaagaacgcattgccacgccgtatgcggtactgaccatcagcagcggcacgttcgatgcggctcagccagacgcgtcacgcactggcgaaacgcacaccgtggagtggcaggctccggctgtggcgattacccgcacggcaacccaggcgcgccagagcaacagcgtcgatctcgacaaagcccgtctggtggtcagcgtcggtcgcggtattggcagcaaagagaacattgcgctggcagaacagctttgcaaggcgataggtgcggagttggcctgttctcgtccggtggcggaaaacgaaaaatggatggagcacgaacgctatgtcggtatctccaacctgatgctgaaacctgaactgtacctggcggtggggatctccgggcagatccagcacatggttggcgctaatgcatcgcaaaccattttcgccatcaataaagataaaaatgcgccgatcttccagtacgcggattacggcattgttggtgacgccgtgaagatccttccggcgctgaccgcagctttagcgcgttgatccactctggcagggctgcattttggccctgccgctgacagggagctcttatgtccgaagatatctttgacgccatcatcgtcggtgctgggcttgccggttcggttgccgcactggtgctcgcccgcgaaggggcgcaagtgttagttatcgagcgtggcaattccgcaggtgccaagaacgtcaccggcgggcgtctctatgcccacagcctggaacacattattcctggtttcgccgactccgcccccgtagaacgcctgatcacccatgaaaaactcgcgtttatgacggaaaagtcagcgatgactatggactactgcaatggtgacgaaacctcgccatcccagcgttcttactccgttttgcgcagtaaatttgatgcctggctgatggagcaggccgaagaagcgggcgcgcagttaattaccgggatccgcgtcgataacctcgtacagcgcgatggcaaagtcgtcggtgtagaagccgatggcgatgtgattgaagcgaaaacggtgatccttgctgatggagtgaactccatccttgccgaaaagctggggatggcaaaacgcgttaaaccgacggatgtggcggttggcgtgaaggaactgatcgagttaccgaagtcggtaatcgaagaccgttttcagttgcagggtaatcagggcgcggcttgtctgtttgcgggatcacccaccgatggcctgatgggcggcggcttcctttataccaatgaaaataccctgtcgctggggctggtttgtggtctgcatcatctgcatgacgcaaaaaaatcggtgccgcaaatgctggaagatttcaaacaacatccggccgttgcaccgctgatcgcgggtggcaagctggtggaatattccgctcacgtagtgccggaagcaggcatcaacatgctgccggagctggtcggtgacggcgtattgattgccggcgatgccgccggaatgtgtatgaacctcggttttaccattcgcggtatggatctggcgattgccgccggggaagctgcagcaaaaaccgtgctttcagcgatgaaaagcgacgatttcagtaagcaaaaactggcggaatatcgtcagcatcttgagagtggcccgctgcgcgatatgcgcatgtaccagaaactaccggcgttccttgataacccacgcatgttcagcggctacccggagctggcggtgggcgtggcgcgtgacctgttcaccattgacggcagtgcgccagaactgatgcgcaagaaaatcctccgccacggtaagaaagtgggcttcatcaatctaatcaaggatggcatgaaaggagtgaccgttttatgacttctcccgtcaatgtggacgtcaaactgggcgtcaataaattcaatgtcgatgaagagcatccgcacattgttgtgaaggccgatgctgataaacaggtgctggagctgctggtgaaagcgtgccccgcaggtctgtacaagaagcaggatgacggcagtgtgcgcttcgattacgccggatgtctggagtgcggcacctgtcgcattctggggctggggtcggcgctggaacagtgggaatacccgcgcggcacctttggtgtggagttccgttacggctgatgttggtttgatacgtaacgccgcactgactctcattgcaaaaaacaggaataacccatgcaaccgtccagaaactttgacgatctcaaattctcctctattcaccgccgcattttgctgtggggaagcggtggtccgtttctggatggttatgtactggtaatgattggcgtggcgctggagcaactgactccggcgctgaaactggacgctgactggattggcttgctgggtgcgggaacgctcgccgggctgttcgttggcacatcgctgtttggctatatctccgataaagtcggacggcgcaaaatgttcctcattgatatcatcgccatcggcgtgatatcggtggcgacgatgtttgtctcatcccctgtcgaactgttggtgatgcgggtacttatcggcattgtcatcggtgcagattatcccatcgccacctcaatgatcaccgagttctccagtacccgtcagcgggcgttttccatcagctttatcgccgccatgtggtatgtcggcgcgacctgcgccgatctggtcggctactggctttatgatgtggaaggcggctggcgctggatgctgggtagcgcggcgatcccctgtttgttgattttgattggtcgattcgaactgcctgaatctccccgctggttattacgcaaagggcgagtaaaagagtgcgaagagatgatgataaaactgtttggcgaaccggtggctttcgatgaagagcagccgcagcaaacccgttttcgcgatctgtttaatcgccgccattttccttttgttctgtttgttgccgccatctggacctgccaggtgatcccaatgttcgccatttacacctttggcccgcaaatcgttggtttgttgggattgggggttggcaaaaacgcggcactggggaacgtggtgattagcctgttctttatgctcggctgtattccgccgatgctgtggttaaacactgccggacggcgtccattgttgattggcagctttgccatgatgacgctggcgctggcggttttggggctgatcccggatatggggatctggctggtagtgatggcctttgcggtgtatgcctttttctctggcgggccgggtaatttgcagtggctctatcctaatgaactcttcccgacagatatccgcgcctctgccgtgggcgtgattatgtccttaagccgtattggcaccattgtttcgacctgggcactgccgatctttatcaataattacggtatcagtaacacgatgctaatgggggcgggtatctcgctgtttggcttgttgatttccgtagcgtttgccccggagactcgagggatgtcactggcgcagaccagcaatatgacgatccgcgggcagagaatggggtaatttgttcagatttctctcttttctgaatcaatattattgactataagccgcgtgaatatatgactacactttgtgggaaaacaaaggcgtaatcacgcgggctacctatgattcttataatttatgcgcatccgtatccgcatcattcccatgcgaataaacggatgcttgaacaggcaaggacgctggaaggcgtcgaaattcgctctctttatcaactctatcctgacttcaatatcgatattgccgccgagcaggaggcgctgtctcgcgccgatctgatcgtctggcagcacccgatgcagtggtacagcattccaccgctcctcaaactttggatcgataaagttttctcgcacggctgggcttacggtcacggcggcacggcgctgcatggcaaacatttgctgtgggcggtgacgaccggcggcggggaaagccattttgaaattggtgcgcatccgggctttgatgtgctgtcgcagccgctacaggcgacggcaatctactgcgggctgaactggctgccaccgtttgccatgcactgcacctttatttgtgacgacgaaaccctcgaagggcaggcgcgtcactataagcaacgtctgctggaatggcaggaggcccatcatggatagccatacgctggttcaggcgctgatctacctcggatcggcggcgctgattgtacccattgcggtacgtcttggtctgggatcggtacttggctacctgattgccggctgcattattggcccgtgggggctgcgactggtgaccgatgccgaatctatcctgcactttgccgagattggcgtggtgctgatgctgtttattatcggcctcgaactcgatccacaaaggctgtggaagctgcgtgcggcagtgttcggcggtggcgcattgcagatggtgatttgcggtggcctgctggggctgttctgcatgttacttgggctgcgctggcaggtcgcggaattgatcggcatgacgctggcgctctcctctacggcgattgccatgcaggcgatgaatgaacgcaatctgatggtgacgcaaatgggtcgcagtgcctttgcggtgctgctgttccaggatatcgcggcgatcccgctggtggcgatgattccgctactggcaacgagcagtgcctcgacgacgatgggcgcatttgctctctcggcgttaaaagtggcgggtgcgctggtgctggtggtattgctggggcgctatgtcacgcgtccggcgctgcgttttgtagcccgctctggcttgcgggaagtgtttagtgccgtggcgttattcctcgtgtttggctttggtttgctgctggaagaggtcggcttgtcgatggcgatgggcgcgtttctggcgggcgtactgctggcaagctcggaataccgtcatgcgctggagagcgatatcgaaccatttaaaggtttgctgttggggctgtttttcatcggtgttggcatgtcgatagactttggcacgctgcttgaaaacccattgcgcattgtcattttgctgctcggtttcctcatcatcaaaatcgccatgctgtggctgattgcccgaccgttgcaagtgccaaataaacagcgtcgttggtttgcggtgttgttagggcagggcagtgagtttgcctttgtggtatttggcgcggcgcagatggcgaatgtgctggagccggagtgggcgaaatcgctgaccctggcggtggcgctgtcgatggcagcaacgccgattctgctggtgatcctcaatcgccttgagcaatcttctactgaggaagcgcgtgaagccgatgagatcgacgaagaacagccgcgcgtgattatcgccggattcggtcgttttgggcagattaccggacgtttactgctctccagcggggtgaaaatggtggtactcgatcacgatccggaccatatcgaaaccttgcgtaaatttggtatgaaagtgttttatggcgatgccacgcggatggatttactggaatctgccggagcggcgaaagcggaagtgctgattaacgccatcgacgatccgcaaaccaacctgcaactgacagagatggtgaaagaacatttcccgcatttgcagattattgcccgcgcccgcgatgtcgaccactacattcgtttgcgtcaggcaggcgttgaaaagccggagcgtgaaaccttcgaaggtgcgctgaaaaccgggcgtctggcactggaaagtttaggtctggggccgtatgaagcgcgagaacgtgccgatgtgttccgccgctttaatattcagatggtggaagagatggcaatggttgagaacgacaccaaagcccgcgcggcggtctataaacgcaccagcgcgatgttaagtgagatcattaccgaggaccgcgaacatctgtcattaattcaacgacatggctggcagggaaccgaagaaggtaaacataccggcaacatggcggatgaaccggaaacgaaaccctcatcctaataaagagtgacgtaaatcacactttacagctaactgtttgtttttgtttcattgtaatgcggcgagtccacggagagagcgtggactcgccagcagaatataaaattttcctcaacatcatcctcgcaccagtcgacgacggtttacgctttacgtatagtggcgacaattttttttatcgggaaatctcaatgatcagtctgattgcggcgttagcggtagatcgcgttatcggcatggaaaacgccatgccgtggaacctgcctgccgatctcgcctggtttaaacgcaacaccttaaataaacccgtgattatgggccgccatacctgggaatcaatcggtcgtccgttgccaggacgcaaaaatattatcctcagcagtcaaccgggtacggacgatcgcgtaacgtgggtgaagtcggtggatgaagccatcgcggcgtgtggtgacgtaccagaaatcatggtgattggcggcggtcgcgtttatgaacagttcttgccaaaagcgcaaaaactgtatctgacgcatatcgacgcagaagtggaaggcgacacccatttcccggattacgagccggatgactgggaatcggtattcagcgaattccacgatgctgatgcgcagaactctcacagctattgctttgagattctggagcggcggtaattttgtatagaatttacggctagtgccggatgcgacgccggtcgcgtcttatccggccttcctatatcaggctgtgtttaagacgccgccgcttcgcccaaatccttatgccggttcgacggctggacaaaatactgtttatcttcccagcgcaggcaggttaatgtaccaccccagcagcagccggtatccagcgcgtatataccttccggcgtacctttgccctccagcgatgcccagtgaccaaaggcgatgctgtattcttcagcgacagggccaggaatcgcaaaccacggtttcagtggggcaggggcctcttccggcgattctttgctgtacatatccagttgaccgttcgggaagcaaaaacgcatacgggtaaaagcgttggtgataaaacgcagtcttcccagcccccgcaattccggtgaccagttatttggcatatcgccgtacatagcgtcgagaaagaagggataggagtcactcgatagcaccgcttctacatcgcgcgcgcactctttggcggtctgtagatcccactgcggcgtgatccctgcgtgggccatcaccaactttttctcttcgtcgatttgcagcaaaggctggcgacgcagccagttaagcagctcgtcggcatccggcgcttccagcagcggtgtcaggcgatctttcggtttattgcggctgatcccggcaaataccgccagcagatgcagatcgtgattgcccagcaccagacgtacgctgtcgcctaaggatttcacatagcgcagaacatccagcgaacccggcccgcgcgcgaccagatcgcccgttagccagagggtatctttcccaggggtaaattctactttatgcagcaatgcgatcagttcatcgtaacaaccatgaacgtcgccaataaggtatgtcgccatattcttttaatgaatgagtgtgggaacggcgagtcggaatacgggaatgtcgatgctgaaagggacgccattttcatcgatcatttcgtagtgaccctgcatggtgcccagcggggtttcaatgattgcaccgctggtgtactggtactcttcgccaggcgcgataagtggctggacgccaaccactccttcgccctggacttcggtttcacggccattgccattggtgatcagccagtaacgccccaacaactgcactggcgctcgccccagattgcgtatggttacggtataagcaaaaacgtaacgttcattatcaggtgaagattgtgcctcaatgtagacgctttgaacctgaatacacactcggggcgaattgatcatcgttaactctcctgcaaaggcgcgttctccgccagatagttcgccatctggcaatattgcgcgacagagatattttccgctcgcatcgccgggtcgatccccattcctgtgaacacctcgacgctaaacaggttgccgaggctgttacgaatggttttacgacgctggttaaaggcttcggtggtgatgcggctcaacacacgaacatctttaaccgggtgaggcatcgttgcatgaggaaccaggcgcacgacggcggaatccactttgggtggtggtgtaaaggctgacggcggtacttccagcactgggatcacgttgcaatagtattgcgccatgacgcttaatcgaccatacgctttgctgttcggtcctgcaaccagacgattcaccacctctttttgcaacataaagtgcatgtcggcaatggcatcagtatagctaaacagatggaacatcaacggcgtggagatgttataaggcaggttgccgaaaacacgcagcggctgacccattttctcggccagttcgccaaagttaaaggtcatcgcatcctgctgataaatcgtcagtttcgggcctaagaatggatgcgtttgcagacgtgccgccagatcgcggtcaagttcgatgaccgtcagctggtccagacgttcgccgaccggctcggtcaatgccgccagaccggggccgatttcgaccattgcctggcccttttgcgggttaatggcagaaacaatgctgtcgatcacgaactgatcgttgagaaagttttgcccgaagcgtttacgggctaagtggccctggtggactcgattattcattgggtgttaacaatcattttgatggcgagattaagcgccgtaataaaactgccgacatcggcttcgccacgtcccgccagttcaagcgcggtgccgtggtccactgatgtgcgaataaagggcaggcccagcgtaatgttcacaccgcgcccgaagccctggtattttagcacgggaagaccctgatcgtggtacatcgccagcacggcgtcggcgttatcgagatatttcggctgaaacagggtatcggcaggcagcggcccgttaagtttcatcccctgcgcccgcaactcgtcgagcagcggaataatggtgtctatctcttccgtacccatatgaccgccttcgcccgcgtgtggattcagcccgcagaccagaatgcgcggttcggcaataccaaatttggtccgcaaatcgtgatgcaaaatagcaatcacttcgtgcaaaagcgcaggggtgatagcatctgcgatatcgcgcagcggtaaatgcgtcgttgccagcgccacgcgaagttcttcggtcgccagcatcatcaccacttttttcgcctgcgaacgctcttcgaaaaactcggtatgaccggtaaacggaatgcctgcgtcgttaatgacgcctttatgcacggggcctgtgatcagcgcagcaaattcaccgttcagacagccatcgcacgctcgcgccagcgtttccaccacataatgcccattttcaaccgctaactgccccgcagtgacagattcacgtagcgcgacaggaagtagcgttaatgtgcccgcagtttgcggttgtgcaggagagttgggggaataagtgcggagggtgagcggcaaaccgagcatcgctgcccggtcggtaaggagagtggcatcggcacaaacaaccagttcgaccggccactcacgctgtgcaagctggacaactaagtccgggccaatcccggcgggctcgccgggagtgatcacaacacgttgggttttaaccattagttgctcaggattttaacgtaggcgctggcacgttgttcctgcatccagcttgctgcttcttccgagaacttacggttcatcagcatgcggtatgcacgatctttctgcgcagcgtcggttttatcgacattacgggtatccagcagttcgattaaatgccagccgaatgaagagtgaaccggtgcactcatttgacctttgttcaggcgggtcagggcgtcacggaaagccggatcaaaaatgtccgctgttgcccaaccgagatcgccgccctggttagcagaacctggatcctgcgagaactctttcgctgcggcagcaaaagtcgttttaccactcttgatatcagcagcaatctgttccagtttcacgcgggcctgttcgtcagtcatgatcggcgacggtttcagcagaatatggcgagcatgaacttcggtcaccgagatatttttgctttcgccgcgcaggtcgttaactttcagaatatggaagccaacgccggaacgaatcggacccacaatgtcgcctttcttcgcggtgcttaatgcctgggcgaagatcccgggcaactcctgaatacggccccagcccatctggccgccgttcagcgcctgctggtcggcagaatgagcaatcgccagcttaccgaaatcagcgccgttacgcgcctgatcgacaatggcgcgcgcctggctttccgcttcgttcacctgatcagaggtcgggttttccggcagcgggatcaggatgtggctcaggttcagctcagtgctggcgtcgttttggttacccacctgctgcgccagggattcgacttcctgcggcaggatggtgatgcgacgacgcacctcgttgttacgcacttcagagataatcatctctttgcggatctggttacgataggtgttgtagttcagaccatcgtaagccagacggctgcgcatctgatccagcgtcatgttgttctgtttcgcgatgttagcaatcgcctgatccagctgctcatcggagattttcactcccattttctgccccatctgcaggatgatttgatccatgatcaaacgttccattatttggtggcgcagcgtcgcgtcatcaggaagttgctgccttgcctgagcagcgttcagttttaccgactgcattaatccatcaacgtcgctttccagcacgacgccgttattgacgacggctgcgactttatcgactacctggggggcagcgaaactggtattcgcgatcatggcgataccgagaagcagcgttttccagttcttcatactttttccatttcaattaaccgcactgcggattacgtggtaaatcaacaaatcacaaagagttttgatacggcagaatgttcgaacgcagcatctcttgcgtacccagaccgtagttggagctcaggccgcgaagttcgatgttaaagccgattgcgttgtcatataccgcatgttgtttatcgttatcccaaccgttcagcttccgctcgtaaccgacgcgaattgcatagcagcaggagctgtattgcacacctaacatagagtcagcttgcttgttcgcattggtgtcgtagtagtaggccccaacaatggaccaacgatcggcaattggccagctggcgacagcacctacctgcgaaataccattcttatattgctcagcagtggaatagtacttaggcagcgtagcctgaatatattccgggctggcgtaacggtaattcagctgtaccagacggtcttcatcccgacggtattcaatgctggagttactggtcgctacgttatccagacgtgtatcgtactgaatcccgccacgcaatccccaacgctcggagatacgccagtaagtatcgcctgcccacaccagtgaacccgttttgtcgtcattctcccatgttatgttgtcatcgccagtgcgagactccgtgaaatagtagatttgaccaacggaaatattaaaacgttcaacggcagcatcatcatatatgcgagatgtgacaccggtcgtcacctggttagcggaggcaatacggtcaagaccgccgtaagtccggtcccggaacaggccagagtagtcagattgcagcagagacgagtcgtagttatagatgtcgctctgatcgcgatacggcacgtacaaatactgcgcgcgcggttccagcgtttgggtataacccggagccagcatttccatatcgcgttcaaagaccattttgccgtcaactttgaattgcggcattacgcggttaacggattcgtccagcttggtcgtgtttctggagttataccagtcaagattggtttgctgataatgggttgccagcaacttcgcttcggtattgatgctgccccagttattagagagcggcaaattgatggtcggttccaggtgaacacgggttgcttcaggcatgtcgtctctggtgttaacaaagtgcactgcctggccgtaaatacgcgtatcaaacggaccaacatcattctggtagtaattaacgtctaactgcggctctgccgagtagctactggtgttctgttcgctgaaaacctggaactgcttggttgaaacggtggcattgaagttttgcaccgcatagccaacgctgaatttttgcgttgcgtagccgtcagtactggaaccgtacttgttatcgaaatcattgaagtagctaggatcgctgaccttggtgtagtcgacgttgaaacgccacacctgatccatgaccccggagtggttccagtagaataaccaacgacgtgaactgtcatcgttcgggtgttcatcttcatagactttatctgaaggcagatagtccagttccatcaagccagcgcccgcctgggagaggtagcggaattcgttctcccacatgatgttgccacgacgatgcatataatgcggcgtgatggtggcatccatatttggcgcgatgttccagtaatatggcaggtagaactcaaagtagttggtggtggtgtacttggcgttcgggatcaagaaaccagagcgacgtttgtcacccaccggcaactgcaaataggggctataaaagatcggtaccggacccaccttaaagcgggcgttccagatctccgcaacttgttcttcgcggtcatgaataatttcgctacctaccacgctccaggtgtcagaacccggcagacaggaggtaaagctaccgttatccagaatggtatagcggttttcgccacgttgtttcatcaggtccgctttaccgcgaccctggcgacccaccatctggtaatcaccttcccagacgttggtatctttggtgttcagattcgcccagcctttcggccctttgaggatcacctggttatcgtcgtaatggacattaccgagcgcatcaacggtacgtaccggctccggttgtcctggtgcctctttttgatggagctgcacttcgtcggcctgcagacggctgttaccctgcatgatatccacgctgccagtaaacacggcgtcatccgggtagtcccctttcgcgtggtcagcattgatagtcacgggtaagtcattggtatcgccctgtaccagaggacggtcatagcttggcacgcccaacatgcactgtgaggcgaggtcggctgccagtccctgttgactataaagggcggtggcaatcatggtggccaggagagtggggatacgttttttcatacgttgattttattgttccatcatcggtaacgttgcgcgtgacaaacggtcagagactaacgtactcgtcatctctacgctagtgttaatcctgtccgaatagcgtcagtggtgttaggcacggcattgaatgacaggtatgataatgcaaattataggcgatgtcccacaattgaccgcagccggaaaacggtaaaagcacctttatattgtgggagatagccctgatatccgtgtgtcgatttggggaatatatgcagtattggggaaaaatcattggcgtggccgtggccttactgatgggcggcggcttttggggcgtagtgttaggcctgttaattggccatatgtttgataaagcccgtagccgtaaaatggcgtggttcgccaaccagcgtgagcgtcaggcgctgttttttgccaccacttttgaagtgatggggcatttaaccaaatccaaaggtcgcgtcacggaggctgatattcatatcgccagccagttgatggaccgaatgaaccttcatggcgcttcccgtactgcggcgcaaaacgcgttccgagtgggaaaatcagataattacccgctgcgcgaaaagatgcgccagtttcgcagtgtctgctttggtcgttttgacttaattcgtatgtttctggagatccagattcaggcggcgtttgctgatggttcactgcacccgaatgaacgggcggtgctgtatgtcattgctgaagaattagggatctcccgcgcccagtttgaccagtttttgcgcatgatgcagggcggtgcacagtttggcggcggttatcagcagcaatctggcggtggtaactggcagcaagcgcagcgtggcccgacgctggaagatgcctgtaatgtgctgggcgtgaagccgacggatgatgcgaccaccatcaaacgtgcctaccgtaagctgatgagtgaacaccatcccgataagctggtggcgaaaggtttgccgcctgagatgatggagatggcgaagcagaaagcgcaggaaattcagcaggcatatgagctgataaagcagcagaaagggtttaaataagttttaaactgtaggcctgataagacgcggcccgcgtcgcatcaggcaatcggcgcacaattgccggatgcggcgtgaacgccttatccgcctaccgaactgcgccagcgtgacgattaaaaatccgctggcgctttaaacgtcatactattgccatacgccggatgggtaatcgtcaacatctctgcatgtagcaacaaacgtggtgccatcgctctcgcttctggtgatgcataaaaacgatcgccgagaatcggatgacccagcgccagcatatgcacacgcaattgatgcgaacgcccggtaatcggttttaacaccactcttgccgtgttatccgccgcatactccaccacttcatattccgtctgcgcaggtttacccgtttcgtaacagactttctgtttcgggcggtttggccagtcgcaaatcagcggcagatccaccagaccttctgcgggggatggatgcccccagacgcgggccacatactgctttttcggctcgcgctcgcggaactggcgttttaactcccgctccgcggctttggtcagcgccactacaatcacgccgctggtagccatatccagacgatgcaccgattctgcctgcggataatcacgctgaatgcgcgtcatcacgctgtctttgtgctcttccagacgacccggcaccgacaacaaaccgctcggcttgttgaccaccataatatggtcatcctgatacaggataaccaaccagggttcctgcggtggattgtagttttccatccccattttcggctccgttactgatgcgttacaacgatcaaacgcagggcatccagacgccaacctgcctgatccaggctttccattacctgctgacggttgctctcaatggcggtcagttcgtcgtcacgaatgttcgggttcactgcacgcagagcttccagacgagacagctcggcagacagtttttcgtcggcttcgttacgcgctgcatcaatcaatgcacgggcagatttctcgatctgcgcttcacccagttgaaggatagcgtgaacatcctgctgcacggcgttaaccagtttgctgccggtgtgacggttaaccgcgttaagctggcggttaaaggtttcaaactctacctgcgccgccaggttgttgccgtttttatccagcagcatacgtaccggcgtcggtggcaggaagcggttgagctgcaactgcttcggagcctgggcttcaaccacataaatcagttccaccaacagcgtacctaccggcaacgctttgttttttaacagtgaaatcgtgctgctaccggtatcgccagaaagaatcagatccagaccgttgcggatcagcggatgctcccaggtaataaactgtgcatcttcacgcgccagcgccacttcacgatcaaaggtgatggtgatgccatcttccgacaggccagggaagtccggcaccagcatatgatcggacggcgtcagcacgatcatgttgtcgccgcgatcgtcctgattgataccgataatatcgaacaggttcatggcgaaggcgatcaggttggtatcgtcatcctgctcttcaatgctttctgccagtgcctgggctttttcgccaccgttggagtggatttccagcaggcggtcacgaccctgttccagttgtgctttcagcgcttcatgttgctcgcggcagtttttgatcagatcgtcaaagccttcggtttgatccggtgaagccagatagttaatcagatcgttgtatacgctatcgtaaatagtgcgtccggtcgggcaggtgtgctcaaatgcatccagaccttcgtgataccagcgcaccagcaccgactgagcggttttctccagataaggcacatggatctgaatatcgtgcgcctggccgatacgatccagacgaccaatacgctgctccagtagatccgggttgaatggcaggtcaaacatcaccatgtggctggcgaactggaagttacgtccttcagaaccgatttctgagcacagcagtacctgtgcgccggtgtcttcttcggcaaaccaggcggcagcgcggtcacgttcgataatcgacataccttcgtggaacaccgcagcgcgaataccttcacgttcgcgcagtacctgctccagttgcagcgcagtggcagctttggcgcagatcaccagcactttctgagagcgatggctggtcaggtagcccatcagccactcaacgcgcggatcgaagttccaccaggtggcgttatcaccttcaaattcctgataaatacgctccgggtagagcatatcgcgagcacgatcttccgcacttttacgtgcgcccataatgccggagactttaatagccgtctgatactgcgtcggtagcggcagcttaatggtgtgcagctcgcgtttcgggaatcctttcacaccgttacgggtgttacggaacagcacgcggctggtgccgtggcgatccatcagcatcgaaaccagttcctgacgggcgctctgggcatcttcgctgtcgctgtttgctgcttgcaacagcggctcgatatcctgctcgccgatcatctcgccaagcatgttcagttcgtcattgctcagtttgttacctgccagcagcatggcaacggcgtccgcaaccggacgataatttttctgctcttcaacgaactgcgcaaaatcgtggaaacggttcgggtccagcagacgcagacgggcgaagtggctttccatccccagctgttccggggtcgcggtcagcagcagaacgcccggcacgtgctctgccagttgttcaatggcctgatattcacggcttggcgcatcttcgctccacaccaggtgatgcgcttcatcgaccaccagcaggtcccattcggcttcacagagatgttccaggcgctgtttgctacgacgggcaaaatccagcgagcaaatcaccagctgttcggtgtcaaacgggttgtaagcatcgtgctgagcttcggcataacgctcatcatcaaacagtgcaaagcgcaggttgaaacggcgcagcatttctaccagccactgatgctgtaaggtttccgggacgataattagcacacgttcagcagcgccagagagcagttgctgatgcaggatcatcccggcttcaatggttttccctaaacccacttcgtcagccagcaggacgcgcggcgcgtggcggcgaccaacatcatgagcgatgttgagctgatgcggaatcaggctggtacgctgaccgcgcaggccgctgtacggcatacggaactgttcgctggaatacttacgcgcgcgataacgcagcgcaaagcggtccatacggtcaatctgcccggcaaacagacggtcctgcggtttgctgaacaccagtttgctatcaaggaaaacttcacgcagggctacgccggactcttcagtatccaggcgagtaccgatataggtcagcaagccattttcttcttttacttcttcgacttgcatctgccagccgtcatggctggtaatagtatcaccagggttgaacatcacgcgggtcacgggggaatcactgcgtgcgtacagacggttttcaccagtagatgggaaaagtaaagtgacagttcgcgcatccaccgcgacaacggttccaagtcccaattcgctttctgtatcgctgatccagcgttgaccaagtgtaaaaggcatatgtgttcggctctatatctttaattgcaggcaataaccacccgctaccgtgcttatgaggtagtggtgttattcaggtccaggaatggaaagggcgctatggtactggatggcaaagcattcgtcacgcatcaaaatggtatctggcgaactcttttttttgctcaaaatagcccaagttgcccggtcataagtgtagcaaaattatcctcaataaaagggagtattccctccgccacgggttgtagctggcgggtcagatagtgttcgtaatccagtggtgaacgttggtagtccagcggctccgggccgttggtggtccatacgtacttaatggtgccgcgattctgatattgcaaggggcgaccgcgcttttgattttcttcatcggcaaggcgagcggcgcgtacatgaggcggaacattacgctgatattcgctcagcggacggcgaaggcgtttacggtaaaccagccgcgcatccagttcacccgccatcagtttgtcgatggtttggcggacgtactcctgatatggctcgttgcggaagatacgcaggtacagctcctgctgaaactgctgggccagcggcgtccagtcggtgcgcacggtttccagtcctttaaacaccatccgctgcttgtcgccctcctgaatcagcccggcgtagcgctttttactgccggtatcagctccgcgaatggttggcataagaaaacggcagaaatgagtttcatactccagttctaatgcgctggtcagccgttgtttttgcagcgtttccgcccaccaggcgttaacgtgctgcaccagtgcacgaccgattttcgccgcctcttcttccgaatgtgcaccttttagccagacaaaagtcgagtcggtatctccgtagataacgtcgtagccctgcgtttcaatcaatgctttggtttgccgcatgatctgatgaccacgcatggtgatcgacgatgccaggcgcggatcgaagaagcggcaggcggtggtgccgagcacgccataaaaggcattcataatgatcttcagcgcctgcgaaagcggcttattaccctgacgtttggcttcatcgcgcccgtgccagatgttagtcacaatctccggcaggcaatgtttctcccgtgagaaccaggcatcgagaaaaccttcggtactgtgctctggatcaggttgcgccatgccttcaaccagcccgacgggatcaatcagaaaggtgcggatgatcgacgggtacaggcttttatagtccagcaccagcactgaatcataaagccctggccgtgaatccatcacgtagccgccagggctggcgtgcggtggcacttcgccgagattaggcgcgacataaccagcgcgatgcattcgcggaaaatagagatgaccaaacgctgccaccgaaccgccgtgccgatccaccggcaggccgttcaccgttgctcgttcgagtaaaaatggcatgatttcagttttgtggaagatctgcgtcaccagctcgcaatctttcaggttataagttgccagcgcaggtttatcttcggcgaaacggcggtcaatttcgtccattcgatcccacgggttatcgatagattttccttcgcctaatagctcctgagcgacagtttccagcgagaatgaagagaaattccagaacgcggatttcagcgcctcgataccgtcgataattagccgacctttagcctgagcaaaaaacacaccgtttttaaagccgtgctcgcgccactccagctcactgttatcgcgccccagccgcagcggaatacgataacgctcggcatgtttttgcagcattcgcagatcaaactgcaccacgttccaaccgatgatcacatcaggatcgtagttggcaaaccaggcgttgagtttttccagtagctgcgggcgactggcgacgtattccagttcaaaatcgagcgcggaggcgtcgccattctctggccccagcatataaacgatgcgctgcccgcaaccttccaggccgatgcagtacagctcaccgtggcgggtggtttcaatatcaatagaaacccacttgagcggcggacgatagtcgggatgcggtttcagacgggcattaacgatagcgccattgcgtatatcaccctcgacccacactggcgaggtgataaaacgctccatcagatagcgttctggcgggcgcacatcggcctcgtaaacggtaacgccaccttcacgcaggcgcttttcgtaattcatcaactggcgatgggcgcgacagtaaaggccatacaccggctggcggtgaaaatcctttaacgccagcggcgtcaggcgaaagccttgttcaccctgcaaaatatgctgagcgcggggaacctgatcggcaggaataaacgccacggactcttgcggtgcaagcgtaacctgcaacggcccgttgtccgtcgccagccagaaggagacttctgtcccttgcggggtatcccgccagtgtcgggttaagataaaacctgcctgcgccacgctgaaaatccatcaaaaaaccaggcttgagtatagcctggtttcgtttgattggctgtggttttatacagtcattactgcccgtaatatgccttcgcgccatgcttacgcagatagtgtttatccagcagcgtttgctgcatatccggtaactgcggcgctaactgacggcagaatatccccatataagcgacctcttccagcacgatggcgttatgcaccgcatcttcggcatttttgccccatgcaaatgggccgtgagaatggaccaggacgccgggcatttgcgctgcatcgataccctgtttttcgaaggtttctacgatgacgttaccggtttcccactcatattcaccgttgatttctgcgtcggtcattttgcgggtgcagggaatggtgccgtagaaatagtcggcgtgggtggtgccggttgctggaatcgactgacccgcctgcgcccagatggtggcgtggcgcgagtgcgtatgcacaatgccgccaatggacgggaatgcctgatagagcagccggtgagttggcgtgtcagaggagggctttttcgtaccttcaaccacttcaccggttgcgatgctaaccacgaccatatcgtcagcggtcatgacgctgtaatcgacgccggaaggtttgatcacaaagacgccgcgctcgcgatcaacggcgctgacgttgccccatgtgagcgtgaccaggttgtgttttggcagcgccaggttggcttctaataccaggcgtttgagatcttctaacatgttgactccttcgtgccggatgcactttgcttatccggtctacaaaatcgcagcgcgtaggcctgataagacgcgccagcgtcgcatcaggcgttgaatgccggatgcgctttgcttatccggcctacaaaaacacagcgcgtaggccagataagacgcgtcagcgtcgcatcaggcgttacatacctgatgtggctacttagcgacgaaatccgtaatacacttcgttccagcgcagtgcgtctttaaacgctggcaggcgggtgtcgttatcaatcaccgtgatttcaatgtcgtgcatctcggcgaactggcgcatatcgttgaggttcagcgcatggctgaagacggtatggtgcgcgccaccagcgaggatccacgcttcggaagcagttggcagatccggttgcgctttccacagcgcattcgccaccggcagtttcggcagggagtgcggggttttcaccgtgtcgatacagttaaccagcagacggtaacgatcgccgagatcaatcaggctggcaacaatcgctggaccggtttgggtattgaagatcaggcgggcaggatcgtccttaccaccaataccgagatgctgaacgtcgaggatcggtttctcttctacggcaatcgacgggcagacttccagcatatgggagccgagcaccaggtcattacctttctcgaagtgataggtgtagtcctccataaaggaggtgccgccctgcagaccggttgacatcaccttcatgatgcgaagcagggcggcggttttccagtcgccttcgcccgcaaagccgtaaccctgctgcatcagacgctgtacggccagacctggaagctgtttcagaccgtgcaaatcttcaaaggtggtggtgaacgcgtggaagccaccttgttccaggaaacgcttcatccccagctcaatacgcgccgcttccagcacgttctgtcgtttttcgccgtggatttgtgtggcaggcgtcatggtgtagcagctttcgtactcatcgaccagcgcgttaacatcgccgtcgctgatggagttcaccacctgcaccagatcgccaaccgcccaggtattgacggagaaaccgaacttgatctgtgcggcaactttatcaccatcggtgaccgctacttcacgcatgttatcgccaaaacggcagactttcagatgacgggtatcctgtttagagaccgcctggcgcatccaggagccgatacgctcatgggcttgtttatcctgccagtgaccggtaaccacggcatgttgctgacgcatacgcgcgccaatgaagccgaactcgcgaccgccatgtgcagtctggttcaggttcataaagtccatatcgatactgtcccacggcagcgccgcgttaaactgggtgtggaattgcagcaacggtttgttgagcatggtcaggccgttgatccacattttggccggggagaaagtgtgcagccacaccaccagaccagcgcaacgatcgtcgtaattcgcgtcgcggcaaatagcggtgatttcatccggcgtggtgcccagcggtttcaacactagtttgcagggcagtttcgcttccgtattcagcgcattaacaacgtgctcggcatgttgggtgacctgacgcagggtttccgggccatacagatgctggctgccaatgacaaaccacacttcataattatcaaaaatcgtcattatcgtgtccttatagagtcgcaacggcctgggcagcctgtgccggggcggaagttggaagatagtgttgttcggcgctcatcgcccattgctgatagcggcgataaagctgttcaaagcgttgtgcctgttcgctgcgcggttgcagggttttctctaccgcactggccattttttgctgggctgatgggatgtctgcgtgcactttcgcggcgacggcagcaaaaatcgccgcaccgagcgcacagcactggtcagaggcaacaatttgcagcgggcgattcagcacgtcgcagcaggcctgcataatgacctggtttttccgcgcgatgccgcccagcgccatcacgttattgacggcgatcccctgatcggtaaagcactccatgattgcgcgtgcgccaaaggcggtggcagcaatcaaaccgccgaacagcagcggagcgtcggtagcgaggttaagatcggtaatcacccctttcaggcgttggttagcgttcggtgtgcggcggccgttaaaccagtcgagcaccaccggcaggtgatccagagacggatttttggcccatgcttcggtcagcgccggaagcagttgtttctggctggcgttgatttgcgctttcagttccggatgctgggcggcaagctgttccagcggccagccgagtacgcgaccaaaccaggcgtagatatcaccaaacgccgattggcctgcttccagaccgataaatccaggtaccacgctgccatcaacctgaccgcaaatacctttcactgcccgctcgccaacgctctgtttgtcggcaatcagaatgtcgcaggtggaagtaccgataacttttaccagtgcgttaggctgtgcgcctgcgccaactgcgcccatatggcagtcaaacgcgccgccggaaatcaccacgctttcaggcaggccgagacgctgcgcccattccgggcataaggtgcccaccggaatatcggcagtccaggtgtcagtgaacagcggggaaggcaaatggcgattgaggatcgggtccagctcatcaaagaaactggctggcggcaagccgccccagctttcgtgccacagagatttatgcccggcgctgcaacgtccgcgacgaatatcctgcgggcgggtggtaccggaaagcagagctggcacccagtcgcacagctcaatccacgatgcggcagattgcgccacggcgctgtcctggcgagtcacatgcaggatttttgcccagaaccattcgctggaataaataccaccaatgtagcgggagtagtcaacgttgcccggcgcgtggcacaaacgggtaatctcttccgcttcttcaaccgcagtgtggtctttccacaatacgaacatcgcgttcgggttttcggcaaactccgggcgcagcgccagcacgttaccgttggcatcaatcggtgcgggcgtcgagccggttgtgtcaacgccaatcccgaccacagctgcgcgctgttcgacgctaagctctgcaagcacggttttcagtgccgcttccattgactcaatgtagtcacgcggatgatgacggaactggttattcggggcatcacaaaattgccctttttgccaacggggataccactctacgctggtggcgatctcttcaccgctggcgcagtccaccgccaaagctcgcacagaatcactgccaaaatcgaggccaattgcaatcgccatcgtttcactccatccaaaaaaacgggtatggagaaacagtagagagttgcgataaaaagcgtcaggtaggatccgctaatcttatggataaaaatgctatggcatagcaaagtgtgacgccgtgcaaataatcaatgtggacttttctgccgtgattatagacacttttgttacgcgtttttgtcatggctttggtcccgctttgttacagaatgcttttaataagcggggttaccggttgggttagcgagaagagccagtaaaagacgcagtgacggcaatgtctgatgcaatatggacaattggtttcttctctgaatggcgggagtatgaaaagtatggctgaagcgcaaaatgatcccctgctgccgggatactcgtttaatgcccatctggtggcgggtttaacgccgattgaggccaacggttatctcgatttttttatcgaccgaccgctgggaatgaaaggttatattctcaatctcaccattcgcggtcagggggtggtgaaaaatcagggacgagaatttgtttgccgaccgggtgatattttgctgttcccgccaggagagattcatcactacggtcgtcatccggaggctcgcgaatggtatcaccagtgggtttactttcgtccgcgcgcctactggcatgaatggcttaactggccgtcaatatttgccaatacgggtttctttcgcccggatgaagcgcaccagccgcatttcagcgacctgtttgggcaaatcattaacgccgggcaaggggaagggcgctattcggagctgctggcgataaatctgcttgagcaattgttactgcggcgcatggaagcgattaacgagtcgctccatccaccgatggataatcgggtacgcgaggcttgtcagtacatcagcgatcacctggcagacagcaattttgatatcgccagcgtcgcacagcatgtttgcttgtcaccgtcgcgtctgtcacatcttttccgccagcagttagggattagcgtcttaagctggcgcgaggaccaacgtatcagccaggcgaagctgcttttgagcaccacccggatgcctatcgccaccgtcggtcgcaatgttggttttgacgatcaactctatttctcgcgagtatttaaaaaatgcaccggggccagcccgagcgagttccgtgccggttgtgaagaaaaagtgaatgatgtagccgtcaagttgtcataattggtaacgaatcagacaattgacggcttgacggagtagcatagggtttgcagaatccctgcttcgtccatttgacaggcacattatgcaagcattgctggaacactttattacccaatctaccgtgtattcattgatggcggtggtgttggtggcctttctggagtcgctggcgctggtcggtttgattctacccggtacggtgctgatggcggggctgggagcgctgattggcagcggcgagttaagtttctggcacgcctggctggcagggattgtcggttgcctgctgggcgactggatctccttctggctgggctggcgttttaaaaagccgttgcatcgctggtcatttctgaagaaaaacaaagcattactcgataaaactgaacatgcgttgcatcaacacagcatgttcaccattctggtcggtcgctttgttggcccgacgcgtccgctggtgccaatggtggcgggaatgctggatctgccggtggcaaaattcattacgccgaatattatcggctgcctgctgtggccaccgttttacttcctgcctgggattctggcgggcgcggcgatcgatattccagccggaatgcagagcggcgagtttaaatggttgctgctggcgacggcggtatttttgtgggttggtggctggctgtgctggcggttatggcgcagcggtaaagcaaccgatcgtttaagtcattatttgtcgcgcggccgtttgttgtggctgacgccgttaatttctgccatcggcgtggtggcgctggtggtgttaattcgccacccgttgatgccggtgtatatcgatattttgcgtaaagtggttgggggttaggagatagtcttgtgcgggttgcctgatgcgacgctgaccgcgtcttatcaggcctacaaaacgcactacccgtaggtcggataaggcgttcacgccgcatccgacagtgcatactaacccgtaatccccaatagtgccgaagcactcgccttaccgctcaacaactcattggtcttaccctgccaggcgatgcgcccgtcggcgaccaccaccgagcgtgtggcgatccgcgccgcatcttccacactgtgcgacaccatcaatagcgtcattttttgctgctggcagctcgtgctcaccagcgtcagcatctcctgacgtaacgccggatcgagcgcagagaacggttcatcgagcaataaaatcggctgttcgcgcaccagacaacgcgctaacgccacgcgctgtcgctgaccgccggaaagctcgcccggtaaccgcgccattaaattatcaatccccatctggcgggcgatagcgtgcattttctcctgctgcgccgcgttcagcttcaatcccggattaagccccagcccgatgttctgcgcgaccgtcaggtgactgaacaggttgttttcctgaaacagcatcgataccggacggcgtgacggcggcgtcgtggtgtgatcaacgccgtcgatagtcagcgaaccgctggctggcgtcagaaaaccggcgatcaaattcagcagggtacttttacccgcgccgcttggcccgaggattgccacctgctcgccgcgttctaccgttaagctaaaacgcatcggcaaatggtgataaagccaggtgatatcagtcagttttaacatttcgccccggtagtttttcaatcacggtaaacagcagaaaacagagtagtagcagaattaacgcggtgaccgcaccgtcctggctgcgataggagccaatttgctggtagagataaaacggcagggtacggaaatcatcgttaccgaacaacgccactacgccaaaatcaccaatcgacagcacgcaggcaaaagccagcgcctgcgccagtggacgtttcagggcgcgcagctcgaccacttttaagcgcgaccagccttcaatgcccagcgactgacacaacatactgtagcggtcggtgatatcgcgcatcgggttttccagtactttcagcgcataagggatcgccattaacgcattggtgaaaatcacaatgccgtcagcagattgcggcaggccaatggtgttgttgagcagtaaaaagaagccggtagccagcacaatccccggcatggcgaggatcaacatgccgctcatctccagcgcctgacccgccagcattttctgccgcgcccgcagttcgcgactgctccatagcagcatcatggtcagcactacgcacaatacacctgcagccagcgcaatacgcaacgaggtccacagcgcctgccacagcaccggttgtgccagcacttccggcaactggcgatttaccccatcgacgatcaccgccagcaacggtggcagcaacagcagcagcgccagcactattaacaccgtgtcgcaaatgcggctatgcagacgatcgtccggatcgcgccagccttgcagcagcgtggtaccgggcgcaatggccttacttagtcgctgactcaacagcaccagcccaaggcaacacaccatctggagcagcgccagcatcgccgcgcgggcaggatcgtagtcgtaactcagcgcctgataaatagccagctcgatagtagttgcctgcggaccgccgcccagcgatagcacggtggcgaagctggcgaaacagagcataaagataagcgcggcaaccggcgggatttgtcgccgtagccacggccattcgacgaagcggaaaaaatgccagccgcgcatcccaagctgggcggcaagctgacgttgttcgccgggaatgttttccagtgcctggagtaataagcggctcgccatcggcagattaaaaaatacgtgcgccagcaaaatgccttgcaggccgtagggcgaaaaggtccactccagaccgagcgattggcagagcgatgccagccagccctgatgaccatagacgctaagaatgccgaaaacagcaaccagcaccgggaggatcaaggtcattgcgcacagacgcaacagcgccagccgacccggaaagcgcctgcgatagagggcgcgggcgaggaatatcgcgggtacgacagagagtagcgccgagagaaacgcctgccagaaggagaagcgcaccacatgccacaggtagctgtcctgccagactgccacccagttaccctgcggcgcgttccaccacagggcgagaaacgccgcgagcgcaaccgctaccaccagcgtggcggcgcttacacctggaattaaccagccgggaattaacggctgacggcgcgttgccattcgctaatccatgcctgacgttgtgccgccacttcagctggtgtgaactccagcgtggttgctggtttggtcaattgttcaaacccggcaggcagcgtgacatttgccaccggatacatccagttaccggttgggatcgcattctgaaaagccggagaaaccataaactggaggaatttttgcgccagctccggctgcttgctggcagcggtgcgggcggcgacttccacctgcagatagtgaccttcgctgaagttcgcggcggcgtagttatctttcttctcttcgagaatgtgataagccggagaggtggtgtaactcagtaccagatcgctttcgccttttaaaaacaggccgtaggcttcgctccagcctttggtgacggtgacagttttcttcgccagtttctgccaggcctgcggggtgtcatcgccatagactttttgcatccacaacagcagacccagccccggcgtactggtgcgcggatcctgataaatcactcgccagttttgatcgctctcaaccagctccttcaggctttgcggcgggtttttcagtttgttcttgtcgtagacgaaggcgaagtagccgtaatcaaacggtacgaaagtgtcattattccagccgccgggaacgttaacggcatccgctgccacaccgcttttggcaaacagtccggttttactggcggcgtctaacaggttgttatccagccccagcaccacatcggctttactgtttttgccttccatccgcagacggttgagcagcgaaacgccatcttccagcgctaccagtttcagttcgcaattacagtcggcttcaaaagcttttttgatctttggaccaggcccccagtcggcggcgaaggaatcgtaggtataaacagtcagaacgggtttagcgaaaacgggcgctgtgcacagcaacagcaggggaagacatttttttaacactttgcacctcaaaaaagagtggcaaaggacttgagaaggagcctcaaatcccttcgccggcgttatccggatcaggttcgacgggtattttctcagcgcacgcatccgcgtggcaccccgttgagaacggcgttagtgtagtgattttgttatcaaccagcaatcatggatccggtggcgcaaaccacgctgatttaaaatcgaaccagccgagggtattcatgcgcaggccgcgcatactgcgttgcccctgaatgatcagccagtggtgcaataatggcaccatcgctttgctggcaaccagttgctggcaccagttcgccagattcatctcgccattgcgccagcgagcagcgtcggcttgccagtcaatgggaatgcaatgttgtagcagtggcacttcgcataaatgtgcgaaaacagagaagtccagcggcagggtaaagttggcgctgtttagccagatatcactttcgatctctcctgtatgccactgatcgtagtcgatctctttgatttccagcgtgacctgctggcttgccagaatctgctgcatgatcccggcaatcacccgatgctcactgtgatcctgataaaaggtcagggtgaggctttccagaccagtcggtttttcgctctttatggtgcgggcatggtgccaacgggggagcagtccataagccgggaaccacagttgctggtactgttcctcagcgaaatagaccagattagttggagaaagcacatagcttacccagtccctgacttgctgattcgccccgcgatgggtgcggctgtcgaatagtaaatagtagcaaccttcctccaggcggctttcaatctctttttcctcgccctgtggaccttttagcatcagacctccagctggctcgtcggcaatttccggcagaacccagacgttaacttcatcgattaatgcccggtaaccgaagaagtcatcgaatgcctgaattttcagttgattggtggtgttgcggatcaccgcatacggaccggtgccgatgggatggctggcaaagttactgagggtttcccattcgcgcggcaggatcatcgccggaacttgccccagcagtaacggtaaccagcggtccggttgcgtgagatggatatccagcgtccagggcgtcggcgacacaatgtccgcaatatgcgaatagagcggcagcgtattgattcgttttaaagaggcgatcacgtcgtccatttccagttcacgaccatgatgaaaatggactcctggacgcaaaaagaaacgccagtgaagcggtgatatttgctgccagtggtgggcgatgtctgcttccagttccccattttcctcatttatgcgcgttagcgaactgaagatttgccgggcaatatgggtttcggaacggcgcaatgcgctgccaggtagcagattacgcaacggacgatagtagagcacgcgcaggatgtgccgcccctggcggaagctgcggcccagatgagaaaccagcatttgccgcacagtcgctttgtcgccaaccaactgcactagttggtcgatacgatcctgctccagcaggtcttccgcccgctgttgctgaagcgccagcccggtatagaggaatgtcagacgcgagcgtttaccgcgcccgacttccgcttcccacgtcagccagccgcgatcctgcatggtgttgagcagggtacgcatatgacgacgcgagcagctcaataacgctgccagttcgttgagcgttgtgtcctgcgatttaccctcgcagcattgccacaggcggatgaactgttgttgcagacgagcagatggcataaaaggggaactcctgcgcaaaagacagcaattttattttccctatattaagtcaataattcctaacgatgaagcaaggaggtgccccatgcgtcagttttatcagcactattttaccgcgacagcgaagttgtgctggttgcgttggttaagcgtcccacaacgattaaccatgcttgaaggactgatgcagtgggatgaccgcaattctgaaagttgacttgcctgcatcatgtgtgactgagtattggtgtaaaatcacccgccagcagattatacctgctggttttttttattctcgccgcgctaaaaagggaacgtatgatctggataatgacgatggctcgccgtatgaacggtgtttacgcggcatttatgctggtcgcttttatgatgggggtggccggggcgctacaggctcctacattgagcttatttctgagtcgtgaggttggcgcgcaacctttctggatcggactcttttatacggtgaatgctattgctgggatcggcgtaagcctctggttggcaaaacgttctgacagtcagggcgatcggcgaaaactgattatattttgctgtttgatggctatcggcaatgcgctattgtttgcatttaatcgtcattatctgacgcttatcacctgtggtgtgcttctggcatctctggccaatacggcaatgccacagttatttgctctggcgcgggaatatgcggataactcggcgcgagaagtggtgatgtttagctcggtgatgcgtgcgcagctttctctggcatgggttatcggtccaccgttggcctttatgctggcgttgaattacggctttacggtgatgttttcgattgccgccgggatattcacactcagtctggtattgattgcatttatgcttccgtctgtggcgcgggtagaactgccgtcggaaaatgctttatcaatgcaaggtggctggcaggatagtaacgtacggatgttatttgtcgcctcgacgttaatgtggacctgcaacaccatgtacattattgatatgccgttgtggatcagtagcgagttaggattgccagacaaactggcgggtttcctgatggggacggcagctggactggaaataccagcaatgattctggctggctactatgtcaaacgttatggtaagcggcgaatgatggtcatagcagtggcggcaggagtactgttttacaccggattgattttctttcatagccgtatggcgttgatgacgctgcaactttttaacgctgtatttatcggcattgttgcgggtattgggatgctatggtttcaggatttaatgcctggaagagcgggggcagctaccaccttatttactaacagtatttctaccggggtaattctggctggcgttattcagggagcaattgcacaaagttgggggcactttgctgtctactgggtaattgcggttatttctgttgtcgcattatttttaaccgcaaaggttaaagacgtttgatgacgtggacgatagcggaaagcccggtcatttgaccgggcaaggggattaattcataaacgcaggttgttttgcttcataagcggcaatggcgtcgtcgtgctgcaaggtaagcccaatactgtccagaccgttcatcatgcagtggcggcggaaggcatcgatggtaaagcgataggttttctctcccgctttcacctcttgcgcttccagatccacgtcgaaatggatccccggattggctttcaccagcgcaaacagttcgtccacttctgcatcgcttaatttcaccggcagcagctggttgttaaagctattgccgtagaagatgtcagcaaaactcggcgcaatcaccactttaaaaccgtagtcggtcaatgcccagggcgcgtgctcacgcgaggagccacagccgaagttttctcgtgccagcaaaatggaagcgccctgatactgcgggaagttcagcacgaagtccgggtttggctgttggcctttttcatcgagaaaacgccagtcgttaaacagatgcgcgccaaaacccgtacgggtcactttctgcaaaaactgtttcgggatgattgcatcggtatcgacattggcggcatccagcggaaccaccaggcctgtgtgtttgataaatttctctgccatggtgtgctccttatttaatgttgcgaatgtcggcgaaatgtccggtcacagcagcagcggcagccattgccgggctgaccagatgcgtgcgcccgccgcgcccctggcggccttcaaagttacggttgctggtggatgcacaacgttcgcccggattcagacggtcgttgttcatcgccagacacattgagcagccaggcaagcgccattcaaaaccggcttcaataaagattttatccagaccttccgcttccgcctgggcttttaccgggccagagccgggaaccaccagtgcctgcacgcctggcgcgacttttcgccctttggcgatctccgctgccgcgcgtaaatcttcaatgcgcgagttggtacaggaaccgataaacactttgtcgatagccacttcggtcagcggaatgcccggtttcagccccatataggccagcgctttttctgccgacgcgcgttcaaccggatcggcaaacgaagccggatcgggaatattgtcgttcacggaaatcacctggcctggattggtgccccaggtgacctgcggtgaaatttcttctgcttgcagagtgacaacggtatcgaaagttgcgccttcgtcggtttgcagggttttccagtaggcaacggcgtcgtcgaaatctttgcctttcggcgcatgcaaacggcctttgacatagttaaaggtggtttcgtccggtgcaaccagaccggcttttgcgcccatttcgattgccatattgcacagggtcatacgaccttccatgcttaaatcacgaattgcttcgccgcaaaactccaccacatgcccggtgccgcctgcgctgccagttttaccgataattgccagcacgatatcttttgctgtaatgcccggcgcggctttgccctggacttcaattttcatggtcttcgcacggccctgtttcagggtttgtgttgccagtacgtgttcaacttcggaagtgccgataccaaaggccagtgcgccaaacgcgccgtgggtggcggtatgcgagtcgccgcagacaatggtcatccccggcaaggtgacgccctgttccggccccattacgtggacgatcccctgatacgggtgattcaggtcatacagctcgacgccaaattctttgcagtttttaatcagctcctgcatctggatgcgcgccatttcaccacaggcattaatgtctttggtctgggtagagacgttgtgatccatagtggcgaaggttttgcccggctgacgtaccgggcgaccgtgggcgcgcagaccatcaaacgcctgcggtgaggtcacttcatgcaccaggtggcggtcgatatataacagcggggtttcgttttcggcttcgtacactacgtgagcgtcgaataatttttcgtataacgttttagccatgattacaccccttctgccacatagcgggcaatgatatcgcccatttcatcggtactaacggcggcagcgccacgggctaaatccccggtgcgaatgccttcttctaatgcgcggttaatggcgcgttcaatggcgcaagccgcatcatcggcatccaggctgtagcgcagcagcagtgccagcgacagaatttgcgcaatcgggttggcgatgtttttgcctgcgatatctggtgctgagccgcctgccggttcatacagaccaaaaccttgctcgttcaggctggcggaaggcaacatccccatcgagccagtgatcattgcgcactcgtcagacagaatgtcgccaaacaggttggagcacagcagaacgtcaaactgtgatggatctttaatcagctgcatggtggcgttgtcgatgtacatatgcgccagttcgacatccgggtattccgtggcgatctcgttgacgatttcacgccataaaatagaggattgcagcacgttagctttgtcgattgaggtgactttgtggcgacgtttacgagcagattcaaacgcgatgcgggcaatacgctcgatctcaaaacggtgatacacctcggtatcaaacgctttttcatattgtccgctaccttcgcggccttttggctgaccgaaatagatgccgccggtcagttcgcgcacgcacaggatgtcgaagccgttagcggcaatgtctgcacgcagcggacagaatgcttccagcccctgatacagttttgccgggcgcaggttgctgaataatttgaagtgcttacgcaaaggcaacagcgcgccgcgttctggttgctggtctggtggtaaatgttcccatttcggaccgcctaccgagccaaacagcacggcatcggcttgctcacaaccttcaaccgtcgcaggcggcagtggttgcccgtggttatcaatggctgcgccgcctacatcgtaatggctggtggtgatgcgcatcgcaaagcggttgcgcacggcatccagcactttcagcgcctgggtcatcacttccggaccaataccgtcccccggcaatacggcaatatggtaattcttcgacatcacacggtttccttgttgttttcgttgtgttgagctttgcgttgcaactctttttcgacttctgcggcacgccagatattgttcagtacgtgcaccatggctttggcggaggactcgacaatatcggtggccaggccgacgccgtggaagcggcgaccgttgtagttggcgacaatatccacctgacccagcgcatctttaccgtgacctttggcggtcaggctgtatttcaccagttcgacgttatagtcagtgatgcggttaattgcctgatagacggcatcgaccggaccgttaccgttggcggcttctgctttgacttcttcgccacaggccagtttgacggcggcggtggcgatatcgttagagccagactgcacgctgaagtaatccagacggaaatgctccggctcttcttgctgcttaccgatgaaggccagcgcctccagatcgtaatcaaacacctgaccttttttgtccgccagcttcaggaaagcatcgtacaaattgtctaaattatattcactttctttataccccatctcatccatgcgatgtttcaccgccgcacgccccgaacgagaggtcagattcagctggatttggttcagaccaatagattctggtgtcatgatttcgtagttttcgcggtttttcagcacgccatcctggtggataccggaggagtgagcgaatgcgccgctgccaacaatggctttgtttgccgggatcggcatattacaaatctggctaactaactggctggtgcgccatatctcctggtgattaatggcggtgtggacgttgagaatatccttacgaactttaatcgccatgatgacttcttccagcgaacagttaccggcacgctcgccgatcccgttcattgcaccttccacctggcgtgcaccggcatgtaccgccgccagtgagttgccgaccgccaggcctaaatcgtcgtgggtatgtacggaaataatggctttgtcgatgttaggtacgcgttcatacaggccgctgatgattccggcgaactcaaacggcatggtgtagcccacggtgtccggaatgttgatggtggtggcaccggcattaatcgccgcttcgaccactcgcgccagatcggcaatgggtgtacgcccggcatcttcgcaagaaaattcaacatcatcggtgtaattacgggcgcgtttcaccatatagatagcgcgttcgatcacttcatccagcgtgctgcgcagcttggtggcgatgtgcattggcgaagtggcaataaaggtatgaatacggaaggcttcggcgactttcagggattcggccgccacgtcgatatctttctccacgcagcgagctaacgcacatacgcggctgtttttaacctggcgggcgatggtttgcaccgattcaaaatcgcccggcgaagagacggggaaaccgacttccatcacgtcaacacccatacgctcaagggccagcgcaatttgcagtttttctttcacactcaagcttgcctgtaacgcctgttcaccgtcgcgcaatgtggtatcgaaaataatgacttgctggctcatggtttgggtccttgtctcttttagagcgcctcgcttcgggcataaaaaaacccgcgcaatggcgcgggttttttgtttgactgcgtgctggcttaatgctggatgccgctcactcgtctaccgcgcaaagaagatgcgtttagtagtagtagaccgataaagcgaacgatgtgagtcattaaatcagctccagatgaatgcgatatgcttttagagttactggatacaaaaacggatgtcaaccctgacgcaataaaaacgtcccgccagcgtgagttctgcatccgtaaaattagctaattgtgctgcggtggttaaagtaagcgatattaatttctgcttaactaccgacgcttttcatcggttgacatatttcagcataaatttttgcatctaatcaacgaggaaaaaggggacaaaatgcacgcgttgcaaaacctatcctgatgatttgtattgaattatatgttttgcgattttttttgatattgatttggtgaatattattgatcaattaatgttaagaattaatgcattaaatatataaattaattattaaataagcacatttaatccattttgtagatgattgagtattcgcggtagttatgattagattgttttcgcaacaaaaacattatggattattatgctgtggtaaatgactcattccacggcaatggattctgtttttatcagaacccgtatctttatgttttccgaattttactcattttgctttttcttattttatatgcatgataaatcatattcttcaggattatttctctgcattccaataagggaaagggagttaagtgtgacagtggagttaagtatgccagaggtacaaacagatcattcagagacggcggagttaagcaagccacagctacgcatggtcgatctcaacttattaaccgttttcgatgccgtgatgcaggagcaaaacattacccgtgccgctcatgttctgggtatgtcgcaacctgcggtcagtaacgctgttgcacgcctgaaggtgatgtttaatgacgagctttttgttcgttatggccgtggtattcaaccgactgctcgcgcatttcaactttttggctcagttcgtcaggcattgcaactagtacaaaatgaattgcctggttcaggttttgaacccgcgagcagtgaacgtgtatttcatctttgtgtttgcagcccgttagacagcattctgacctcgcagatttataatcacattgagcagattgcgccaaatatacatgttatgttcaagtcttcattaaatcagaacactgaacatcagctgcgttatcaggaaacggagtttgtgattagttatgaagacttccatcgtcctgaatttaccagcgtgccattatttaaagatgaaatggtgttggtagccagcaaaaatcatccaacaattaagggcccgttactgaaacatgatgtttataacgaacaacatgcggcggtttcgctcgatcgtttcgcgtcatttagtcaaccttggtatgacacggtagataagcaagccagtatcgcgtatcagggcatggcaatgatgagcgtacttagcgtggtgtcgcaaacgcatttggtcgctattgcgccgcgttggctggctgaagagttcgctgaatccttagaattacaggtattaccgctgccgttaaaacaaaacagcagaacctgttatctctcctggcatgaagctgccgggcgcgataaaggccatcagtggatggaagaacaattagtctcaatttgcaaacgctaactgaatgcagaataggccagacatgaatgtctggtttattctgcattttttattgaatgtagaattttattctgaatgtgtgtgctctctattttaggattaattaaaaaaatagagaaattgctgtaagttgtgggattcagccgatttattgtcaatttaatccttcgtaatggaggattttatcgtttcttttcacctttcctcctgtttattcttattaccctgcgtttatgtctctggctgccaattgcttaagcaagatcggacggttaatgtgttttacacattttttccgtcaaacagtgaggcaggccatggagatgttgtctggagccgagatggtcgtccgatcgcttatcgatcagggcgttaaacaagtattcggttatcccggaggcgcagtccttgatatttacgatgcattgcataccgtgggtggtattgatcatgtattagttcgtcatgagcaggcggcggtgcatatggccgatggcctggcgcgtgcgaccggggaagtcggcgtcgtgctggtaacgtcgggtccaggggcgaccaatgcgattaccggcatcgccaccgcttatatggattccattccattagttgtcctttccgggcaggtagcgacctcgttgataggttacgatgcctttcaggagtgcgacatggtggggatttcgcgaccggtggttaaacacagttttctggttaagcaaacggaagacattccgcaggtgctgaaaaaggctttctggctggcggcaagtggtcgtcctggaccagtagtcgttgatttaccgaaagatattcttaatccggcgaacaaattaccctatgtctggccggagtcggttagtatgcgttcttacaatcccactactaccggacataaagggcaaattaagcgtgctctgcaaacgctggtggcggcaaaaaaaccggttgtctacgtaggcggtggggcaatcacggcgggctgccatcagcagttgaaagaaacggtggaggcgttgaatctgcccgttgtttcctcattgatgggcctgggggcatttccggcaacgcatcgtcaggcgctgggcatgctgggaatgcacggcacctacgaagccaatatgacgatgcataacgcggatgtgattttcgccgtcggggtaagatttgatgaccgaacgacgaataatctggcaaagtactgcccaaatgccactgttctgcatatcgatattgatcctacttccatttctaaaaccgtgactgctgatatcccgattgtgggggatgctcgccaggtcctcgaacaaatgcttgaactcctgtcgcaagaatccgcccatcaaccgctggatgagatccgcgactggtggcagcagattgaacagtggcgcgctcgtcagtgcctgaaatatgacactcacagtgaaaagattaaaccgcaggcggtgatcgagactctttggcggttgacgaagggagacgcttacgtgacgtccgatgtcgggcagcaccagatgtttgctgcactttattatccattcgacaaaccgcgtcgctggatcaattccggtggcctcggcacgatgggttttggtttacctgcggcactgggcgtcaaaatggcgttgccagaagaaaccgtggtttgcgtcactggcgacggcagtattcagatgaacatccaggaactgtctaccgcgttgcaatacgagttgccggtactggtggtgaatctcaataaccgctatctggggatggtgaaacagtggcaggacatgatctattccggccgtcattcacaatcttatatgcaatcactacccgatttcgtccgtctggcggaagcctatggtcacgtcgggatccagatctctcatccgcatgagctggaaagcaaacttagcgaggcgctggaacaggtgcgcaataatcgcctggtgtttgttgatgttaccgtcgatggcagtgagcacgtctacccgatgcagattcgcgggggcggaatggatgaaatgtggttaagcaaaacggagagaacctgattatgcgccggatattatcagtcttactcgaaaatgaatcaggcgcgttatcccgcgtgattggccttttttcccagcgtggctacaacattgaaagcctgaccgttgcgccaaccgacgatccgacattatcgcgtatgaccatccagaccgtgggcgatgaaaaagtgcttgagcagatcgaaaagcaattacacaagctggtcgatgtcttgcgcgtgagtgagttggggcagggcgcgcatgttgagcgggaaatcatgctggtgaaaattcaggccagcggttacgggcgtgacgaagtgaaacgtaatacggaaatattccgtgggcaaattatcgatgtcaccccctcgctttataccgttcaattagcaggcaccagcgataagcttgatgcatttttagcatcgattcgcgatgtggcgaaaattgtggaagttgctcgctctggtgtggtcggactttcgcgcggcgataaaataatgcgttgagaatgatctcagtgcgcaatttgcagcccaacatgtcacgttgggctttttttgcgaaatcagtgggaacctggaataaaagcagttgccgcagttaattttctgcgcttagatgttaatgaatttaacccataccagtacaatggctatggtttttacattttacgcaaggggcaattgtgaaactggatgaaatcgctcggctggcgggagtgtcgcggaccactgcaagctatgttattaacggcaaagcgaagcaataccgtgtgagcgacaaaaccgttgaaaaagtcatggctgtggtgcgtgagcacaattaccacccgaacgccgtggcagctgggcttcgtgctggacgcacacgttctattggtcttgtgatccccgatctggagaacaccagctatacccgcatcgctaactatcttgaacgccaggcgcggcaacggggttatcaactgctaattgcctgctcagaagatcagccagacaacgaaatgcgctgtattgagcaccttttacagcgtcaggtcgatgccattattgtttcgacgtcgttgcctcctgagcatcctttttatcaacgctgggctaacgacccgttcccgattgtcgcgctggaccgcgccctcgatcgtgaacacttcaccagcgtggttggtgccgatcaggatgatgccgaaatgctggcggaagagttacgtaagtttcccgccgagacggtgctttatcttggcgcgctgccggagctttctgtcagcttcctgcgtgaacaaggtttccgtactgcctggaaagatgatccgcgcgaagtgcatttcctgtatgccaacagctatgagcgggaggcggctgcccagttattcgaaaaatggctggaaacgcatccgatgccgcaggcgctgttcacaacgtcgtttgcgttgttgcaaggggtgatggatgtaacgctacgtcgcgatggtaaactgccttctgacctggcaattgccacctttggcgataacgaactgctcgacttcttacagtgcccggtgctggcagtggctcaacgtcaccgcgatgtcgcagagcgtgtgctggagattgtcctggcaagcctggacgaaccgcgtaagccaaaacctggtttaacgcgcattaaacgtaatctctatcgtcgcggtgtgctcagccgtagctaagccgcgaacaaaaatacgcgccaggtgaatttccctctggcgcgtagagtacgggaatggacatcaatatccttaaagtaaataagactattcctgactattattgataagttcttttaaacccgcccgttaattaaatcaccagctgaaattcacaataattaagtgatatcgacagcgcgtttttgcattattttgttacatgcagagatgaattgccgatttaacaagcacttttctttgcttttgcgcaaacccgctggcatcaagcgccacacagacgcaacagggactgttaaccggggaagatatgtcctaaaatgccgctcgcgtcgcaaactgacactttatatttgctgtggaaaatagtgagtcattttaaaacggtgatgacgatgagggattttttcttacagctattcataacgttaatttgctgcgcacgttggacgtaaaataaacaacgctgatattagccgtaaacatcgggttttttacctcggtatgccttgtgactggcttgacaagcttttcctccgctccgtaaactcctttcagtgggaaattgtggggcaaagtgggaataaggggtgaggctggcatgttccggggagcaacgttagtcaatctcgacagcaaagggcgcttatcagtgcctacccgttaccgggaacagctgcttgagaacgctgccggtcaaatggtttgcaccattgacattcatcacccgtgcctgctgctttaccccctgcctgaatgggaaattatcgagcaaaaattatcgcgtctgtcgagcatgaacccggttgagcgccgtgtgcagcgcctactgttaggtcatgccagcgaatgtcagatggatggcgcaggtcgattgttaatcgcgccagtactgcggcaacatgccgggctgacaaaagaagtgatgctggttggacagttcaacaagtttgagctgtgggatgaaacaacctggcatcaacaggtcaaggaagatatcgacgcagagcagttggctaccggagacttatcggagcgactgcaggacttgtctctataaaatgatggaaaactataaacatactacggtgctgctggatgaagccgttaatggcctcaatatccgtcctgatggcatctacattgatgggacttttggtcgcggtggtcactcacgtctgatcctctcgcagcttggcgaagaggggcgtttgctggcgatcgatcgcgacccgcaggctatcgccgttgcgaagactattgatgatccgcgcttctccatcatccacggacctttctccgcgctgggcgaatacgttgccgagcgcgatcttatcggcaagatcgacggcattctcctcgatcttggcgtctcttcaccgcaacttgatgatgctgagcgcggcttttcctttatgcgcgatggtccgctggacatgcgtatggacccaacccgtgggcagtcagccgctgaatggctacaaaccgcagaagaagccgatatcgcctgggtattgaaaacctatggtgaagagcgttttgccaaacgcattgcccgcgccattgtcgagcgtaaccgcgaacagccgatgacccgcaccaaagaactggcggaagtcgtggctgctgcaacgccggtgaaagataagtttaaacatcccgcgacccgtaccttccaggcggtgcgcatttgggtaaacagtgaactggaggagatagagcaggcgctaaaaagctcgctcaacgtgctggccccgggtgggcggctttcgatcatcagcttccactcgctggaagaccgtattgtgaaacgttttatgcgtgaaaacagccgcggtccgcaagttccggcagggttaccgatgactgaagagcagctcaaaaaactgggtggccgtcagctgcgagcactaggcaagttaatgccgggcgaagaagaggtggctgagaaccctcgtgcccgtagttcagttctgcgtattgcagagaggacgaatgcatgatcagcagagtgacagaagctctaagcaaagttaaaggatcgatgggaagccacgagcgccatgcattgcctggtgttatcggtgacgatcttttgcgatttgggaagctgccactctgcctgttcatttgcattattttgacggcggtgactgtggtaaccacggcgcaccatacccgtttactgaccgctcagcgcgaacaactggtgctggagcgagatgctttagacattgaatggcgcaacctgatccttgaagagaatgcgctcggcgaccatagccgggtggaaaggatcgccacggaaaagctgcaaatgcagcatgttgatccgtcacaagaaaatatcgtagtgcaaaaataaggataaacgcgacgcatgaaagcagcggcgaaaacgcagaaaccaaaacgtcaggaagaacatgccaactttatcagttggcgttttgcgttgttatgcggctgtattctcctggcgctggcttttctgctcggacgcgtagcgtggttacaagttatctccccggatatgctggtgaaagagggcgacatgcgttctcttcgcgttcagcaagtttccacctcccgcggcatgattactgaccgttctggtcgcccgttagcggtgagcgtgccggtaaaagcgatttgggctgacccgaaagaagtgcatgacgctggcggtatcagcgtcggtgaccgctggaaggcgctggctaacgcgctcaatattccgctggatcagctttcagcccgcattaacgccaacccgaaagggcgctttatttatctggcgcgtcaggtgaaccctgacatggcggactacatcaaaaaactgaaactgccggggattcatctgcgtgaagagtctcgccgttactatccgtccggcgaagtgactgctcacctcatcggctttactaacgtcgatagtcaagggattgagggcgttgagaagagtttcgataaatggcttaccgggcagccgggtgagcgcattgtgcgtaaagaccgctatggtcgcgtaattgaagatatttcttctactgacagccaggcggcgcacaacctggcgttgagtattgatgaacgcttgcaggcgctggtttatcgcgaactgaacaacgcggtggcctttaacaaggctgaatccggtagcgccgtgctggtggatgtcaacaccggtgaagtgctggcgatggctaacagcccgtcatacaaccctaacaatctgagcggcacgccgaaagaggcgatgcgtaaccgtaccatcaccgacgtgtttgaaccgggctcaacggttaaaccgatggtggtaatgaccgcgttgcaacgtggcgtggtgcgggaaaactcggtactcaataccattccttatcgaattaacggccacgaaatcaaagacgtggcacgctacagcgaattaaccctgaccggggtattacagaagtcgagtaacgtcggtgtttccaagctggcgttagcgatgccgtcctcagcgttagtagatacttactcacgttttggactgggaaaagcgaccaatttggggttggtcggagaacgcagtggcttatatcctcaaaaacaacggtggtctgacatagagagggccaccttctctttcggctacgggctaatggtaacaccgttacagttagcgcgagtctacgcaactatcggcagctacggcatttatcgcccactgtcgattaccaaagttgaccccccggttcccggtgaacgtgtcttcccggaatccattgttcgcaccgtggtgcatatgatggaaagcgtggcgctaccaggcggcggcggcgtgaaagcggcgattaaaggctatcgtatcgccattaaaaccggtaccgcgaaaaaggtcgggccggacggtcgctacatcaataaatatattgcttataccgcaggcgttgcgcctgcgagtcagccgcgcttcgcgctggttgttgttatcaacgatccgcaggcgggtaaatactacggcggcgccgtttccgcgccggtctttggtgccatcatgggcggcgtattgcgtaccatgaacatcgagccggatgcgctgacaacgggcgataaaaatgaatttgtgattaatcaaggcgaggggacaggtggcagatcgtaatttgcgcgaccttcttgctccgtgggtgccagacgcaccttcgcgagcactgcgagagatgacactcgacagccgtgtggctgcggcgggcgatctctttgtagctgtagtaggtcatcaggcggacgggcgtcgatatatcccgcaggcgatagcgcaaggtgtggctgccattattgcagaggcgaaagatgaggcgaccgatggtgaaatccgtgaaatgcacggcgtaccggtcatctatctcagccagctcaacgagcgtttatctgcactggcgggccgcttttaccatgaaccctctgacaatttacgtctcgtaggcgtaacgggcaccaacggcaaaaccacgactacccagctgctggcgcagtggagccaactgcttggcgaaaccagcgcggtaatgggcaccgttggtaacggtctgctggggaaagtgatcccgacagaaaataccaccggttcggcagtcgatgttcagcatgagctggcggggctggtggatcagggcgcgacgttttgcgcaatggaagtttcctcccacgggctggtacagcaccgtgtggcggcattgaaatttgcggcgtcggtctttaccaacttaagccgcgatcaccttgattatcatggtgatatggaacactacgaagccgcgaaatggctgctttattctgaacatcattgtggtcaggcgattgttaacgccgacgatgaagtgggccgccgctggctggcaaaactgccggacgcggttgcggtatcaatggaagatcatatcaatccgaactgtcacggacgctggttgaaagcgaccgaagtgaactatcacgacagcggcgcgaccattcgctttagttcaagttggggcgatggcgaaattgaaagccatctgatgggcgcttttaacgtcagcaacctgctgctcgcgctggcgacactgctggcacttggctacccgctggctgatctgttaaaaaccgccgcgcgtctgcaaccggtttgcggacgtatggaagtgttcactgcgccaggcaaaccgacggtggtggtggattacgcgcatacgccggatgcactggaaaaagccttacaggcggcgcgcctgcactgtgcgggcaagctgtggtgcgtctttggctgtggtggcgatcgcgataaaggtaagcgtccactgatgggcgcaattgccgaagagtttgctgacgtggcggtggtgacggacgataacccgcgtaccgaagaaccgcgtgccatcatcaacgatattctggcgggaatgttagatgccggacatgccaaagtgatggaaggccgtgctgaagcggtgacttgcgccgttatgcaggctaaagagaatgatgtggtactggtcgcgggcaaaggccatgaggattaccagattgttggcaatcagcgtctggactactccgatcgcgtcacggtggcgcgtctgctgggggtgattgcatgattagcgtaacccttagccaacttaccgatattctcaacggtgaactgcaaggtgcagatatcacccttgatgctgtaaccactgatacccgaaaactgacgccgggctgcctgtttgttgccctgaaaggcgaacgttttgatgcccacgattttgccgaccaggcgaaagctggcggcgcaggcgcactactggttagccgtccgctggacatcgacctgccgcagttaatcgtcaaggatacgcgtctggcgtttggtgaactggctgcatgggttcgccagcaagttccggcgcgcgtggttgctctgacggggtcctccggcaaaacctccgttaaagagatgacggcggcgattttaagccagtgcggcaacacgctttatacggcaggcaatctcaacaacgacatcggtgtaccgatgacgctgttgcgcttaacgccggaatacgattacgcagttattgaacttggcgcgaaccatcagggcgaaatagcctggactgtgagtctgactcgcccggaagctgcgctggtcaacaacctggcagcggcgcatctggaaggttttggctcgcttgcgggtgtcgcgaaagcgaaaggtgaaatctttagcggcctgccggaaaacggtatcgccattatgaacgccgacaacaacgactggctgaactggcagagcgtaattggctcacgcaaagtgtggcgtttctcacccaatgccgccaacagcgatttcaccgccaccaatatccatgtgacctcgcacggtacggaatttaccctacaaaccccaaccggtagcgtcgatgttctgctgccgttgccggggcgtcacaatattgcgaatgcgctggcagccgctgcgctctccatgtccgtgggcgcaacgcttgatgctatcaaagcggggctggcaaatctgaaagctgttccaggccgtctgttccccatccaactggcagaaaaccagttgctgctcgacgactcctacaacgccaatgtcggttcaatgaccgccgctgttcaggtactggctgaaatgccgggctaccgcgtgctggtggtgggcgatatggcggaactgggcgctgaaagcgaagcctgccatgtacaggtgggcgaggcggcaaaagctgctggtattgaccgcgtgttaagcgtgggtaaacaaagccatgctatcagcaccgccagcggcgttggcgaacattttgctgataaaactgcgttaattacgcgtcttaaatcactgattgctgagcaacaggtaattacgattttagttaagggttcacgtagtgccgccatggaagaggtagtacgcgctttacaggagaatgggacatgttagtttggctggccgaacatttggtcaaatattattccggctttaacgtcttttcctatctgacgtttcgcgccatcgtcagcctgctgaccgcgctgttcatctcattgtggatgggcccgcgtatgattgctcatttgcaaaaactttcctttggtcaggtggtgcgtaacgacggtcctgaatcacacttcagcaagcgcggtacgccgaccatgggcgggattatgatcctgacggcgattgtgatctccgtactgctgtgggcttacccgtccaatccgtacgtctggtgcgtgttggtggtgctggtaggttacggtgttattggctttgttgatgattatcgcaaagtggtgcgtaaagacaccaaagggttgatcgctcgttggaagtatttctggatgtcggtcattgcgctggggatcgccttcgccctgtaccttgccggcaaagacacgcccgcaacgcagctggtggtcccattctttaaagatgtgatgccgcagctggggctgttctacattctgctggcttacttcgtcattgtgggtactggcaacgcggtaaacctgaccgatggtctcgacggcctggcaattatgccgaccgtatttgtcgccggtggttttgcgctggtggcgtgggcgaccggcaacatgaactttgccagctatttacacataccgtatctgcgacacgccggggaactggtcattgtctgcacggcgatagtcggggcaggactgggcttcctgtggtttaacacctatccggcgcaggtctttatgggcgatgtaggttcgctggcgttaggtggtgcgttaggcattatcgccgtactgctacgtcaggaattcctgctggtgattatggggggcgtgttcgtggtagaaacgctttctgtcatcctgcaggtcggctcctttaaactgcgcggacaacgtattttccgcatggcaccgattcatcaccactatgaactgaaaggctggccggaaccgcgcgtcattgtgcgtttctggattatttcgctgatgctggttctgattggtctggcaacgctgaaggtacgttaatcatggctgattatcagggtaaaaatgtcgtcattatcggcctgggcctcaccgggctttcctgcgtggactttttcctcgctcgcggtgtgacgccgcgcgttatggatacgcgtatgacaccgcctggcctggataaattacccgaagccgtagaacgccacacgggcagtctgaatgatgaatggctgatggcggcagatctgattgtcgccagtcccggtattgcactggcgcatccatccttaagcgctgccgctgatgccggaatcgaaatcgttggcgatatcgagctgttctgtcgcgaagcacaagcaccgattgtggcgattaccggttctaacggcaaaagcacggtcaccacgctagtgggtgaaatggcgaaagcggcgggggttaacgttggtgtgggtggcaatattggcctgccagcgttgatgctgcttgatgctgagtgcgaactgtacgtgctggaactgtcgagcttccagctggaaaccacttccagcttacaggcggtggcggcgaccattctgaacgtgactgaagatcatatggaccgctatccgtttggtttgcagcaataccgtgcggcaaaattgcgtatttacgaaaatgcgaaagtttgtgtcgtcaatgctgatgatgccttaacaatgccgattcgcggtgctgatgaacgctgcgtcagctttggcgtcaacatgggtgactatcacctgaatcatcagcagggagaaacctggctgcgagtgaaaggcgagaaagtgctgaacgtgaaagagatgaaactttccgggcagcataactacaccaatgcgctggcagcactggcactggcagacgcagctggtttgccgcgcgccagcagcctgaaagcgttaaccaccttcgccggtctgccgcatcgctttgaagtggtgctggagcacaatggcgtacgctggattaacgattcgaaagccactaacgtcggcagtacggaagcggcgttgaatggcttgcaggtagacggcacgctgcatttgttgctgggcggcgatggtaaatcggcggacttcagtccactggcgcgctatctgaatggcgacaacgtgcgtttgtactgttttggtcgtgacggtgcgcagctggcggcgctacgcccggaagtggcagaacaaaccgaaactatggaacaggcgatgcgcttgctggctccgcgtgttcagccgggcgatatggttctgctctccccggcctgtgccagccttgatcagttcaagaactttgaacaacgaggcaatgagtttgcccgtctggcgaaggagttaggttgatgcgtttatctctccctcgcctgaaaatgccgcgcctgccaggattcagtatcctggtctggatctccacggcgctaaaaggctgggtgatgggctcgcgggaaaaagataccgacagcctgatcatgtacgatcgcaccttactgtggctgaccttcggccttgcggcgattggctttatcatggtgacctcggcgtcaatgcccatagggcaacgcttaaccaacgatccgttcttcttcgcgaagcgtgatggcgtctatctgatcctggcattcattctggcgatcattacgctgcgtctgccgatggagttctggcaacgctacagtgccacgatgctgctcggatctatcatcctgctgatgatcgtgctggtagtgggtagctcggttaaaggggcatcgcgttggatcgatctcggtttgctgcgtatccagcctgcggagctgacaaaactgtcgctgttttgttatatcgccaactatctggtgcgtaaaggcgacgaagtacgtaataacctgcgcggcttcctgaaaccgatgggcgtgattctggtgttggcagtgttactgctggcacagccagaccttggtacggtggtggtgttgtttgtgactacgctggcgatgttgttcctggcgggagcgaaattgtggcagttcattgccattatcggtatgggcatttcagcggttgtgttgctgatactcgccgaaccgtaccgtatccgccgtgttaccgcattctggaacccgtgggaagatccctttggcagcggctatcagttaacgcaatcgctgatggcgtttggtcgcggcgaactttggggacaaggtttaggtaactcggtacaaaaactggagtatctgccggaagcgcacactgactttattttcgccattatcggcgaagaactggggtatgtcggtgtggtgctggcacttttaatggtattcttcgtcgcttttcgcgcgatgtcgattggccgcaaagcgttagaaattgaccaccgtttttccggttttctcgcctgttctattggcatctggtttagcttccaggcgctggttaacgtaggcgcggcggcggggatgttaccgaccaaaggtctgacattgccgctgatcagttacggtggttcgagcttactgattatgtcgacagccatcatgatgctgttgcgtattgattatgaaacgcgtctggagaaagcgcaggcgtttgtacgaggttcacgatgagtggtcaaggaaagcgattaatggtgatggcaggcggaaccggtggacatgtattcccgggactggcggttgcgcaccatctaatggctcagggttggcaagttcgctggctggggactgccgaccgtatggaagcggacttagtgccaaaacatggcatcgaaattgatttcattcgtatctctggtctgcgtggaaaaggtataaaagcactgatagctgcgccgctgcgtatcttcaacgcctggcgtcaggcgcgggcgattatgaaagcgtacaaacctgacgtggtactcggtatgggcggctatgtatcaggtccaggtggtctggccgcgtggtcgttaggcattccggttgtacttcatgaacaaaacggtattgcgggcttaaccaataaatggctggcgaagattgccaccaaagtgatgcaggcgtttccaggcgctttccctaatgcggaagtggtgggtaacccggtgcgtaccgatgtgctggcgctgccgttgccgcagcaacgtttggctggacgtgaaggtccggttcgtgtgctggtagtgggtggttcccagggcgcacgcattcttaaccagacaatgccgcaggttgctgcgaaactgggtgattcagtcactatctggcatcagagcggtaaaggttcgcaacaatccgttgaacaggcgtatgccgaagcggggcaaccgcagcataaagtgacggaatttattgatgatatggcggcggcgtatgcgtgggcggatgtcgtcgtttgccgctccggtgctttaacggtgagtgaaatcgccgcggcaggactaccggcgttgtttgtgccgtttcaacataaagaccgccagcaatactggaatgcgctaccgctggaaaaagcgggcgcagccaaaattatcgagcagccacagcttagcgtggatgctgtcgccaacaccctggccgggtggtcgcgagaaaccttattaaccatggcagaacgcgcccgcgctgcatccattccggatgccaccgagcgagtggcaaatgaagtgagccgggctgcccgggcgtaattgtagcgatgccttttgcatcgtatgaatttaagaagttaatggcgtaaagaatgaatacacaacaattggcaaaactgcgttccatcgtgcccgaaatgcgtcgcgttcggcacatacattttgtcggcatcggtggtgccggtatgggcggtattgccgaagttctggccaatgaaggttatcagatcagtggttccgatttagcgccaaatccggtcacgcaacagttaatgaatcttggggcgacgatttatttcaaccatcgcccggaaaacgtacgtgatgccagcgtggtcgttgtttccagcgcgatttctgccgataacccggaaattgtcgcagctcatgaagcgcgtattccggtgatccgtcgtgccgaaatgctggctgagttaatgcgttttcgtcatggcatcgccattgcaggaacgcacggcaaaacgacaaccaccgcgatggtttccagcatctacgcagaagcgggactcgacccaaccttcgtgaacggtgggctggtaaaagcggcgggcgttcatgcgcgtttggggcatggtcggtacctgattgccgaagcagatgagagtgatgcatcgttcctgcatctgcaaccgatggtggcgattgtcaccaatatcgaagccgaccacatggatacctaccagggcgactttgagaatttaaaacagacctttattaattttctgcacaacctgccgttttacggtcgtgcggtgatgtgtgttgatgatccggttatccgcgaattgttaccgcgtgtgggacgtcagaccacgacttacggcttcagcgaagatgccgacgtgcgtgtagaagattatcagcagattggcccgcaggggcactttacgctgctgcgccaggacaaagagccgatgcgcgtcaccctgaatgcgccaggccgtcataacgcgctgaacgccgcagctgcggttgcggttgctacggaagagggcattgacgacgaggctattttgcgtgcgctggagagcttccaggggactggtcgccgttttgatttcctcggtgaattcccgctggagccagtgaatggtaaaagcggtacggcgatgctggtcgatgactacggccaccacccgacggaagtggacgccactattaaagcagcgcgtgcaggctggccggataaaaacctggtaatgctgtttcagccgcaccgttttacccgtacgcgcgacctgtatgatgatttcgccaatgtgctgacgcaggttgataccctgttgatgctggaagtgtatccggctggcgaagcgccaattccgggagcggacagccgttcgctgtgtcgcacaattcgtggacgtgggaaaattgatcccattctggtgccggatccggcgcgggtagccgagatgctggcaccggtattaaccggtaacgacctgattctcgttcagggggctggtaatattggaaaaattgcccgttctttagctgaaatcaaactgaagccgcaaactccggaggaagaacaacatgactgataaaatcgcggtcctgttgggtgggacctccgctgagcgggaagtttctctgaattctggcgcagcggtgttagccgggctgcgtgaaggcggtattgatgcgtatcctgtcgacccgaaagaagtcgacgtgacgcaactgaagtcgatgggttttcagaaagtgtttatcgcgctacacggtcgcggcggtgaagatggtacgctgcagggcatgctcgagctgatgggcttgccttataccggcagcggagtgatggcatctgcgctttcaatggataaactacgcagcaaactgctgtggcaaggtgccggtttaccggtcgcgccgtgggtagcgttaactcgcgcagagtttgaaaaaggcctgagcgataagcagttagcagaaatttctgctctgggtttgccggttatcgttaagccgagccgcgaaggttccagtgtgggaatgtcaaaagtagtagcagaaaatgctctacaagatgcattaagattggcatttcagcacgatgaagaagtattgattgaaaaatggctaagtgggccggagttcacggttgcgatactcggtgaagaaattttaccgtcaatacgtattcaaccgtccggaaccttctatgattatgaggcgaagtatctctctgatgagacacagtatttctgccccgcaggtctggaagcgtcacaagaggccaatttgcaggcattagtgctgaaagcatggacgacgttaggttgcaaaggatggggacgtattgacgttatgctggacagcgatggacagttttatctgctggaagccaatacctcaccgggtatgaccagccacagcctggtgccgatggcggcacgtcaggcaggtatgagcttctcgcagttggtagtacgaattctggaactggcggactaatatgtcgcaggctgctctgaacacgcgaaacagcgaagaagaggtttcttctcgccgcaataatggaacgcgtctggcggggatccttttcctgctgaccgttttaacgacagtgttggtgagcggctgggtcgtgttgggctggatggaagatgcgcaacgcctgccgctctcaaagctggtgttgaccggtgaacgccattacacgcgtaatgacgatatccggcagtcgatcctggcattgggtgagccgggtacctttatgacccaggatgtcaacatcatccagacgcaaatagaacaacgcctgccgtggattaagcaggtgagcgtcagaaagcagtggcctgatgaattgaagattcatctggttgaatatgtgccgattgcgcggtggaatgatcaacatatggtagacgcggaaggaaacaccttcagcgtgccgccagatcgcaccagcaagcaggtgcttccaatgctgtatggcccggaaggcagcgccaatgaagtgttgcagggctatcgcgaaatggggcagatgctggcaaaggacagatttactctgaaggaagcggcgatgaccgcgcggcgttcctggcagttgacgctgaataacgatattaagctcaatcttggccggggcgatacgatgaaacgtttggctcgctttgtagaactttatccggttttacagcagcaggcgcaaaccgatggcaaacggattagctacgttgatttgcgttatgactctggagcggcagtaggctgggcgcccttgccgccagaggaatctactcagcaacaaaatcaggcacaggcagaacaacaatgatcaaggcgacggacagaaaactggtagtaggactggagattggtaccgcgaaggttgccgctttagtaggggaagttctgcccgacggtatggtcaatatcattggcgtgggcagctgcccgtcacgtggtatggataaaggcggggtgaacgacctcgaatccgtggtcaagtgcgtacaacgcgccattgaccaggcagaattgatggcagattgtcagatctcttcggtatatctggcgctttctggtaagcacatcagctgccagaatgaaattggtatggtgcctatttctgaagaagaagtgacgcaagaagatgtggaaaacgtcgtccataccgcgaaatcggtgcgtgtgcgcgatgaacatcgtgtgctgcatgtgatcccgcaagagtatgcgattgactatcaggaagggatcaagaatccggtaggactttcgggcgtgcggatgcaggcaaaagtgcacctgatcacatgtcacaacgatatggcgaaaaacatcgtcaaagcggttgaacgttgtgggctgaaagttgaccaactgatatttgccggactggcatcaagttattcggtattgacggaagatgaacgtgaactgggtgtctgcgtcgtcgatatcggtggtggtacaatggatatcgccgtttataccggtggggcattgcgccacactaaggtaattccttatgctggcaatgtcgtgaccagtgatatcgcttacgcctttggcacgccgccaagcgacgccgaagcgattaaagttcgccacggttgtgcgctgggttccatcgttggaaaagatgagagcgtggaagtgccgagcgtaggtggtcgtccgccgcggagtctgcaacgtcagaccctggcagaggtgatcgagccgcgctataccgagctgctcaacctggtcaacgaagagatattgcagttgcaggaaaagcttcgccaacaaggggttaaacatcacctggcggcaggcattgtattaaccggtggcgcagcgcagatcgaaggtcttgcagcctgtgctcagcgcgtgtttcatacgcaagtgcgtatcggcgcgccgctgaacattaccggtttaacggattatgctcaggagccgtattattcgacggcggtgggattgcttcactatgggaaagagtcacatcttaacggtgaagctgaagtagaaaaacgtgttacagcatcagttggctcgtggatcaagcgactcaatagttggctgcgaaaagagttttaatttttatgaggccgacgatgattacggcctcaggcgacaggcacaaatcggagagaaactatgtttgaaccaatggaacttaccaatgacgcggtgattaaagtcatcggcgtcggcggcggcggcggtaatgctgttgaacacatggtgcgcgagcgcattgaaggtgttgaattcttcgcggtaaataccgatgcacaagcgctgcgtaaaacagcggttggacagacgattcaaatcggtagcggtatcaccaaaggactgggcgctggcgctaatccagaagttggccgcaatgcggctgatgaggatcgcgatgcattgcgtgcggcgctggaaggtgcagacatggtctttattgctgcgggtatgggtggtggtaccggtacaggtgcagcaccagtcgtcgctgaagtggcaaaagatttgggtatcctgaccgttgctgtcgtcactaagcctttcaactttgaaggcaagaagcgtatggcattcgcggagcaggggatcactgaactgtccaagcatgtggactctctgatcactatcccgaacgacaaactgctgaaagttctgggccgcggtatctccctgctggatgcgtttggcgcagcgaacgatgtactgaaaggcgctgtgcaaggtatcgctgaactgattactcgtccgggtttgatgaacgtggactttgcagacgtacgcaccgtaatgtctgagatgggctacgcaatgatgggttctggcgtggcgagcggtgaagaccgtgcggaagaagctgctgaaatggctatctcttctccgctgctggaagatatcgacctgtctggcgcgcgcggcgtgctggttaacatcacggcgggcttcgacctgcgtctggatgagttcgaaacggtaggtaacaccatccgtgcatttgcttccgacaacgcgactgtggttatcggtacttctcttgacccggatatgaatgacgagctgcgcgtaaccgttgttgcgacaggtatcggcatggacaaacgtcctgaaatcactctggtgaccaataagcaggttcagcagccagtgatggatcgctaccagcagcatgggatggctccgctgacccaggagcagaagccggttgctaaagtcgtgaatgacaatgcgccgcaaactgcgaaagagccggattatctggatatcccagcattcctgcgtaagcaagctgattaagaattgactggaatttgggtttcgaggctctttgtgctaaactggcccgccgaatgtatagtacacttcggttggataggtaatttggcgagataatacgatgatcaaacaaaggacacttaaacgtatcgttcaggcgacgggtgtcggtttacataccggcaagaaagtcaccctgacgttacgccctgcgccggccaacaccggggtcatctatcgtcgcaccgacttgaatccaccggtagatttcccggccgatgccaaatctgtgcgtgataccatgctctgtacgtgtctggtcaacgagcatgatgtacggatttcaaccgtagagcacctcaatgctgctctcgcgggcttgggcatcgataacattgttatcgaagttaacgcgccggaaatcccgatcatggacggcagcgccgctccgtttgtatacctgctgcttgacgccggtatcgacgagttgaactgcgccaaaaaatttgttcgcatcaaagagactgttcgtgtcgaagatggcgataagtgggctgaatttaagccgtacaatggtttttcgctggatttcaccatcgattttaaccatccggctattgattccagcaaccagcgctatgcgatgaacttctccgctgatgcgtttatgcgccagatcagccgtgcgcgtacgttcggtttcatgcgtgatatcgaatatctgcagtcccgtggtttgtgcctgggcggcagcttcgattgtgccatcgttgttgacgattatcgcgtactgaacgaagacggcctgcgttttgaagacgaatttgtgcgtcacaaaatgctcgatgcgatcggtgacttgttcatgtgtggtcacaatattattggtgcatttaccgcttataaatccggtcatgcactgaataacaaactgctgcaggctgtcctggcgaaacaggaagcctgggaatatgtgaccttccaggacgacgcagaactgccgttggccttcaaagcgccttcagctgtactggcataacgacatttatactgtcgtataaaattcgactggcaaatctggcactctctccggccaggtgaaccagtcgtttttttttaaattttataagagctataaaaaacggtgcgaacgctgttttcttaagcacttttccgcacaacttatcttcattcgtgctgtggactgcaggctttaatgataagatttgtgcgctaaatacgtttgaatacgatcgggatggcaataacgtgagtggaatactgacgcgctggcgacagtttggtaaacgctacttctggccgcatctcttattagggatggttgcggcgagtttaggtttgcctgcgctcagcaacgccgccgaaccaaacgcgcccgcaaaagcgacaacccgcaaccacgagccttcagccaaagttaactttggtcaattggccttgctggaagcgaacacacgccgcccgaattcgaactattccgttgattactggcatcaacatgccattcgcacggtaatccgtcatctttctttcgcaatggcaccgcaaacactgcccgttgctgaagaatctttgcctcttcaggcgcaacatcttgcattactggatacgctcagcgcgctgctgacccaggaaggcacgccgtctgaaaagggttatcgcattgattatgcgcattttaccccacaagcaaaattcagcacgcccgtctggataagccaggcgcaaggcatccgtgctggccctcaacgcctcacctaacaacaataaacctttacttcattttattaactccgcaacgcggggcgtttgagattttattatgctaatcaaattgttaactaaagttttcggtagtcgtaacgatcgcaccctgcgccggatgcgcaaagtggtcaacatcatcaatgccatggaaccggagatggaaaaactctccgacgaagaactgaaagggaaaaccgcagagtttcgtgcacgtctggaaaaaggcgaagtgctggaaaatctgatcccggaagctttcgccgtggtacgtgaggcaagtaagcgcgtctttggtatgcgtcacttcgacgttcagttactcggcggtatggttcttaacgaacgctgcatcgccgaaatgcgtaccggtgaaggtaaaaccctgaccgcaacgctgcctgcttacctgaacgcactaaccggtaaaggcgtgcacgtagttaccgtcaacgactacctggcgcaacgtgacgccgaaaacaaccgtccgctgtttgaattccttggcctgactgtcggtatcaacctgccgggcatgccagcaccggcaaagcgcgaagcttacgcagctgacatcacttacggtacgaacaacgaatacggctttgactacctgcgcgacaatatggcgttcagccctgaagaacgtgtacagcgtaaactgcactatgcgctggtggacgaagtggactccatcctgatcgatgaagcgcgtacaccgctgatcatttccggcccggcagaagacagctcggaaatgtataaacgcgtgaataaaattattccgcacctgatccgtcaggaaaaagaagactccgaaaccttccagggcgaaggccacttctcggtggacgaaaaatctcgccaggtgaacctgaccgaacgtggtctggtgctgattgaagaactgctggtgaaagagggcatcatggatgaaggggagtctctgtactctccggccaacatcatgctgatgcaccacgtaacggcggcgctgcgcgctcatgcgctgtttacccgcgacgtcgactacatcgttaaagatggtgaagttatcatcgttgacgaacacaccggtcgtaccatgcagggccgtcgctggtccgatggtctgcaccaggctgtggaagcgaaagaaggtgtgcagatccagaacgaaaaccaaacgctagcttcgatcaccttccagaactacttccgtctgtatgaaaaactggcggggatgaccggtactgctgataccgaagctttcgaatttagctccatctacaagctggataccgtcgttgttccgaccaaccgtccaatgattcgtaaagatctgccggacctggtctacatgactgaagcggaaaaaattcaggcgatcattgaagatatcaaagaacgtactgcgaaaggccagccggtgctggtgggtactatctccatcgaaaaatcggagctggtgtcaaacgaactgaccaaagccggtattaagcacaacgtcctgaacgccaaattccacgccaacgaagcggcgattgttgctcaggcaggttatccggctgcggtgactatcgcgaccaatatggcgggtcgtggtacagatattgtgctcggtggtagctggcaggcagaagttgccgcgctggaaaatccgaccgtagagcaaattgaaaaaattaaagccgactggcaggtacgtcacgatgcggtactggaagcaggtggcctgcatatcatcggtaccgagcgtcacgaatcccgtcgtatcgataaccagttgcgcggtcgttctggtcgtcagggggatgctggttcttcccgtttctacctgtcgatggaagatgcgctgatgcgtatttttgcttccgaccgagtatccggcatgatgcgtaaactgggtatgaagccaggcgaagccattgaacacccgtgggtgactaaagcgattgccaacgcccagcgtaaagttgaaagtcgtaacttcgacattcgtaagcaactgctggaatatgatgacgtggctaacgatcagcgtcgcgccatttactcccagcgtaacgaactgctggatgtcagcgatgtgagcgaaaccatcaacagcattcgtgaagatgtgttcaaagccaccattgatgcctacattccgccacagtcgctggaagaaatgtgggatattccggggctgcaggaacgtctgaagaacgatttcgacctcgatttaccaattgccgagtggctggataaagaaccagaactgcatgaagagacgctgcgtgagcgcattctggcgcagtccatcgaagtgtatcagcgtaaagaagaagtggttggtgctgagatgatgcgtcacttcgagaaaggcgtcatgctgcaaacgcttgactccctgtggaaagagcacctggcggcgatggactatctgcgtcagggtatccacctgcgtggctatgcacagaaagatccgaagcaggaatacaaacgtgaatcgttctccatgtttgcagcgatgctggagtcgttaaaatatgaagttatcagcacgctgagcaaagtccaggtacgtatgcctgaagaggttgaggagctggaacaacagcgtcgtatggaagccgagcgtttagcgcaaatgcagcagcttagccatcaggatgacgactctgcagccgcagctgcactggcggcgcaaaccggtgagcgcaaagtaggacgtaacgatccttgcccgtgcggttctggtaaaaaatacaagcagtgccatggtcgcctgcaataaaagctaacagttgaagtaaaaggcgcaggattctgcgccttttttataggtttaagacaatgaaaaagctgcaaattgcggtaggtattattcgcaacgagaacaatgaaatctttataacgcgtcgcgcagcagatgcgcacatggcgaataaactggagtttcccggcggtaaaattgaaatgggcgaaacgccggaacaggcggtggtgcgtgaacttcaggaagaagtcgggattaccccacaacatttttcgctatttgaaaaactggaatatgaattcccggacaggcatataactctgtggttctggctggtcgaaagctgggaaggggagccgtggggtaaagaagggcaacccggtgagtggatgtcgctagtcggtcttaatgccgatgattttccgccagccaatgaaccggtaattgcgaagcttaagcgtctgtaggtcggataaggcgttcacgccgcatccgacatttgcacaagatgcctgatgcgacgctgtccgcgtcttatcaggcctacgtgcggcatcagataaatgtcactgctttggctcttcgctccagtcatcgctttcggaaagatcgccactgctggggattcgtttttcttcagcagcccattctccgaggtcgatcagctgacaacgtttggagcaaaatggccgaaacgggctgatttcaccccacaccaccgttttcccgcaggttgggcaattcaccgtaatagtttctgacatttttactccttagcaacaggccagttcgaaatccagacgttccggtacctgtccgttttcagtgtccagcggcataaaacgaatggcaaaacggctcttatgtccggaaatttgcggataaagctgtgaatcgagcgacagattcaggcgcagcaagtcggcatcgccaccgttatcctgataaaaaccattcaggctggtttgtttacggaagggggccgactggcgaattaaatccagcaccatggtaagtgcctgggtgagcgggttcaggctggcaatccaggtttctacctggctgtcgcgctgcgcctggggtagatgcagccaaatgtgcaatgtaggtaaatcaaagctgcaacagccgcctgggatgctcagtcgctgacgcaccagagcaatcaaacgatcttcacgcagaaattgcccgatacgcggcgcggaaattaatacgctccccgccgcttttaactgctgaattaatgcttcaatacggctctggtccacgccaggcacgccaatccaggtctggagtttacgttgctgccggtcaagttctttcaacagctcagtgcggacttcgccgcgctcgaaaacatccagtaattcactgacattacggaagaaatgcagcgcgccagcgtggtcaacgatgggtaaattaacggtgagttgctgaatcaaaaactcaatgcgcagccatgtacgcattttttcatttagtggatgttcaaaaaggacctgggtctgcattacggtttttcctgtgagacaaactgcgacgcaagctgcaaatagtgtgcgtgcaggcgggcaacatccgatgcgatagcatccggtgcgccgttattatcaatgacgtcatctgccacggcaaggcgggcttcgcgcgttgcctgagcagcaaggatttgttcgacatgctcgcgagttacatcatcgcgctgcatggtgcgcttaagttgcgtttctgggctgacatccaccaccagcactcgattcgcttttttatacagtgagttttctaccagcaatggcacaacccacagtacatagggggaagtagcttgctggatctggtgttgcgtctcttgctgaatcagcggatgcagcagggcgttaagccagtttttctcttccgggttggcgaagatccgctcgcgcaaggcccggcgctgcaatgttccatcagcagcaatcatgttagcgccaaagtgatcagcaatggcatgtagcgcaggtgcacctggttcaaccacctgacgcgcaataatatcggcatcaatgacgttaattccgagatcagcaaacgcattggcaacggtactcttgccactgccaatgcctcccgttaaggcaactatatacctcataatttatattcccgggaattcatcatgattatcaaaacgttaaaaatgagtgcacgaaagcgaaattgatgaaacgttcgctcactatttaccaggtaaatttatgggattgtagcgtaaaaaaagacaatttcgcagtcttgcgccgcattgattagtgcgtatgatagcgtcactggagttgcgctcttacccttatagccattaaccccaggaatccgcacatgcgtattgaagaagatctgaagttaggttttaaagacgttctcatccgccctaaacgctccactcttaaaagccgttccgatgttgaactggaacgtcaattcaccttcaaacattcaggtcagagctggtccggcgtgccgattatcgccgcaaatatggacaccgtaggtacattttctatggcctctgcgctggcttcttttgatattttgactgctgtgcataaacactattctgtcgaagagtggcaagcgtttatcaacaattcttccgctgatgtgctgaaacatgtgatggtttctaccggtacgtctgatgcggatttcgaaaaaactaaacagattctcgacctgaacccggcattaaacttcgtttgtattgatgtggcgaatggttattccgaacacttcgtgcagttcgttgcgaaagcgcgtgaagcgtggccgaccaaaaccatttgtgcgggcaacgtagtgactggtgaaatgtgtgaggagcttatcctctccggtgctgatatcgttaaagttggcattggcccaggttctgtttgtacaactcgtgtcaaaacaggcgtcggttatccgcagctttctgcggtaatcgaatgtgccgatgcggcgcacggtctgggcggaatgatcgtcagcgacggtggctgcaccacgccgggcgatgtcgcgaaagcctttggcggcggtgccgatttcgtcatgcttggcggcatgctggcgggccacgaagagagcggcggtcgcatcgttgaggagaacggcgagaaatttatgctgttctacggcatgagctccgagtctgcgatgaaacgtcacgttggcggcgttgcggaatatcgcgcagcagaaggtaaaaccgttaagctgccgctgcgaggcccggttgaaaataccgcgcgtgatattttgggcggcttgcgttcagcttgtacatacgttggggcttcacgcctgaaagaactgaccaagcgcaccacgtttattcgggtgcaggaacaagaaaaccgcatcttcaacaacctgtaatctcccaacgctggcgtggagcaacacgccagcgttatcccatcccactcatcgcatcgcctaaatggaaaattggcagatacatcgccaccaccagcgtaccgataattcctcccgttatgatcagcaacgccggttccagtaaggctgcgaggttatccgccagcgccattgtgttatcccgatgatgatgggcgaggttgtctaacatgagatccagcgagccggatgcctctcccgttctcactaattgcaaacagagcgggctaaactcaccggcattttttagcgccagccagatgggatgaccgttactgatatcgtgctggatttgtgtcagaagttgcacccagtacgggcagcgcattgtttctctgacgctctctacgccctgtaaaaaagtaatgcctgcactttgtgtcagcgccagaatcgtaaagatctgcgtgagtttttgtcccctcatcagtgaacccataatcgggattcgtaacaacaatttctgccgcgcgataagccaggtcggtcggcgcatcagcaacttattggctatcgccagcagaaagccgaacaacaccagcagccagctccattcgccactaaagtctgccagcgtcatgatcccctgcgttagtgccggtagtggggtgttgaaggtcttatagatagcggcaaactccggcagaacaaaatgcagcattgccacaaccaccatgattgccatcgctaaaatgatgatgggataacgtaacgctgatttcactttgtcggtcaactgacgctgggctttttgctgacgcgccagttcaaagcagcattcatccagcttaccggtcagttcacccgtgcggatcattgcctgatagagtggcggaaatacctctgaccagggtaataaggcattggaaaaagcaatgccctgttcgagatcgtgcgccagcgattgcagcaacgcttgccattgcttactgggatgctgttccgccagcagtgccagcccttcagaaagcgttaacccggctttgagtagcgtcgccagttgatgaatgacttccgcgcttttatctcctcgccactgcgcagaattgatggcgattcgcttcaggctaagtggggtaaccatctgttgctgtagtgccatgagcagcaaagcacggctctctgcccatagcatcccatcttgcgcattgccgtcgccggttatgccatgccagcgccagagttgcttactcgccatgcggcatccccagtacgcggattaactcttcaaaggtggttaagccttgctccacggccaggcagccgttttcaaaaagcgtacgcatacccgcctgtcgtgcgtgcgtttccagcgattcaacgtcggtattagcggaaataagctgacgaatgaccggcgttatgggcagaacttcaaataaggccgtacgaccataaaaaccgtggtagcaatgtacacaaccgggtgcctgccagtggggcagcggcgatggccatacattgtctggaatgtggatgggctccccttgctgctggcgacaatgtgggcaaagtttacgtaccagacgctgggctattaccagcgtaagcgctgatgagagcatccagcgggcgactcccatttgctgtaaacgtaccagcgtttcgcaggtggaattagtgtgtagggtagacaacaccaggtgaccagtttgcgccgctttaatagcgatctctgctgtttcgccatcgcggatctctccgatcatgatgacgtcaggatcctggcgcaataacgcacgcaacacgccctgaaaggtgagtccggcacgcggatggatttgcgtctggtttagtccggctatggggatctcaaccggatcttcgacgctacaaatattaatgtcagcggtattcagcgtttgcagggcactataaagcgtgaccgttttgccgctgcctgtagggccagttaccagcaccagtccctgtggttgttgcaaggcatgagcaaagtccgccagttgtaacggctgcattccaagcgtgttgacatccagtgcctgacccacctgctgtaacaaccttaataccaccttttcaccaccccgacatggtaaggtcgcaatacgaaatgagacggcgtttcctgccagttcgacagtgaattgcccgtcctgcggcaggcgatgttccgcaatatccaggtttcccagcacttttaatctggcggttaatgcgactccggcatccggtgaaacatccggtaaaggatgcaatacgccgtcgatacgcaagcggatgcggtaggcattgtccgctggttcgatatgaatatcagacgcgcgttgttccagcgcagattgtaacgttcgagctagcaactctgctttgggctgatgcttctcctgaacagctacgggcaatgtctgttgtgtgcgactggcgtgaccttccatttgttggcgcgtccagcaggtgatctcaatacgtttggtggtagcgaaatgcaatgcgtccagcaactcatgtgagggggcatcgaccaccgcaacatgaaccacttcttcgctggcatccagcaagactccctgataacgcagacacagggccgtgagctgtggaatattcattgccgctccttagttggcgtcatcaaagcggaagacatcttcgcaggcttgctgcaatgcgctgtcactttgaatattgcagttgcgcgtccagccggtgacgccgtttgcgttatcccaacccggtgtcatgacgacgcttagtccattgagactttcttgcccggtcagcgacaccacgccttttgccacactcatggctgaaacatagtgggtggtggtaggcgagggaatgccattgctgccaccgtcgcaggtatctaatccaccatgttccagcgcgcacaactctacggcggtacggtaaggcacaaaggtttgtagcatgtcggtgagtgcggctttgcgcaggtagttttgataagcgggaataccaatggcgcttaaaatggcaatgatgccaataaccaccatcagttcgataagtgtaaaaccgcgttgcttgtccatctgtttcgctccttgatttggttggcgctactttggcaaacgccatcagcacaggcgaggggcaaaaaacgaaacgggaaagcagattccgaggttttttatttcgttgcagcgaaagacaagaaatttgcgaggcgttacgaagaaagttggggaaggggagattatccgcccgcgatggagcggataaatctgtcaactattagcgaaaacgcattgaaaggtcgagtgcttgtacgtgtttagttagcgcaccgacggagataaagtccacgcccgtttcggcaaattcacgcagtgttttgtcagtgacgttgccagacacttccagtagcgccttgccgttggtgcgtttgacggcttcgcgcatctgttctgtttcgaagttatccagcatgatgatatcggctcctgctttcagggcttcatcaagttcttccagattctctacttcgacttctactggcgcatccgggtgcagccaggacgctttttcgaccgcctggcgcactgagccggaggcaataatatggttttctttgatcaggaaggcatcagaaagccccagacggtgattcgctccgccgccgcaaagtaccgcgtatttcagagctgaacgcaggccgggtaaggttttgcgcgtatccaacaactgcgtgttggtgccttccagcaattcgacatagtggcgtaccttactggcaactcctgaaagggtttgcacaaaattaagcgcagtgcgttcgcccgttaacagcacgcgggatgggccttcaagttcgaacaagggttgattggcgttgatgacatcgccgtcatccacatgccagattatggtgacatcgtcgcctgccagttgaataaacacctcttcaacccagcgtttgccgcaaaagacgccattctcgcgggtgatcaccgtggcatgagagcgagaattttccggtaaaagttttgccgtaatatcattgttggcatcgactgttccgcctaaatcttcccgcagcgcctgggccaccgcgccggggatatcgagattaatgcgttccagcagctcgtcacgtcgggtgtcagggttatagcggcgaggcggcatgttaaaactccagatagctaacgaatcataaggtagaaacatgctactctgaaccgggtattagcaccacatataaggagatcctgcatgttgttagaacaggggtggctggttggcgcgcgccgcgttccctcaccacattacgattgccgcccggatgacgaaacacccaccctgctggtggtgcacaatattagcctgccgccaggcgagtttggcggtccgtggatcgacgcattattcactggaactattgatccgcaggcacatcctttctttgctgaaatcgcccatttgcgcgtctccgctcactgtttgattcgccgtgatggtgaaatagtccagtatgttcctttcgataaacgtgcatggcatgcgggagtctctcagtatcaggggcgcgaacgctgcaatgatttttctattgggattgagcttgaaggcaccgatacgctggcgtataccgatgcgcagtatcaacagcttgcggcggttacgcgggcactgattgattgctatccggatatcgctaaaaacatgacgggccattgtgatattgcgccggatcggaaaaccgatcccggtcctgcatttgattgggcacggtttcgtgtgctggtcagcaaggagacaacatgacgctatttacaaccttactggtgttaattttcgagcgcctgtttaagttgggcgagcactggcagcttgatcatcgtcttgaagcgttctttcggcgggtgaaacatttttctctcgggcgcacgttaggcatgaccattattgcgatgggcgtgacttttttactgttacgcgcattgcagggagtattgttcaacgttcccacgctactggtgtggctgctgattggtttgctgtgtattggcgcaggtaaagttcgtcttcattatcatgcttatctgacagctgcttcacgtaatgatagccatgcccgtgccacgatggctggcgaactcaccatgattcacggcgtcccggcaggctgcgacgaacgtgagtatttgcgtgagctgcaaaatgcattgctgtggattaactttcgtttttatcttgcaccgctgttctggctgattgtggggggaacctggggacccgttacgctgatggggtatgcgtttttgcgtgcatggcaatactggctggcgcgatatcagacgccgcatcatcgtttacagtccggcattgatgccgtgcttcatgtactggattgggtgccggttcgtcttgcgggtgtggtatatgccttgatcggtcatggtgagaaagcgttaccggcctggtttgcttcgctgggtgatttccatacttcgcagtatcaggtgttaacgcgtctggcgcagttctctctggcgcgtgaaccgcatgtcgataaggtggagacgccgaaggcagcggtttcaatggcgaagaaaacctctttcgtggtcgtggtggtgattgcactactgacgatttacggggcgttggtgtaaagattattgccctcaccctgtacgggtgagggcgtagagagattaatgcgcttttacggctttggcggttttctctttaaacagatagccgatacctaacacgatcagccataccgggatcaggtataccgaaatcgccattcctggggtcatcagcataatcaccagtaccgccgccataaacagcaggcagatccagttacccagcggataaagcagagcagggaagcgagttaccacgccttgttcctgcttggcgcgacggaatttcatatgcgccaggctaatcatcgcccagttgattaccagtgcagataccaccagcgccattaacagtccgaaagcggactctggggcaaggtagttaatcagtacgcacaacgccgttaccagtgcagacaccagaatggtatttactggtacaccacgtttatcgacagacgccagcgcttttggcgcattaccctgttgtgccagaccaaacagcatacggctgttgcaatatacgcagctgttgtacacggagagcgccgcagtcagtaccacgatgttcagcgcattcgccacaaaggtatcgcctaactcgtggaagatcagcacaaacggactggtatcggcggtaacgcgggtccacggcatcagtgagagcagaacggctaacgaaccaatatagaaaatcaggatgcggtagataacctggttagttgctttcggtatactttgctccgggttatcagcttctgctgcggtgatccccaccagttccagaccaccgaacgagaacatgataatcgccatcatcatcaccagcccggtgaagccgtgcggcaggaaaccaccctgatcccacaggttgctaacggtcgcctgcgggccgccgttgccactgaatagcagccagccgccgaagatgatcatcgctaccaccgcgataactttgataatggcaaaccagaactccatctcgccaaacactttaacgttggtcaggttgatggcgttaatcaccacaaagaatacggcggcagaaacccaggtggggatttccggataccagaactgaatgtatttacccacggcagtcagctcagccatggcaactaaaacgtacagtacccagtagttccagccagaggcgaaaccggcaaaactgccccagtatttataagcaaagtggctaaaggagcctgcgacaggttcttcgaccaccatttcacccagctgacgcatgatcagaaaggcgataaaaccagcaatggcgtaacccaggataatccctggccctgcggactgtattacggaggcgctacccaggaataacccggtccctatcgcgccacccagcgcgataagctgaatatggcggtttttaaggccgcgctttagctgctcgccgtgctgttgaccttccatcatgaaacctcgtgcggtggttgtttttttgatctacgcagtgatgcgtgtgtaagtttgaaattccgtttgttgtattaatttgtttacatcaaagaagtttgaattgttacaaaaagacttccgtcagatcaagaataatggtatgcggcagcgaatgcacccgctttatgcatggttgaagatgagttgcttaaaaagaaaccgtttgtaaagctcagcctcaacccctctcaatatgtagaatgaatttaaattcgttttaattgaattaaaaatcacaaaattggtaagtgaatcggttcaattcggatttttatagtttaataatcgttaaaaaactcctttcctacgtaaagtctacatttgtgcatagttacaactttgaaaagttatatatgtcaagttgttaaaatgtgcacagtttcatgatttcaatcaaaacctgtatggacataaggtgaatactttgttactttagcgtcacagacatgaaattggtaagaccaattgacttcggcaagtggcttaagacaggaactcatggcctacagcaaaatccgccaaccaaaactctccgatgtgattgagcagcaactggagtttttgatcctcgaaggcactctccgcccgggcgaaaaactcccaccggaacgcgaactggcaaaacagtttgacgtctcccgtccctccttgcgtgaggcgattcaacgtctcgaagcgaagggcttgttgcttcgtcgccagggtggcggcacttttgtccagagcagcctatggcaaagcttcagcgatccgctggtggagctgctctccgaccatcctgagtcacagtatgacttgctcgaaacacgacacgccctggaaggtatcgccgcttattacgccgcgctgcgtagtaccgatgaagacaaggaacgcatccgtgaactccaccacgccatagagctggcgcagcagtctggcgatctggacgcggaatcaaacgccgtactccagtatcagattgccgtcaccgaagcggcccacaatgtggttctgcttcatctgctaaggtgtatggagccgatgttggcccagaatgtccgccagaacttcgaattgctctattcgcgtcgcgagatgctgccgctggtgagtagtcaccgtacccgcatatttgaagcgattatggccggtaagccggaagaagcgcgcgaagcatcgcatcgccatctggcctttatcgaagaaattttgctcgacagaagtcgtgaagagagccgccgtgagcgttctctgcgtcgtctggagcaacgaaagaattagtgatttttctggtaaaaattatccagaagatgttgtaaatcaagcgcatataaaagcgcggcaactaaacgtagaacctgtcttattgagctttccggcgagagttcaatgggacaggttccagaaaactcaacgttattagatagataaggaataacccatgtcagaacgtttcccaaatgacgtggatccgatcgaaactcgcgactggctccaggcgatcgaatcggtcatccgtgaagaaggtgttgagcgtgctcagtatctgatcgaccaactgcttgctgaagcccgcaaaggcggtgtaaacgtagccgcaggcacaggtatcagcaactacatcaacaccatccccgttgaagaacaaccggagtatccgggtaatctggaactggaacgccgtattcgttcagctatccgctggaacgccatcatgacggtgctgcgtgcgtcgaaaaaagacctcgaactgggcggccatatggcgtccttccagtcttccgcaaccatttatgatgtgtgctttaaccacttcttccgtgcacgcaacgagcaggatggcggcgacctggtttacttccagggccacatctccccgggcgtgtacgctcgtgctttcctggaaggtcgtctgactcaggagcagctggataacttccgtcaggaagttcacggcaatggcctctcttcctatccgcacccgaaactgatgccggaattctggcagttcccgaccgtatctatgggtctggggccgattggtgctatttaccaggctaaattcctgaaatatctggaacaccgtggcctgaaagatacctctaaacagaccgtttacgcgttcctcggcgacggtgaaatggacgaaccggaatccaaaggtgcgatcaccatcgctacccgtgaaaaactggataacctggtcttcgttatcaactgtaacctgcagcgtcttgacggcccggtcaccggtaacggcaagatcatcaacgaactggaaggcatcttcgaaggtgctggctggaacgtgatcaaagtgatgtggggtagccgttgggatgaactgctgcgtaaagataccagcggtaaactgatccagctgatgaacgaaaccgttgacggcgactaccagaccttcaaatcgaaagatggtgcgtacgttcgtgaacacttcttcggtaaatatcctgaaaccgcagcactggttgcagactggactgacgagcagatctgggcactgaaccgtggtggtcacgatccgaagaaaatctacgctgcattcaagaaagcgcaggaaaccaaaggcaaagcgacagtaatccttgctcataccattaaaggttacggcatgggcgacgcggctgaaggtaaaaacatcgcgcaccaggttaagaaaatgaacatggacggcgtgcgtcacatccgcgaccgtttcaatgtgccggtgtctgatgcagatatcgaaaaactgccgtacatcaccttcccggaaggttctgaagagcatacctatctgcacgcacagcgtcagaaactgcacggttatctgccaagccgtcagccgaacttcaccgagaagcttgagctgccgagcctgcaagacttcggcgcgctgctggaagagcagagcaaagagatctctaccactatcgctttcgttcgtgccctgaacgtaatgctgaagaacaagtcgatcaaagatcgtctggtaccgatcatcgccgacgaagcgcgtactttcggtatggaaggtctgttccgtcagattggtatttacagcccgaacggtcagcagtacaccccgcaggaccgcgagcaggttgcttactataaagaagacgagaaaggtcagattctgcaggaagggatcaacgagctgggcgcaggttgttcctggctggcagcggcgacctcttacagcaccaacaatctgccgatgatcccgttctacatctattactcgatgttcggcttccagcgtattggcgatctgtgctgggcggctggcgaccagcaagcgcgtggcttcctgatcggcggtacttccggtcgtaccaccctgaacggcgaaggtctgcagcacgaagatggtcacagccacattcagtcgctgactattccgaactgtatctcttacgacccggcttacgcttacgaagttgctgtcattatgcatgacggtctggagcgtatgtacggtgaaaaacaagagaacgtttactactacatcaccacgctgaacgaaaactaccacatgccggcaatgccggaaggtgctgaggaaggtatccgtaaaggtatctacaaactcgaaaccattgaaggtagcaaaggtaaagttcagctgctgggctccggttctatcctgcgtcacgtccgtgaagcggcagagatcctggcgaaagattacggcgtaggttctgacgtttatagcgtgacctccttcaccgaactggcgcgagatggtcaggattgtgaacgctggaacatgctgcacccgctggaaactccgcgcgttccgtatatcgctcaggtgatgaacgacgctccggcagtggcatctaccgactatatgaaactgttcgctgagcaggtccgtacttacgtaccggctgacgactaccgcgtactgggtactgatggcttcggtcgttccgacagccgtgagaacctgcgtcaccacttcgaagttgatgcttcctacgtggttgtagcggcgctgggcgaactggctaaacgtggcgaaatcgataagaaagtggttgctgacgcaatcgccaaattcaacatcgatgcagataaagttaacccgcgtctggcgtaagaggtaaaagaataatggctatcgaaatcaaagtaccggacatcggggctgatgaagttgaaatcaccgagatcctggtcaaagtgggcgacaaagttgaagccgaacagtcgctgatcaccgtagaaggcgacaaagcctctatggaagttccgtctccgcaggcgggtatcgttaaagagatcaaagtctctgttggcgataaaacccagaccggcgcactgattatgattttcgattccgccgacggtgcagcagacgctgcacctgctcaggcagaagagaagaaagaagcagctccggcagcagcaccagcggctgcagcggcaaaagacgttaacgttccggatatcggcagcgacgaagttgaagtgaccgaaatcctggtgaaagttggcgataaagttgaagctgaacagtcgctgatcaccgtagaaggcgataaagcgtctatggaagttccggctccgtttgctggcaccgtgaaagagatcaaagtgaacgtgggtgacaaagtgtctaccggctcgctgattatggtcttcgaagtcgcgggtgaagcaggcgcggcagctccggcggctaaacaggaagcggctccggcagcggcccctgcaccagcggctggcgtgaaagaagttaacgttccggatatcggcggtgacgaagttgaagtgaccgaagtgatggtgaaagtgggcgacaaagttgccgctgaacagtcactgattaccgtagaaggcgacaaagcttctatggaagttccggctccgtttgcaggcgtcgtgaaggaactgaaagtcaacgttggcgataaagtgaaaactggctcgctgattatgatcttcgaagttgaaggcgcagcgcctgcggcggctcctgcgaaacaggaagcggcagcgccggctccggcagcaaaagctgaagctccggcagcagcaccggctgcgaaagcggaaggcaaatctgaatttgcagaaaacgacgcttacgttcacgcgactccgctgatccgccgtctggcacgcgagtttggcgttaacctggcgaaagtgaagggcactggccgtaaaggtcgtatcctgcgcgaagacgttcaggcttacgtgaaagaagctatcaaacgtgcagaagcagctccggcggcgactggcggcggtatcccaggcatgctgccgtggccgaaggtggacttcagcaagtttggtgaaatcgaagaagtggaactgggccgtatccagaaaatttctggtgcgaacctgagccgtaactgggtgatgatcccgcatgttactcacttcgacaaaaccgatatcaccgagctggaagcgttccgtaaacagcagaacgaagaagcggcgaaacgtaagctggatgtgaagatcaccccggttgtcttcatcatgaaagccgttgctgcagctcttgagcagatgcctcgcttcaacagttcgttgtcggaagacggtcagcgtctgaccctgaagaaatacatcaacatcggtgtggcggtggataccccgaacggtctggttgttccggtattcaaagacgtcaacaagaaaggcatcatcgagctgtctcgcgagctgatgactatttctaagaaagcgcgtgacggtaagctgactgcgggcgaaatgcagggcggttgcttcaccatctccagcatcggcggcctgggtactacccacttcgcgccgattgtgaacgcgccggaagtggctatcctcggcgtttccaagtccgcgatggagccggtgtggaatggtaaagagttcgtgccgcgtctgatgctgccgatttctctctccttcgaccaccgcgtgatcgacggtgctgatggtgcccgtttcattaccatcattaacaacacgctgtctgacattcgccgtctggtgatgtaagtaaaagagccggcccaacggccggcttttttctggtaatctcatgaatgtattgaggttattagcgaatagacaaatcggttgccgtttgttgtttaaaaattgttaacaattttgtaaaataccgacggatagaacgacccggtggtggttagggtattacttcacataccctatggatttctgggtgcagcaaggtagcaagcgccagaatccccaggagcttacataagtaagtgactggggtgagggcgtgaagctaacgccgctgcggcctgaaagacgacgggtatgaccgccggagataaatatatagaggtcatgatgagtactgaaatcaaaactcaggtcgtggtacttggggcaggccccgcaggttactccgctgccttccgttgcgctgatttaggtctggaaaccgtaatcgtagaacgttacaacacccttggcggtgtttgcctgaacgtcggctgtatcccttctaaagcactgctgcacgtagcaaaagttatcgaagaagccaaagcgctggctgaacacggtatcgtcttcggcgaaccgaaaaccgatattgacaagattcgtacctggaaagagaaagtgatcaatcagctgaccggtggtctggctggtatggcgaaaggccgcaaagtcaaagtggtcaacggtctgggtaaattcaccggggctaacaccctggaagttgaaggtgagaacggcaaaaccgtgatcaacttcgacaatgcgatcattgcagcgggttctcgcccgatccaactgccgtttattccgcatgaagatccgcgtatctgggactccactgacgcgctggaactgaaagaagtaccagaacgcctgctggtaatgggtggcggtatcatcggtctggaaatgggcaccgtataccacgcgctgggttcacagattgacgtggttgaaatgttcgaccaggttatcccggcagctgacaaagacatcgttaaagtcttcaccaagcgtatcagcaagaaattcaacctgatgctggaaaccaaagttaccgccgttgaagcgaaagaagacggtatttatgtgacgatggaaggcaaaaaagcacccgctgaaccgcagcgttacgacgccgtgctggtagcgattggtcgtgtgccgaacggtaaaaacctcgacgcaggcaaagctggcgtggaagtggacgaccgtggtttcatccgcgttgacaaacagctgcgtaccaacgtaccgcacatctttgctatcggcgatatcgtcggtcagccgatgctggcacacaaaggtgttcacgaaggtcacgttgccgctgaagttatcgccggtaagaaacactacttcgatccgaaagttatcccgtccatcgcctataccgaaccagaagttgcatgggtaggtctgactgagaaagaagcgaaagagaaaggcatcagctatgaaaccgccaccttcccgtgggctgcttctggtcgtgctatcgcttccgactgcgcagacggtatgaccaagctgattttcgacaaagaatctcaccgtgtgatcggtggtgcgattgtcggtaccaacggcggcgagctgctgggtgaaatcggcctggcaatcgaaatgggttgtgatgctgaagacatcgcactgaccatccacgcgcacccgactctgcacgagtctgtgggcctggcggcagaagtgttcgaaggtagcattaccgacctgccgaacccgaaagcgaagaagaagtaattgttcgtttgccggaacatccggcaattaaaaaagcggctaaccacgccgctttttttacgtctgcaatttacctttcctgtcgccttgctccgcgctcagagagacgttcgcgtactgctgaccgttgctcgttattcagcctgacagtatggttactgtcgtttagacgttgtgggcggctctcctgaactttttcccgaaaaacctgacgttgttcaggtgatgccgattgtatacgctggcgggcgttatcacgttgctgttggttcagtgggcgctgctgtactttttccttaaatacctggcgctgttcgggagttgcagactgaatacgctcacgcgctgcctctcttcgctgctggttctgtgggttagtctgcattttctcgcgaaccgcctggcgctgctcaggcgaggcggactgataacgctgacgagcggcgtccttttgttgctgggtcaggggttggcgacggctgaagtcgcggaagtcgtcatagctcccatagtgttcagcttcattaaaccgctgtgccgctgcctgacgttcggtatctcgtgtaatgacgggggcggcgtgtgttcgttgctgaaactgacttgctgccgcctgacgctggctgtcgcgtgttggagcaggtagctgcgtggcactcattccgccgttgacatcggtttgatgaaaccgctttgccatatcctgatcatgatagggcacaccattacggtagtttggattgtgccgccatgccatattcttatcagtaagatgctcaccggtgatacggttgaaattgttgacgtcgatattgatgttgtcgccgttgtgttgccagccattaccgtcacgatgaccgccatcgtggtgatgataatcatcatcgtcatgatgatgatggtcatgatcgtcgtcgtcccagtcgatgctgctgaatagtgcgtacgtggtagcaacacccatgctatagccgaatccgcgcacaaagctgtcaataaacggttctccggctggtggtggcagataaaccggcggatacgcagtattggcccagttcccgtaaaccacggttgggttgtagttgggaatatagaccacatcaggattggcgggctcaatggaaatgacggttgttgcaggctctgtaatgacggggctggcagttaaaacggtattggatggtatgacgggtgccgtgactgtctgttttaccggtacagctttcttcgttgtggtaataactttttgttcggttgatgacttcagcgaaccggtttgttgcgccagttgccgcaatcgctgtaccgagtccatcacgtcctgcggctgcgccagaaaagcatcgcccaggttttgcacccattgcgggttttcgcccatcaatgccatcaattgtggaaaggccaccagtgatttaacgctggcgtcccacggctggtcagataccgcctgaatagcagcatcgccttgtttaagtggattatcgtgcgaccattgcactgcttgagcaacgtttgccggataggttgatgccattaacacttgtgaaagcagagaatcggggtacagcgcgacaggcgcaacccattgatcgatttgtgcagtgctgaatgcggatttgacgacggcgggcgttacgggcggtgcggaaaccgttgcaggaagcgtaactgcggtgatgtcaggcgcagtctgttgtgtcgattgcggttccacaggcgcttccactgtgcggctttttatatatagcccggtagaggcggcacaaagcccggcactgcaaattagcgccagcacatggggtttaaacggcaaagtcattttcataattcggatctcaaggaaatcgcaatggtcggcgaactgccacccgcaggtgctgtgaatccgagtataaagaggcggtagtttaaattttgactaatcttgggattcattgagaaaggtgattatcaccatgcgaattaacgaagtttttacggagggaaacaatctctagaccatccttaacgattcagccacttttttatgttgcttttttgtaaacagattaacacatcgtcaaaatcctgctattctgcccgttgcggtactgggcatttaccctacaaactgctgtctcacaggagcgtgaagagaatcgcctgccgcactatgacaatgagagcgaggagaaccgtcgtgctagaagaataccgtaagcacgtagctgagcgtgccgctgaggggattgcgcccaaacccctggatgcaaaccaaatggccgcacttgtagagctgctgaaaaacccgcccgcgggcgaagaagaattcctgttagatctgttaaccaaccgtgttcccccaggcgtcgatgaagccgcctatgtcaaagcaggcttcctggctgctatcgcgaaaggcgaagccaaatcccctctgctgactccggaaaaagccatcgaactgctgggcaccatgcagggtggttacaacattcatccgctgatcgacgcgctggatgatgccaaactggcacctattgctgccaaagcactttctcacacgctgctgatgttcgataacttctatgacgtagaagagaaagcgaaagcaggcaacgaatatgcgaagcaggttatgcagtcctgggcggatgccgaatggttcctgaatcgcccggcgctggctgaaaaactgaccgttaccgtcttcaaagtcactggcgaaactaacaccgatgacctttctccggcaccggatgcgtggtcacgcccggatatcccactgcacgcgctggcgatgctgaaaaacgcccgtgaaggtattgagccagaccagcctggtgttgttggtccgatcaagcaaatcgaagctctgcaacagaaaggtttcccgctggcgtacgtcggtgacgttgtgggtacgggttcttcgcgtaaatccgccactaactccgttctgtggtttatgggcgatgatattccacatgtgccgaacaaacgcggcggtggtttgtgcctcggcggtaaaattgcacccatcttctttaacacgatggaagacgcgggtgcactgccaatcgaagtcgacgtctctaacctgaacatgggcgacgtgattgacgtttacccgtacaaaggtgaagtgcgtaaccacgaaaccggcgaactgctggcgaccttcgaactgaaaaccgacgtgctgattgatgaagtgcgtgctggtggccgtattccgctgattatcgggcgtggcctgaccaccaaagcgcgtgaagcacttggtctgccgcacagtgatgtgttccgtcaggcgaaagatgtcgctgagagcgatcgcggcttctcgctggcgcaaaaaatggtaggccgtgcctgtggcgtgaaaggcattcgtccgggcgcgtactgtgaaccgaaaatgacttctgtaggttcccaggacaccaccggcccgatgacccgtgatgaactgaaagacctggcgtgcctgggcttctcggctgacctggtgatgcagtctttctgccacaccgcggcgtatccgaagccagttgacgtgaacacgcaccacacgctgccggacttcattatgaaccgtggcggtgtgtcgctgcgtccgggtgacggcgtcattcactcctggctgaaccgtatgctgctgccggataccgtcggtaccggtggtgattcccatacccgtttcccgatcggtatctctttcccggcgggttctggtctggtggcatttgcagccgcaacaggcgtaatgccgctggatatgccggaatccgttctggtgcgcttcaaaggcaaaatgcagccgggcatcaccctgcgcgatctggtacatgcgatcccgctgtatgcgatcaaacaaggtctgctgaccgttgagaagaaaggcaagaaaaacatcttctctggtcgcattctggaaattgaaggtctgccggatctgaaagttgagcaggcatttgaactgaccgatgcgtccgctgagcgttctgccgctggttgtactatcaagctgaacaaagaaccgatcatcgaatacctgaactctaacatcgtcctgctgaagtggatgatcgcggaaggttatggcgatcgtcgtaccctcgaacgtcgtattcagggcatggaaaaatggctggcgaatcctgagctgctggaagccgatgcagatgctgaatacgcggcagtgatcgacatcgatctggcggatattaaagagccaatcctctgtgcaccgaacgacccggatgacgcgcgtccgctgtctgcggtacagggcgagaagatcgacgaagtatttatcggttcttgcatgactaacatcggtcacttccgtgctgcgggtaaactgctggatgcgcataaaggccagttgccgacccgcctgtgggtggcaccgccaacccgtatggacgccgcacagttgactgaagaaggctactacagcgtcttcggtaagagcggggctcgtatcgagatcccgggctgttctctgtgtatgggtaaccaggcgcgtgtagcagacggtgcgacggtggtttccacctctacccgtaacttcccgaaccgtctggggactggcgcgaatgtcttcctggcttctgcagaactggcggctgttgcggcgctgattggcaaactgccgacgccggaagagtaccagacctacgttgcgcaagtagataaaactgccgttgatacttatcgttatctgaacttcaaccagctttctcagtacaccgaaaaagccgatggggtgattttccagactgcggtgtaataagtaagcgcacgcgctgcgcataaacgacacaatgcccggtgaatgagattcccgggcattttttatttctaaaccatcgccgttccgctgtttttctccggtaaggctgcgataattacatcaatggcgcgatgcgatttcggcgcattgccgggagcagaggaacacactatggattacgaatttctgcgcgatattaccggagtggtaaaggtgcgtatgtccatggggcatgaagtggtcgggcactggtttaatgaagaggtgaaagaaaaccaggccttgcttgatgaagtggaacaagcagcgcacgcactgaaaggtagcgaacggtcctggcaacgggcagggcatgaatacaccctgtggatggacggtgaagaggtgatggttcgcgccaatcaactggaattcgctggcgatgaaatggaagaggggatgaactactacgacgaagaaagcctgtcgctatgcggcgttgaggattttctgcaggtcgtggcggcttaccgcaatttcgtgcagcagaagtaaataaatctggcggagcctgggagctccgccagagccgttaaacagctggcatattgcgcccgtaataaatctcgcgcatttctttccacagcgcagcggtaatttcctggcgctcgctgtcggttaaatcttccggtttggtgtggaacatgtagtgcttaaggtcgaactctttaagcaacatcttggtatggaagatattttcctgatagacgttcacatccaccatgtcatacagcgccttcatatcgtcagacataaagttctgaatcgaattaatctcatggtcgataaagtgcttcataccgttaatgtcgcgggtaaaaccgcgcacgcgataatcaatggttacgatatcggactcaagctggtggatcaggtaattcagcgccttcagcggagaaatcacgccgcaggtagagacttcaatatcggcgcggaaggtacataaaccgccttcaggatgactttccgggtaggtatgtacgcaaatatgacttttatcgagatgggcaacgaccgtttctggcagtgggccggggtgttctgttttgtcgatgagtttcgggtcaaccggttcttcactcaccagaatagtgacgctggcaccctgtggttcgtaatcctggcgggcgatgttaagaatattggccccgataatggaacaggtttctgacaggatttcggtcagacggttggcattatagagttcatcgatataagcaatataaccgtcgcgctcttcggcagttttggcgtagcagatatcgtaaatacaaaaactcagacttttggtcagattattaaagccatgcagtttcagttttttcaatttcttatcttctccttaggacggctgtgaagccagtgcgtcttgcagatactgaggtaaggcaaaagctgccgtatggattgccggattgtaataacggcatttcaggccagaggcgagaaaacgcgcctgaataatttcggttgagagatggcgtaaggcgtcgttatctgtcgcccatgcaaaagtcatgataccgccgtaataggtcgggatcgccgcctgataaaagccaacgtcgctgaagtaatggctgagtttgcgatggctgtcgatggcttcttcctgctgtaaaaagcagacgccgttttgtgcgacgaagataccgccaggattcaggcaacgtttgcagccttcataaaatgccgaagtgaaaaggctttcgccgggaccgataggatcggtgcagtcggagataatgacatcaaaggtctggctggtttgattaacgaaattgacgccatcgtcgatcaccagcttaaagcgcggatcgtcgtagctaccggcgttatggttgggtagatactgacggcagaacgatacgacacccgcatcgatttccaccatcgtgattgactcaacgtttttatgtcgggttacttcacgcagcatggcaccgtcgccgccgccgataatcagcacatgtttcgcgtgaccatgggccagtagcggaacatgggtcatcatctcatgatagataaactcgtcgcgctcggtggtttgtactacgccatccagcgccattacgcgaccaaatgcagcgttctcaaaaatgatcagatcctggtgatcggtcttttcatgatacagaacgttatctaccgcaaagtactgcccaaactggtcgtgtagcgtttcatgccactgttttttttcggccatgggttgatacctcctttgttaacacccgtaaaaaaagggcgcaacataatagctaacattgaccgcggatgcacggtcaatatttctacaaaaaggtatcagggattatttgacgtaggcaagcaggcttaaggaatcgcgggccagggctttgcactttttagcgacgggaatgccaatgccgctgagatcgcggtagctgtcttcaccgagggctttcatgtcgaaggtgtcgtaattactgagatcccactggttttgctgggcgaaaaagaccagtgcgcgacgaatttgcccgttaggtaagttctggtaaccacaatcgttcttcagaaagacaaaaactgccgttaaatcggccatatcttcggcttcagactcgctgagcgcgtaactgtttgcgcaaacggccatcaggctgccgaataacactgttctgaaaaacgtcttcattgcttctaccaggggcttaaagaagataaacgttagcacactgcgagcgaggcgacgaccattattgtcgattaaattgtgtctgcggcttgaccttcccgtaaggggaaggactatgctcaacgtttgattttgtttcgcctgcttaagaataaggaaataactatgcaacgtcgtgatttcttaaaatattccgtcgcgctgggtgtggcttcagccttgccgctgtggagccgcgcagtctttgcggcggaacgcccaacgttaccgatccctgatttgctcacgaccgatgcccgtaatcgcattcagttaactattggcgcaggtcagtctacctttggcgagaaaactgcaactacctggggctataacggcaatctgctggggccggcggtgaaattacagcgcggcaaagcggtaacggttgatatctataaccaactgacggaagagacgacgttgcactggcacgggctggaagtaccgggtgaagtcgacggcggcccgcagggaattattctgccaggtggcaagcgctcggtgacgttgaacgttgatcaacctgccgctacttgctggttccatccacatcaacatggcaagaccgggcgacaggtggcgatggggttggctgggctggtggtaattgaagatgacgaggtcctgaaattaatgctgccaaaacagtggggtatcgatgatgttccggtgattgttcaggataaaaaatttaacgctgatgggcagattgattatcaactggatgtgatgaccgccgccgtgggctggtttggcgatacgctgctgaccaacggtgcaatctacccacaacacgctgccccgcgtggttggctgcgcctgcgtttgctcaatggctgtaatgcccgctcgctcaatttcgccaccagcgacaatcgcccgctgtatgtgattgccagcgacggtggtctgctacctgaaccggtgaaggtgagcgagctgccggtgctgatgggcgagcgttttgaagtgctggtggaggttaacgacaacaaaccctttgacctggtgacgctaccggtcagccagatggggatggcgattgcgccgtttgacaagccgcatccggtaatgcggattcagccgattgctattagtgcctccggtgctttgccagacacattaagtagcctgcctgcgttaccttcgctggaagggctgacggtacgcaagctgcaactttctatggacccgatgctcgatatgatgggtatgcagatgctaatggagaaatatggcgatcaggcgatggccggaatggatcacagccagatgatgggccatatggggcacggtaatatgaatcatatgaaccacggcgggaagttcgatttccaccatgccaataaaatcaacggtcaggcgtttgatatgaataagccgatgtttgcggcggcgaaagggcagtacgaacgttgggttatctctggcgtgggcgacatgatgctgcatccgttccatattcacggcacccagttccgtatcttgtcagaaaatggcaaaccgccagcggctcatcgcgcgggctggaaagataccgttaaggtagaaggcaatgtcagtgaagtgctggtgaagtttaatcacaacgcaccgaaagaacatgcttatatggcgcactgccatctgctggagcatgaagatacggggatgatgttagggtttacggtataaaaagaccgtattcggaaatatgcccggatctctccgggcattatggttatttcacatcatccggcagcgcataagccacaatatagtcgcccatcttcgtaccaaatgaaccgtgaccgcctgcggagatcaccacatactgcttgccattcacttcataggtcattggcgtcgcctgaccacccgctggtaaacggccctgccacagtttttcaccgttgctcatgttgtaagcgcgcaggtagttatctgccgtagcagcgataaacagcacgttacccgccgtggagattggcccgcccagcatcggcatacccatattgaacggcaccggtacaggcatcgggaacggcatactgtcttgcggcgtaccaatacgtttcttccacaccacttcattggttttcagatccagcgccgagatataaccccatgctggctgtttacacggcagaccaaacggtgagaggaacgggttgagcgtgacaccatacggtacaccgtactgtggctgaatgccggattccgtacccgtgcctttggcatctttcggctgctccatcgggttacccggaccgcgtgggatcagtttcgaaacaaacggcagtgccattgggttggcaattgccacttcacgatttggatcaacggaaatcccgccccattcgaacatccccaggttacccgggaagaccagcgtaccctgttcagatggcggggtgaaaatgccttcatagcgcatctggtggaacatcacgcggcacaccagctggtcaaacatggtggctccccacatatccgcaccgctcaaatctttcgtcggacggaagctcagttcagaaaacggttgagttggggttacgtaatcgcctttcgctgcaccttggggaaccggtttttccggtgccggaaccaccagttcgccattacgacgatcgagcacaaaaatgttgccggttttcgccggagcgtaaataactggcactttctgaccattaacggtgatgtccgccagcgtcggctgtgccggaagatccatatcccacaggtcgtggtgaacggtctggtagctccacgccagtttcccggtagtggcattcagcgccagaatcgagctggcataacgttcctgttccggtgtgcggttaccgccccagatatccggcgtggtcacgcccatcggcagatacaccagatccagcttcgcgtcataggccgctggtgcccacgagtttggcgagttaaaggtaaaggtgtgttcgtcagacgggattgcgttcggatttttcgcgcccggatcaaaagcccacagcagctccccggtgttgacatcaaaaccacggatcacgccagacgtttcgcgggttgagaagttatcggtaactgaacctgccatcacgatggttttatcggtgataatcggtggcgaagtcggttcatacagacccggtttggtgtctggcatattgctttgcagattaagcacgcctttattggcgaaggtttcgcacagtttgccgttttcagcgttaatcgcaatcaggcgaccatcattcactggaagaatgatacgacgcgggcaatccgccatcacttccggcgaagccgtttctgctttggcttcatgataagagacgccacggcaggttacgtgctggaaagactcgttggttttcagctcaggatcgtaatgccatttctctttgccgctggcggcatcgagcgcaaacagtcgctggtgagcggtacacaggtaaagggtgtcgcccactttaatcggcgtcacttcattggtgatttcacccggatcgttcggctgcttcacatcgccagtacggaacacccaggcttctttcagcttgtgaacgttatcggcgttaatttgtttcagaggtgaaaagcgttgaccttcctgattacgaccataggcaggccagtcctgatcggcaacgggggagattgcttcggcaggtgtggcatcggcgcttaaggtgccgttgatttcctgcggatcgttaaatccggcccaggtcaggataccaccgctaatcagcagtgccaccaccagtgcggcaactgcgccgctggcaggaatgaccaggcgacgccagacaaacggcaggatcagccagatgccgaagaagaccagaatgtcgctgcgcggagtcagcgcccagaagtcgaaaccaacttcccagacgccccaaatcatggtgccgagcagcagggctgcgtacagccaaagcgcggcacgtttactgcgccacagcatccaggcgacgccgagcatcacaagaccagcgatagggtagtaccaggagccgccaatcgcgaccagccagcctccgccaatgagtagatacagcccgcaaagcgctgcaaaaagggctgttagcgtgacgagtaatcgtcgcgagcctgtattgttaattgccataaagagacaccatttcaattcattaatattttagtagcaattaattataggttttaacatgtgtgatcgtcatcacaattcgagctttattaacagattccgcgaatgaatagttttactggtatactgcgtgtcttgcgctttgttgcggtgccaaaacctgcccgtgcgaagtgatttgtttttaaatcatatggttagagatatgaaacatactgtagaagtaatgatccccgaagcggagattaaagcgcgtatcgccgaactgggtcgtcagattactgagcgttacaaagacagcggcagcgatatggtgctggttggtctgctgcgtggctcatttatgtttatggcggacctgtgccgtgaagttcaggtatctcatgaagtcgactttatgaccgcctccagctacggtagcggcatgtccaccacccgtgatgtgaaaatcctcaaagatctggatgaagatatccgtggcaaggacgtgctgattgttgaagatatcatcgactcggggaatacactgtcgaaagtgcgtgagatcttaagcctgcgcgaaccgaagtcgctggcgatttgtacgctgctggataaaccgtcccgtcgtgaagtgaacgtcccggttgaatttatcggtttctcgatcccggatgagtttgtggtgggttacggcattgattacgcacagcgttaccgtcatctgccgtatatcggcaaagtgattctgctggacgagtaagtgtgaagttgccggatgtgttgcatccggcatggcatttttatttgtggttggcgtgtttcagcttgaggttggaaatcccgtgacggtaacgttgctcaagggtttcgcggttggtggcagtaacatccagatcacgcagcaagccgtcgtgaatgccgtaggcccagccgtgaatggtaactttctgcccgcgtttccacgctgattgcataatggtggagtggcccaggttatacacctgttccatgacgttcagttcacacaaggtatccagacggcgctcttgcggcatttcgccgagcaatgagctatgtttgaaccagatatcgcggatgtgtagcagccagttgttgataagccccagttccgggttttcaactgcggcttgtacgccgccgcaaccgtagtggccacagataataatgtgttcaacttcgagtacatccactgcatactgaaccacggaaaggcagttcaggtcggtgtgaatgaccaggttagcaacattacggtgaacaaagagttcgcccggctcaagaccggttaaacgttctgcaggaacgcgactgtcggaacatccaatccatagaaagcgcggtttttgcgcttgtgccagtttctcaaaaaacccgggatcctcttccaccagcatttttgaccatagtgcattgttgctgatgagtgtatctatgtctttcatggaggttaacgacctgtaaccaaataattacgtttggctaatatagggcaactccgggacgatttaaaccacagataaagtgtaagaacgtaaggtaagtaaaaatttatgaccattgcactggaacttcaacagcttaaaaaaacttatccaggcggcgttcaggcgcttcgtggaatagatttgcaggtcgaagcgggtgatttttatgcgcttctcgggccgaacggggccgggaaatcgaccactatcggtattatcagctctctggtaaataaaacctccgggcgggtcagcgtatttggttacgatctcgagaaagatgtcgtgaacgctaaacgtcagttgggactggtgccgcaggaatttaacttcaacccgtttgaaaccgtgcagcaaattgtggtaaatcaggcagggtactacggtgtggagcgcaaagaggcgtacatccgcagcgaaaaatatcttaaacaactcgatctatggggaaaacgcaacgaacgtgcgcgtatgttatctggcgggatgaagcgccgtttaatgattgcccgtgcgttaatgcatgaacctaaactactgattctcgacgaaccgaccgcaggcgtggatattgaacttcgccgctcaatgtggggctttttgaaggatttaaacgacaaaggcaccaccatcattctcaccacacactacctggaagaagcagaaatgctgtgccgcaatatcggcattattcaacacggtgagctggtggaaaatacctcgatgaaggcgctgctggcgaagctgaaatcggaaacctttattctcgatctcgcaccgaaaagtccgttaccgaagctcgatggctatcagtatcgactggtcgataccgcgacgctggaagttgaagtgctgcgtgagcaggggatcaacagcgtatttacgcagttaagtgagcagggcattcaggtattaagtatgcgtaacaaagctaaccgtctggaagagctgtttgtttcactggttaatgaaaaacaaggagatcgcgcatgatgcatctttactgggtggcgctaaaaagcatctgggcgaaagagatccatcgctttatgcgtatctgggtgcagacgctggtgccgccagtcatcaccatgaccctttactttattatcttcggtaacctgattggttcgcgtattggcgatatgcatggcttcagctatatgcagttcatcgtaccggggctgatcatgatgtcggtgatcaccaatgcctacgccaacgttgcgtcatcattttttggtgccaagttccagcgtaatattgaagagctgctggtagcgccggttccgactcacgtcattattgccggatatgtcggcggtggcgtggcgcgtggtctgtttgttggcattctggtgacggcaatttcactgttttttgtgccgtttcaggtgcattcgtgggtattcgttgccttaaccctggtgctcacggcggtgttgttctcccttgcgggtttgctgaacggtgtgtttgccaaaacgttcgatgacatcagcctggtgccaacctttgtgttaacgccactcacgtatttgggtggggtcttttactcactgactttgttgccgccgttctggcaagggctgtcgcacctgaacccaatcgtttatatgatcagtggtttccgctacggcttcctcggtatcaatgatgttccgctggtcactacttttggcgtactggtggtctttattgtggcgttttatttgatctgttggtcgctgatccaacgtggacgtggtttgcgtagctaaggctatttcctctcctctggatttgggggagaggagttttgacggctatcaccctttatcaacaatggtcagggtagactgattttcggctaaggaggaaggcgatgttaggttgggtaattacctgtcacgatgaccgggcgcaagagatactggatgcgctggagaaaaaacatggggcgcttcttcagtgccgggccgtgaatttctggcgtgggttaagctctaatatgctcagccgcatgatgtgcgatgctctgcatgaagcggactctggtgagggtgtcatcttcttaaccgatatagccggagcgccaccgtaccgcgtggcttcattattaagccacaaacactcccgttgcgaagtgatttctggtgtcacgttaccgttaattgaacagatgatggcttgccgtgaaaccatgaccagttcagagtttcgcgagcgtattgtcgaactgggtgggccggaggtgagtagtctttggcaccaacaacaaaaaaatccgcctttcgtcctcaaacataatttgtatgagtattaacccacgattcttatagcgcttttgctacaataaaagcgttgtttcaccctcggttattttttcatgtacaaacaagctgttattctcctgctgatgctgtttaccgcaagtgtcagtgccgcgttacctgcccgttatatgcaaaccatcgaaaatgctgcgatctgggcgcaaattggcgacaagatggtgaccgtggggaatattcgggccgggcaaatcattgccgtggagcccactgccgcaagttattacgcatttaattttggctttggtaaagggtttatcgataaagggcatctcgagccagttcaggggcgacaaaaagttgaagacggtttgggtgacctcaacaagccgctgagtaatcagaacttaattacctggaaagatacgccggtctataacgcgccgagtgcgggcagtgcgccatttggggtactggcggacaatttgcgctacccgattttgcataaactgaaagacaggttaaatcaaacctggtatcagatccgtattggcgatcgactcgcctatatcagcgcgctggatgcccaacccgataatggcctgccggtgctaacctatcaccatattctgcgcgatgaagaaaacacccgttttcgccatacttcgacgaccacctcggtacgcgctttcaataaccagatggcctggctgcgcgacaggggatacgcgacactgagcatggcgcagctggaaggttacgtgaagaataagatcaatctccctgcgcgagcggtggtgattacctttgatgatggcctcaagtcggtgagccgctatgcgtatcctgtattgaaacaatatggcatgaaggcgacggcgtttgttgttacctcgcgcatcaaacgtcacccgcagaagtggaacccaaaatcgctgcaatttatgagcgtttctgagcttaacgaaattcgcgatgttcttgattttcagtcacatacccattttttgcatcgggtggatggctatcgccgacccatattactgagccgtagtgagcacaatattctgtttgattttgcacgttcacgccgcgctctggcgcaatttaatccgcatgtctggtatctttcgtatccgtttggcggatttaatgacaaagccgtgaaggcagcaaacgatgccggatttcacctggcggtgacaaccatgaaaggcaaagtaaaaccgggggataatccgttgttactaaaacgactttatatcttaagaacggattcgctggagacgatgtcgcggctggtgagtaaccagccgcagggataacaatcaagcaacctgtaccggaatcgctttcgcggtacgtttcatttcattgtcgccttcaaaataggcgacattgggtcgccaggtgcgagcttcttcatctggcatggtaacgaagctggcgatgatgacaatatcgccgacgctggcgcagtgggccgccgcaccgttaacagaaataattctcgaaccgcgttctgccgcgatggcataagtggagaaacgcttgccgttggtgacattccagatatcgatggcttcgttttcgagaataccggctgcgtcaagaaaatcctggtcaatggcgcaagaaccttcatagtgcaggtccgcatgagtcactttcacgcggtggagtttgccctgcagcatcgtgcgaatcataacttctacctttctaccctgtcgttaacgaagcaggcggtgcctgctttgaggaaattctcacgcagtattgcccgatttttgatgagtgtctactcatctgatggcatttgcgtcagcagtttgcgtaccgcgccgaagcgtgccatgtatcgcctgtaacgaattgaaatttctctgaacgctgctcggtaaacactaaagaggcggctgacgacggcgcgccttgactggatactgccttcacgcaagacaacacggaagacagggaagatggatgcaccgagtaccacaccgcatgacgcggtatttaaacaatttttaatgcatgcggagacggctcgcgactttctggagatacatttgccagtggaattacgagaactttgtgacctcaacacgcttcatttagagtcggggagtttcattgaagagagcctgaaaggacacagcacggacgtgctctattccgtgcaaatgcagggcaatcccggttatctgcatgttgtgattgaacaccaaagcaagccggataagaaaatggcctttcgcatgatgcgttattctattgctgccatgcaccggcatctggaggcggatcacgataagctgccgctggtggtgccgatactgttttatcagggcgaggccacaccttatccgctctcaatgtgctggtttgatatattttactcgccggagctggcacgacgcgtctataacagtcctttcccgctggtggatatcaccatcacaccggatgacgaaatcatgcaacatcggcggattgcgattctcgaactactgcaaaaacatattcgccagcgcgacttaatgttattgctggagcaactggtcacgctgattgacgaagggtacactagcggaagtcagttagttgccatgcaaaactatatgctgcaacgcggtcatactgaacaagcggatttgttttatggtgtgctgagagacagggaaacgggaggggagtctatgatgacgctggcgcagtggtttgaagagaaagggattgagaaggggattcagcagggaagacaggaggaaaggcaagaattcgccctgcgtcttctaagtaaaggaatgtctcgggaagacgttgcagagatgacaaatttatctcttgctgagattgataaggtaattaaccttatttaagttacctgtgttatgacagatgacgtggggtaaattaataactggcgccatcagccgtagcgccagttaagtattacgccagctcgaccattttgttgtcgatcaggcgagcatcgccaagccaggcggctaccagaattactgcccgtttgctggtttcagaaacttccagcaatgtgtcggcatcgcgaatctgaatatcatcggcgcggaagcctttttcattcagttcttgccccgcaatggtaataatttcatcgagatcccgttccccagcctgcaatttgtcagcaatcgaacttaaaactttgtacagaccaggcgcaattttgcgttgttccgccgtcagataaccgttacgggaacttagcgccagaccgtctttggcgcgcataattggcacaccgacaatctcaatatcgaagcccatatcggcaaccattttgcggatcagcgccagttgctgaaagtccttttcaccgaagcaggcgatgtccggctggaccaggttaaacagcttgctgacgatagtcgaaacgccgcgaaaatgccccggacggctcgcgccttccagcatggtcgaaagcccgggaacgtcaacgtaagtatgggtttcagtaccgttcgggtagatctcttttaccgaaggggcgaaaactaaatccactttacgtttgtttagcttctcgcagtcctcctgcaaggtccgtggataacgtgccagatcttccgggcggtcgaactgcatcgggttaacgaaaatactgacgacgaccacatcggcgcgggctttggcttcgtcgaccagcttcatatggccatcgtgcagattacccatagtaggcaccagcgccacgcgcttgccttccatacgcaggcggcgaatttgctgacgcagcagcggcagggtttcgataattaacacaacgtgactccttaatggaaactgtgttcttcgcccggataaacgccggactccacttcagccatatactgccgcacagccgcgcggatgtcgcccgtttcggcgaggaaatttttagcgaatttaggaatgtgaccgccggtaatgccgaaggcgtcgtgcatcacgaggatctgcccgtcagtgacgttgcctgcgccaatgccaataaccgggatcgccagtgcttcggtaatacgttttgccagttcaaccggcacgcattccagcaccagcagctgtgccccagcggcttctaaggctaatgcatcgctgagcagttgatcgcccgcttcatcgccgcgcccctgaactttgtagccaccgaaaatattcactgactgtggggttaaacctaagtgaccacatacaggaacggcacgttcggtcagcatttttacggtttcgaccagccactcaccgccctcaattttgaccatattggcaccggcacgcataaccgttgcggcgttttcaaaggcttgttccggcgtggcatacgccataaacggcaggtcagccaacagcaggcagtttggcgcgccgcgacgtacggcggcagtgtggtaggcgatatcctcgacggtaacgggaagggtggagtcgtggccctgaaccgtcatgcccagcgaatcgcctaccagcatgacgttaagtccttcatcagcaaatagtttcgcgaagctgtagtcgtaagcggtgatggtcgcgaaacgctttttatcctgcttacatttctgaagtgaagcaatggtggtcggtttcataacgtgtcctgataaatgatgtcgtgttgcctggcattttatcagtcacattggtgggggcaatgatttatcaattaccgcaccgccagatgatggcggtgcggtggacttattaagggtaggttacctggaaagtactggtggctttaaactcaccagcttctattggtatagttccatcctgttgtagcgtggcctggaaatggagagggtatgttatacctgtatcttgatccgggtaaactcctcctgttgtatcgtctttgcctctcgggtcgtaatctttataaacagaatttgaatcattaggtttcaatgtcattagaggatttttactagttgctaaaccttctatgagtacaccgactccttttgctgcgtcattacctgtgagagtattaccaaggagttgcccgttttcagtaccaacctttgttgaaactaattttgtctcaatattagtcacacgaacgcagttttgaagtgaaatatcaaaaggaaccggtgtggcaccgtttctgatttgttctgcactatattcacccatttttaccgtagaaccagtcacagaagttccactaagcatagcggtaaaacaagtgggattagtcaacttgacattgagcagatcgaaatcgattttgataaaataactatgctcatttataccttggcctgcgccataggctttaaatgaatacagataatttgatgagctggataatttgatctgttgagttactgttggatcaaagtttgtatctgtatagaattcaattgtaagggtctgataaataccacctacagcccagtatttacgggtgctattcgcattattgcaactccaatataacacgtcttcgcttggattataccacgaaaaatattgttctgcagagtcaccaatgtatatcccaggtgaactaacgttagttacggtaccgtaagctgaccacatgtttgaaattaataatgtgtaatacaaaccaggaactgatgtattaaataatttatgggagccatacattttacctgagtcaaccattgcattttcaatacgcattgcgctaccacttgtgctatcacttctgttgcaataaagaaaaccaccaccagaagcggtatctaactgactccactgtaattttacacctgtaggtccaagctgcgtcggtttgtagaaaactaaattatttgtacttgttgcatatctgaatatgacagtagcatcgccattcggccccgtttctctccatttttgatctgacggaccaacgccgtaactattcccaacaatatatcctacgttatcatcagtgccagcactcgcggtataacaactcaagcacagaattaaaaaaagaaaatgtctgaagaatttcttcattatcactccaccatctactgctgtaacagtcgcagttatttgttttgatctattattcgtagtacacatcaactaatatatgactcattacctggccagatatgacatccagcgcgggatcgattttttgcattctggcataaaatttccatgaagaattatgcagggcagaagtcattactggatacacggaacgagaatttcctgctgaactaataacattgaatatattggtcgggtcctgaatggaaaagagaacgacaccgacatttttagccccggttgcgacttcattggcaaatatttgccttgaacctgcagccatgacaccgctaagggctctaaaatcaatatgtaactgattaagcacatcgccagttccctgtaatgcacagtctgatactgtgacagtgaactcttttccacctggttgatagctttcaggagtaacattatctgaaaaatatcccaccccaacgacgccaagatcaatattaccctggttactgattccgcttttgcaagtgctgttttttacattggcaacaaggtcaatatcctgcccagcgatggctggataggtaatgggaaactgtagtgacagaaacagaattattctcttcatcagcttacgttgagtgggatgcatatatagttcctggatctgtcagtctgttagttataggttactgtaaatgtggcaggtgcagaaaatttacccgcagtgacattgcttacggttttatttttttcgacgaccagtcgagcactcatcggataataaacaaccgcgttggctgcattggagatagtgacctcttgagatgctggtgtcacacaactaaattgtgttgcgctccctgttgccggagtttcggtgctccagacttcaacggcgacggcacttgctttatctgcggctgtggatccatttgcgaaccccgcaccgtcattagcagtaccttcgcatgtggctcgcttggttaattttatttgtgcttttttattggggatacccgcacagtctttgaatttgagtttgaatgttttaactttggtcttggcattgatttcagaaatatatacatcgccaaagtcaacaacagaaatgtcctgatcagagtcatttactaatgtagcagtacaagtacctatttctacggtagtaatcacggtcagcccaatgctgtctgttgccgcataagagggtacgctgaacaatgaggcagccaaaacgacactgctggataatccataacgtaaatttttaaatgtcatcttaattatccttcttattgatagatgaaattaaacgttgccagtgcacgaaaattccccggtacgccttgccctgcatctgtttcacgtagcgcaacggtcatttcaagacccttatcgggctgcatctcgtctgtgctccagcgtatcttttccgcactgttaggtttaaggaaagtggcatcatcagtagtccgttttttgaaacccataccgatattacttgtcgtcgaagatgaatcaccagactgcggtataataagcttaggtgagcttgatgatgcatttccggtcagagtggtatcaatccaactgatgccactgctgcacccactagcaaccagtttaaaatcagcctgagattctgtcgttttattcgcgatcttatccagacccatcttagggattctcaatgtgtagttattattgccatcattcgtgacgttattaccagtaagtgtgatgttacaggttgtcgctttgacagtggctgtaaactctacattaatatccgttgcaaatactgatggtgataataatattcccatcagtatcgctattttatgtggcgttatttttatcatttgacgtcccttgtagttactgaatctgacaccgaattccattcagaataatagattgcgctattttttctgcttctgaactttgttgataatgcgcaagacaacttacgggtttactttcttcgagccatttaatgctgatatttccctgctgctcaataccacgaacaaatgcttgtccaccctgtccaacattaccaatgacattgccttgctcatcataaatatctgcagcaaatggaatatttttaccatcacttcgtgtgatgttcataatggctgattgcccttgcacggtttcaaaatcagcaaagacgactgaaccctgacgcggtacagctactgcactggtactttttaattcaacatcgttctcaagatcgttgatatccagcgcgatacggttttcatgataaggagaaagagcgctggtgacaccataaccccatcgatcgatagtactgttgccataatttattcgcgctccttgagcacctggagcctgaactaccgccagtgtatcggagtcgctaaaactgtcattactgaaggtcaggccgccgctatgcaatacaaaaccaccgtcggtgctgagagacacttgacgactgttatcgctatttgcagaaactgaacctgccagggttccccacggtgattcatagctggcataacccccaacataactcaaatctttgctggctttattcatcgtatagccagtatttacgctataactgacgcgagcgttatcactatagccactgctactgacgttgagttggttattacccttaaagtcactgctcatttgagtatcaatactctggaaacctgaagtccgttgttcagtgccaagtaatttttcaataggaatggtgaaactgagataaacgctatcgtcagtgtcgccgtcttcattccatgaacgctgggcactgacactgtagctgccccaggatgcactgttactgtagccaatagagtaattgctacgattttgtccggaagcccagtaatcggaccaacttccggaaagataaaatgaaccgtaatcttttttctcaaattttagcggttggttaatactgaccgtaacctgatttttcatgcgcgagtaattacgcatggatttcggttcaagatcttgttcgggatgtttcacttcatcaattagagttagtgcatcattaagaccaaggtaattctgtgtcgaatagcgataggccgcgatattcagtgaagtacttgtttcttcgaataacttgttccaggaaacacgataactttgtccctgatatgttttatcatccggtatacgaacattggagtgagtcacatcgaaagaaaatgcaccgactgaagtattcagaccaagacctaacaaaccagcggtatagttattatcggtaatctgaataccagtataacccgttagatagttattcagaccgtagtagtagctggcctgaaataaattaggctcatcctgaatatcatcttttaagacctggccgccgctaatatcccaacgtccaacgccagggcgtaacatttgaacgaccgatgaaaaaggttgcgagaatgtccgctttgagccatcggattcttcgacagtaacaataagatcgctgccgtaacctgacggactcagatcatcaatgacgaaagcgcctggcggcacagtcgtttcataaatcttatagccaccttgcgtaatagtgactttggcgttggtattagcaacgccatgaatgataggcgcaaaactcgctaatgtcggaggcaacatgcggctgtcgctgtataaacgaatgccgcggatactgacagaatcaaaggtttcgcccgttgtataagactcaccaagaatgagttgagaacgcagcgaggcgatatcacgctgtatataccgatttttaaaatcataattactgccagaatcggtcatccagttgtagttgcctgaggcacgcagtcgccatgcacctaaattcatcccaccgttaaaagcagcataaatgctgtcatttcttcgaccaggagtttcactatgatatccgttgaggttgtatgacaacatggccgcattaatgccattttcccataacgatggatcaacatagttttggtaatttttcattacccatgcctgaggaacgtctatatccagacgttgctcgttaacgtcataacgaacagaagcctgagggataatttccgtcaaattaaggcaattgccgagtgtttcatccctggcaagcagaacggctttttcgttatttatatcgggagaatttatatgaaactgcaataaattcttaagtgtgatacaggcttgtgcgtttttttttccttcaatttcaataaatgtaatgctttggttaataataggttgatcgttgacataaacactgacgtcgtacatacccggtatagcagggttaccttcactataccggctgagatcaatatttgaggcattctgccccatcaggaaggtatggtcatattcaacaagttcagcacagaaagcactattgcaatacagcagcgcgcaaaacgtagcgatacgggtcagatgattatgataatttttagttggttttatagtcacgttatgcttcctgcggaattatatccttgcctgattacagactggcattaccttcaatggcgccaccaaaatcattaatggcgtaaaaatgtacttttgcagaacttgctttgccattaaggccagtgactttcatgacctcatcactaaatggtgcaatcattttcacatcaatcggatagcgtttaccgctagcttctaaatcaccactgctaaaagagacgtagtaaggggttggattggtcactcgcaatgacgccttaccttctgaacctgaccagaaccacttcagggctaacggggcttcagagggatttcccttcaatccatccgggcgatagaaaagttttatacgtgtgcgaaatgccagttgcagcagactttgattcgcgaccttttctgcatctggttttggtggaacttccagtacgttaaaccagaacacgctctctctgtctttaggcagtgaggtgctggctgtgtacattaatttgattgtttgcccacgtttggcatcaatacgcgatactggcggcgtggcagtaaaagggactgtaatactgccaggctcagcgttgtcatcgccagtatctaaccaactctggacaagcaacgggttattccctttattttccagacgtacgttgacacttttttgatcgcttttatatattacgcgagtacccgaaatgacaatgtccgcaatagacgatgaactaaaagccatacaggttacgaagcataaagctgttgtatgtttgatgttaaaaaacataaaccatccctgacagagttaattaaaacagggaataatataaaaatagaaattattaatactattccctgtatattcattcaatcaatttaattggtgaatacttactgataagtaatggtgtatgcagtgttagtttttacataaccagcagttgctgtttggtctgcgacggcacgaacgtaagacgctttaaaatcataaacagcagattttgtcgttgcatccagggctttagtatacacatcgccagggttgttaatttgaacctgtttgatagtggaaccatcaatattgtgcagagcgatattcacgccgtcagaagggttgttaatagacatgtcgttgttcagcgttcctttgctattaccaaagaaaacagaaccgaaggtcattttagctgtactacctggattcggatttgctttgctgcagtcaacggtgatgctgaaaggtttggctttagcgccaacggtgtcattcagcacgccagcatcgatttcaccaacagttgcagtttgcagcaggatcagaccatctttattaccgccgtcaacgcgggtttcacaggtgttatcaacaaccagaccactgatatttaactgaccaccatccatatcagcagaagcagtacctgcaaccattgccagcataagaccagacagggcaaaacctaattttttagacataaaaatccttgaataaaattccattagtcagactactggtttgaagaatgactattcatgacacaaatgttataagcagatgctagatattaatgagcaatgatatttgttaccaaaatttacaaccattgttcattaggacgcctattgtgcactttaagggcttttgaacaaattaaattttcttaattcaaaattaagcaaaaataaattcacaagtgcaattggttagggtatggcgatgggattgatatttatctgcgggaatttatattatgtttctgcaaaaatgtttaaactaaaatttttattaaggaaagagaggatgtatgattttcagaaaatatttatattcgtaatataaataaattaccatttgcttaatttgtcaaatgctcttgtatgtaagacttcacgcaacgtctccccatcaggaaacgccagctccggtgcaatctcaaacagcggccacagcataaatccacgattcttcatatcgtagtgcggaacggtcaggcgttcggtatttatcacttcattaccaaacagcatgatatcgagatccagcgtgcgtggtccccagcgttcagctttacgaacacgaccctgttgcagttctatgcgctgtgtatggttgagtaactcttccggggcgagcgaagtttcaagcgccacggcggcgttgaggtaatcgggttgatcttgcggccccagcggtggggtgcggtaaaacgaagaaacggcaagaatgtggctttcagggatatcgcctaatgctttcagggcagcattgacctgctccagcggagaggccagattgctgcctatggcaatatacgccactgtcatgcggtaccctcacgacgcggtgcgcgtttgcgtggacgacgagtacgacgacgcggtgacggttcttcatccagctcgttaagcatccctttttgatctggtggtgcggaaacctggaactcaccccaccatttcaccagacgctgcagttcagcattacgttcaacttcagctcgcaaggccaacaggtcataagccgcacggaacttaggatgctccagcagtttccatgcgcgtttaccctgacgacgggacatacgcaactgcaactgccagatatcgcgggttaacgtcgtcagacgtttcgggattgccagtgaacggcaggcttcgtccagcacgtcgttcatcgccagcgcgaaagcgtcgtgataggtcaggccgctttcctgggcaatcttctgtgccgtctccagcagtgggtaccagaacatggcggcaaacaggaacgccgggttcacgcgcatatcgttatggatacgcgtatcggtattcttcagcacctgttcaatgatccgctccatcgggctgtcgccattttccgtgaagtagcgggtaatggtcgggaacagcggctggaacagatgatattcacacaacagcttataggtatcgtaaccgtagcccgcttgtagcagtttaagcgattcttcaaacaggcgtgccggtgggatatcgttcaacagggtagcgaggcgagggatcggttctgcggtttccgggctgatgcgcatacccaatttggcggcaaaacgtaccgcgcgcagcatacgtaccggatcttcacggtagcgcgtttccgggttaccaatcagacggataacgccgtccttcagatccttcataccgccaacgtaatcacggacggtaaaatccgctacgctgtaatagaggctgttgatagtgaaatcgcggcgctgggcgtcttcttcgatggagccgaaaatgttgtcgcgcagcaacatgccgttttgcccgcgttgggaggtcgtgcggtcgctgacgttaccttcgtggtgtccacggaaggtcgcaacttcgataatctccgggccaaacatcacatgagccagacggaaacggcgacccaccaggcggcagttacggaacagtttgcgcacctgctcaggcgtggcgttagtggttacgtcaaaatctttcggctttttgccgagtaacaggtcgcgcacgccgccgccaaccagccaggcttcgtatcccgctttattgagcctgtacattaccttcagggcattttcactgatatctttgcgggaaatagcatgctgctcacgcgggatcaccgtcacctgtggacgggcgactgcctgttcagcctcgctttcctcgcggcttagcaccttgcggcaaaaattagcgactcgggtaaaaatagtacacctcggtagtgtcaaacatcattcaggacaaaaaaatagcggctaatcatagctcagcatgacgcatttgagaatgttgaatttacaattgccgactcgggcacggcggtaagccgccagtttttgacggctgactgaaggatttgctcgacgctgaaatcctgccagtgtgcttctgcctgctgccccagaaattgaagtgccgcgattagtaccgggcgtggatcgcctttcggcaacgcaggcgcatgattctgcttggaaagtttagcgccttgtggactaagcgccagcggcagatgaatgtaatctggcactttccagccaaaaagctggtacagcgagatttgccttactgttggttcaatcagatcagccccacgcactatttctgtaacgccctggaaatgatcatcaaccacaacagccaggttgtaggcgaacaacccatcacggcgatgaatgataaaatcttcccgtgccagtttttcgtcggcgtgaataatgccgcgcagctggtcagtaaattgcgtgaccggatgctgctggcggatacgcactgcggcattgtctggtccatgatgcaacacccggcaatgaccgtcgtaaataccgccaatgctttgaatacgcgcacgcgtacaggtgcagtaataacttagtccttgttcatgtaaccaggcgagtgcttcacgataggcgtggtgacgttgcgattgccagagaacatcgccgtcccagtgcagaccgtaatgttccagctggcgcaggatagtttctgcggcaccgggaacttcacgaggcgggtcgatatcttctatgcgtaccagccagcgaccttgccgggcgcgagcctgcaaatagctgccgagcgcggcgatcagagagccaaaatgaagctcgccggaaggagagggggcgaagcggccaatatactgtgtgtctgtcatctctttgaacaaaaaataaggcgggagcatttcccgcctgtggtaaacgtgatggaacggctgtaattagccagccatctgtttttcgcgaatttcagccagcgttttgcagtcgatgcacagatcggctgtcgggcgcgcttccagacggcgaataccaatttcaacaccgcaggattcgcagtagccgaaatcttcgtcttccacttttttcagcgtcttctcgatctttttgatcagcttacgctcgcgatcgcggttacgcagttcgaggctgaactcttcttcctgggctgcacggtctaccgggtccgggaagttggctgcttcatcctgcatatgtgtaacggtgcgatcgacttcatccctgagttgattacgccatgcttccagaatacgacggaagtgcgccagctgggcttcattcatatactcttcgcccggcttctcctgatatggttccaccccagcgatggcgagaatactcagggacgatgttttacggttttgcccttcttgcatgttgcttctccttaacacgcactatcgatccccatgttcgggggaaaaatgaggccgctataaatagcagatgcttttccggatagcaattatctaaacgtaacacttgacaactgtgtgaggaaaagcgtatttgcgcacgcgaccagaatgtaaattaaccagttacttactttactacaatgtaaccggcagtgattttttaagagccatgccttcagcagaaatttccgctttgtaagccagaatttctacccccctctgttgagcttctgacaatagttgcgcgtatttctcatcgatgtggcgcgcgggtgaaaaccgtgtaatggctgaatgcagcacggcgaaaaagataaccgcacgctggccttcagccgctacgctcatcaactcccgaaggtgtttctgacctcgttcagtgaccgcatcgggaaaatatccctgttcgttctccgctaacgtaaccgatttcacttcaatatagcagtctggacgcgaatccgcctgcaacataaagtcaatacggctgcgttctgcgccgtattttacttcgcttttcagcgagctatagcctgacagttctgaaattgattcattaaggatagcctctttcgtcaacctgttagcccaaagcgtgttgacgcaaataaatgcgccgctctggctttgagttaattcccaggtgtgtgggtatttccgtttggtgttgtctgaagtcgaataccagacggtatcgccaggcgttgcacaaccggtcattgcacccgtattcgggcagtgtagcgttaattcgcgaccatcgggtgtgatcacatcggctaaaaaacgtttgtaacgctgaattagcgtcgcgcgctgtagagggggagagaattccattgcgacaatccttgttattgcgttagcgcccagcgttttagcggcgtgtagcgtgtgcgtccacgggcaaacgaggaggcgtaaagggtgaactccgtcaccgcataagaccagttaaaacctggcggcgggattgtcaccgcctcgctggcgtcgcgcaataaggtaatatgtggatgaaacggacgattgctttgaaaacaaccgctgcgggcagcctgtgaacggagcatattcgccagctggattaagccgcgtggaggctgacgcatccctaaccacaccacacgcgaacgcagccattgtccggcgtcatcaagcgtgagtgtgaaaccaggttgacgaatccgtccggctaaaagagaaagcgccttctctttctcggcgctcacttcgcctaaaaatgccagagtcagatgcaaattatcggcggcgaccggacgtcccgcctcaggtgggaagtgtgtggcgcgccaatggataatctgttcgcggatttctgcaggtaagtcgatagcaaagaacagacgttgcggttcagacatgtgaggcactcggttatgaattaccgcgatgctacaatgtggcgcgaagaatgttaaccctctggagcgttttgtgtcgtcgttgcccgttgctgccgtcttatctgaattacttaccgctctcgattgtgcgccgcaggtattattaagtgcgccgaccggggccgggaaatcaacctggctgccgctgcaactgctggcgcatcccggcattaaagggaaaattatcctgctggagccgcgtcgtctggcggcgcgtaacgtcgcgcaacggctggcggagctgcttaacgaaaagccaggcgataccgttggctaccggatgcgtgcgcaaaactgcgtcgggccgaatacccgcctggaagtggttaccgaaggcgtgctgacgcgcatgatccagcgtgacccggaactgagcggtgttggactggtgatccttgatgaatttcatgagcgcagcttgcaggcggatttggcgttggcgctgttactcgatgtgcaacaaggtctgcgtgatgaccttaaactgctgattatgtcggctaccctggacaacgaccgcttgcagcaaatgctgccagaagcgcctgtcgtcatctcagaagggcgctcgtttccggttgaacgccgttatttaccgctgcccgcgcatcagcgttttgacgatgccgttgcggtagccaccgctgaaatgctgcgtcaggaaagcggatcattactgttatttttacctggcgtcggagaaattcagcgtgtgcaggaacaactggcttcgcgcatcggcagtgatgtattgctctgcccgctgtatggcgcgttgtcgctgaacgatcagcgaaaagcgatcctcccggcaccgcaagggatgcgcaaagtggtgctggcgaccaatattgctgaaaccagtttaaccattgaaggtattcgtctggtggtggattgtgcccaggagcgtgtggcgcgttttgatccgcgcacggggcttacgcgactgattactcaacgcgttagccaggcatccatgacgcagcgtgccgggcgcgccgggcgtctggagccgggtatctgcctgcatttaatcgccaaagaacaagcagaacgcgccgcggcgcaaagtgaaccggagatcttacaaagcgatctttccggtttgctgatggaattactgcaatggggatgcagcgatccggcgcagatgagctggctggatcaaccgccagtagtgaatctactggccgcgaaacgtctgttacaaatgctgggggcactggagggtgaacggcttagtgcgcaagggcaaaaaatggcagcgctgggtaacgatccgcgtttagcggcaatgctggttagcgcgaagaacgacgacgaagctgctaccgcggcaaaaattgccgccattctcgaagagccgccacggatgggcaatagtgacctgggcgtggcgttttcgcgcaatcaaccagcctggcagcaacgtagtcagcaactgttaaaacgcttaaacgtacgtggcggtgaggcagacagttcgcttatcgcgccgctacttgccggggcgtttgccgatcgcattgctcgtcgccgtgggcaagatggacgctatcaactggcaaacggcatgggagcgatgctcgatgccaacgacgcgctaagccgccacgaatggttgatcgcaccgttattattgcagggcagcgcctcgccggatgcgcggattttactggcgctgctggtcgatattgatgagttagtacaacgctgcccgcagctggtacagcagtctgacactgtggagtgggatgacgcgcaaggtacgctgaaagcctggcgtcggctacaaatcggtcagttgacggtgaaagtgcagccgctggcgaaaccgtcagaagacgagttgcatcaggcgatgcttaatggcatccgtgataaaggtttaagcgtgctcaactggacggcggaagcggaacagctacgcttgcgtttgttatgcgccgcaaagtggttgccggaatatgactggccagcggttgatgatgaaagtttattggcagcgctggaaacgtggctgctgccacatatgactggcgtacattcactacgcggcctgaaatcactcgacatttatcaggcactacgcggattacttgattggggaatgcagcaacgtctggatagtgaattgcctgcgcattacactgtgccgacgggaagccggatcgccattcgttatcatgaagataacccgcccgcgctggcggtgagaatgcaagagatgtttggcgaggccaccaatccgacgatcgcccaggggcgcgtgccgctggtgctggagttgctttcacctgcccaaaggccgctgcaaatcacgcgtgatttgggggccttctggaaaggggcgtatcgtgaggtgcaaaaagagatgaaagggcgttatcccaaacatgtctggccggacgacccggcaaatactgcaccgacgcgacggacgaaaaagtattcgtaaggttggttttctccctctccctgtgggagagggccggggtgagggcatcagcgcgcacgttcaccctcaccctaaccctctccctcaagggagaggggaccgatcgagcacaaattttgagagatatcttcttctgtcttgtaacagaagaacagaaaatcgggcttttgcgcctgaatattgcggagaaaaagcatggccgggaatgaccgcgagccaattggacgcaaagggaaaccgacgcgtccggtcaaacaaaaggtaagccgtcgtcgttacgaagatgacgatgattacgacgattatgatgactatgaggatgaagaaccgatgccgcgcaaaggtaagggcaaaggcaaagggcgtaagcctcgtggcaaacgcggctggctatggctactgctaaaactggctatcgtttttgccgtgctgatcgccatttacggcgtttatctcgatcaaaaaattcgtagccgtattgatggcaaggtctggcaactgcctgcggcagtttatggccgaatggtcaatcttgagccagacatgaccatcagcaagaacgagatggtgaagctgctggaggcgacccagtatcgtcaggtgtcgaaaatgacccgtcctggcgaatttaccgtgcaggccaacagcattgagatgattcgccgtccgtttgatttcccggacagtaaagaaggacaggtgcgcgcgcgtctgacctttgatggcgatcatctggcgacgatcgtcaatatggagaacaaccgtcagttcggtttcttccgtcttgatccgcgtctgatcaccatgatctcttcgccaaacggtgagcagcgtctgtttgtgccgcgcagtggtttcccggatttgctggtggatactttgctggcgacagaagaccgtcatttttacgagcatgatggaatcagtctctactcaatcggacgtgcggtgctggcaaacctgaccgccggacgcacggtacagggtgcgagtacgctgacgcaacagctggtgaaaaacctgttcctctccagcgagcgttcttactggcgtaaagcgaacgaagcttacatggcgctgatcatggacgcgcgttacagcaaagaccgtattcttgagctgtatatgaacgaggtgtatctcggtcagagcggcgacaacgaaatccgcggcttcccgctggcaagcttgtattactttggtcgcccggtagaagagctaagcctggaccagcaggcgctgttagtcggtatggtgaaaggggcgtccatctacaacccgtggcgtaacccaaaactggcgctggagcgacgtaatctggtgctgcgtctgctgcaacagcaacagattattgatcaagaactctatgacatgttgagtgcccgtccgctgggggttcagccgcgcggtggggtgatctctcctcagccagcctttatgcaactggtgcgtcaggagctgcaggcaaaactgggcgataaggtaaaagatctctccggcgtgaagatcttcactacctttgactcggtggcccaggacgcggcagaaaaagccgccgtggaaggcattccggcactgaagaaacagcgtaagttgagcgatcttgaaactgcgattgtggtcgtcgaccgctttagtggtgaagttcgtgcgatggtcggaggttctgagccgcagtttgcgggctacaaccgtgcgatgcaggcgcgtcgttcgattggttcccttgcaaaaccagcgacttatctgacggctttaagccagccgaaaatctatcgcctgaacacgtggattgccgatgcgccaatcgcgctgcgtcagccgaatggccaggtctggtcaccgcagaacgatgaccgtcgttatagcgaaagcggcagagtgatgctggtggatgcgttgacccgttcgatgaacgtgccgacggtaaatctggggatggcgctggggctgcctgcagttacggatacctggatcaaactgggcgtaccgaaagatcagctgcatccggttccggcgatgctgctgggggcgttgaacttaacgccaatcgaagtggcgcaggcgttccagaccatcgccagcggtggtaaccgtgcaccgctttctgcactgcgttcggtaatcgcggaagatggcaaggtgctgtatcagagcttcccgcaggcagaacgcgctgttccggcgcaggcggcgtatctgacactatggaccatgcagcaggtggtacaacgtggtacgggtcgtcagcttggggcgaaatacccgaacctgcatctggcagggaaaacagggactaccaacaataacgtagatacctggtttgcaggcattgacggcagcacggtgaccatcacctgggtaggccgtgataacaaccagccgaccaaactgtatggagccagcggggcaatgtcgatttatcagcgttatctggctaaccagacgccaacgccgctgaatcttgttccgccagaagatattgcagatatgggcgtggactacgacggcaactttgtttgcagcggtggcatgcgtgtcttgccggtctggaccagcgatccgcaatcgctgtgccagcagagcgagatgcagcagcagccgtcaggcaatccgtttgatcagtcttctcagccgcagcaacagccgcaacagcaacctgctcagcaagagcagaaagacagcgacggtgtagccggttggatcaaggatatgtttggtagtaattaacatctaagcgtgaaataccggatggcgagttgccatccggtaaaataacatcccatctaagatattaaccctttcttttcatctggttgtttattaacccttcaggaacgctcagattgcgtaccgcttgcgaacccgccagcgtttcgaatattatcttatctttataataatcattctcgtttacgttatcattcactttacatcagagatataccaatggcgcgttccaaaactgctcagccaaaacactcactgcgtaaaatcgcagttgtagtagccacagcggttagcggcatgtctgtttatgcacaggcagcggttgaaccgaaagaagacactatcaccgttaccgctgcacctgcgccgcaagaaagcgcatgggggcctgctgcaactattgcggcgcgacagtctgctaccggcactaaaaccgatacgccgattcaaaaagtgccacagtctatttctgttgtgaccgccgaagagatggcgctgcatcagccgaagtcggtaaaagaagcgcttagctacacgccgggtgtctctgttggtacgcgtggcgcatccaacacctatgaccacctgatcattcgcggctttgcggcagaaggccaaagccagaataactatctgaatggactgaagttgcagggcaacttctataacgatgcggtcattgacccgtatatgctggaacgcgctgaaattatgcgtggcccggtttccgtgctttacggtaaaagcagtcctggcggcctgttgaatatggtcagcaagcgtccgaccaccgaaccgctgaaagaagttcagtttaaagccggtactgacagcctgttccagactggttttgactttagcgattcgttggatgatgacggtgtttactcttatcgcctgaccggtcttgcgcgttctgccaatgcccagcagaaagggtcagaagagcagcgttatgctattgcaccggcgttcacctggcgtccggatgataaaaccaattttaccttcctttcttacttccagaacgagccggaaaccggttattacggctggttgccgaaagagggaaccgttgagccgctgccgaacggtaagcgtctgccgacagactttaatgaaggggcgaagaacaacacctattctcgtaatgagaagatggtcggctacagcttcgatcacgaatttaacgacacctttactgtgcgtcagaacctgcgctttgctgaaaacaaaacctcgcaaaacagcgtttatggttacggcgtctgctccgatccggcgaatgcttacagcaaacagtgtgcggcattagcgccagcggataaaggccattatctggcacgtaaatacgtcgttgatgatgagaagctgcaaaacttctccgttgatacccagttgcagagcaagtttgccactggcgatatcgaccacaccctgctgaccggtgtcgactttatgcgtatgcgtaatgacatcaacgcctggtttggttacgacgactctgtgccactgctcaatctgtacaatccggtgaataccgatttcgacttcaatgccaaagatccggcaaactccggcccttaccgcattctgaataaacagaaacaaacgggcgtttatgttcaggatcaggcgcagtgggataaagtgctggtcaccctgggcggtcgttatgactgggcagatcaagaatctcttaaccgcgttgctgggacgaccgataaacgtgatgacaaacagtttacctggcgtggtggtgttaactacctgtttgataatggtgtaacaccttacttcagctatagcgaatcgtttgaaccttcttcgcaagttgggaaggatggtaatattttcgcaccgtctaaaggtaagcagtatgaagtcggcgtgaaatatgtaccggaagatcgtccgattgtagttactggtgccgtgtataatctcactaaaaccaacaacctgatggcggaccctgagggttccttcttctcggttgaaggtggcgagatccgcgcacgtggcgtagaaatcgaagcgaaagcggcgctgtcggcgagtgttaacgtagtcggttcttatacttacaccgatgcggaatacaccaccgatactacctataaaggcaatacgcctgcacaggtgccaaaacacatggcttcgctgtgggctgactataccttctttgacggtccgctttcaggtctgacgctgggcaccggtggtcgttatactggctccagctatggtgatccggctaactcctttaaagtgggaagttatacggtcgtggatgcgttagtgcgttatgatctggcgcgagtcggcatggcgggctccaacgtggcgctgcatgttaacaacctgttcgatcgtgaatacgtcgccagctgctttaacacttatggctgcttctggggcgcagaacgtcaggtcgttgcaaccgcaaccttccgtttctaatttctcttttggggcacggatttccgtgcccatttcacaagttggctgttatgcaggaatacacgaatcattccgataccacttttgcactgcgtaatatctcctttcgtgtgcccgggcgcacgcttttgcatccgctgtcgttaacctttcctgccgggaaagtgaccggtctgattggtcacaacggttctggtaaatccactctgctcaaaatgcttggccgtcatcagcctccgtcagaaggggagattcttcttgatgcccagccgctggaaagctggagcagcaaagcgtttgcccgcaaagtggcttatttgccgcagcagcttcctccggcagaagggatgaccgtgcgtgaactggtggcgattggtcgttacccgtggcatggcgcgctggggcgctttggtgcggcagatcgcgaaaaggtcgaggaagctatctcgctggttggcttaaaaccgctggcgcatcggctggtcgatagtctctctggcggcgaacgtcagcgggcgtggatcgccatgctggtggcgcaggatagccgttgtctgttgctcgacgaaccgacttcggcgctggatatcgcccaccaggttgatgtgctggcgctggtgcaccgtttaagtcaggaacgtggcctgacggtcattgccgtgctgcacgatatcaatatggcggcacgctactgtgattatctggtcgccctgcgcagtggtgaaatgattgctcagggaacgcctgcggaaattatgcgcggcgaaaccctcgaaatgatttatggcatcccgatgggtattttgccgcatccggcgggtgctgcacctgtgagttttgtttattgatgagcggcttacctcttatttcgcgccgtcgactgttaacggcgatggcgctttctccgttgttatggcagatgaataccgcccacgcggcggctattgaccccaatcgtattgtggcgctggagtggttgccggtggaattactgctggcgctcggcatcgtgccttacggcgtggcggataccatcaactatcgcctgtgggtcagcgaaccaccattgccggactcagtgattgacgtcggtttgcgtacagaacctaaccttgaactgctgaccgaaatgaaaccgtcgtttatggtctggtcggcaggatatggcccttcatcagaaatgctggcacgtattgcgccgggtcgcggatttaacttcagtgacggcaaacagccgttggcgatggcgcgtaaatcgctgacggaaatggcagatttacttaacctgcaaagcgcagcagaaacgtatttagcgcactatgaagactttatccgcagcatgaaaccccgctttgtgaagcgtggtgaacgcccgttattgctgacgacgcttatcgatccgcgccatatgctggttttcggtccaaacagcttgtttcaggaaattcttgatgagtacggcatcccaaatgcctggcaaggggaaaccaacttctggggcagtaccgccgtcagcatcgatcgtctggcggcgtataaagatgttgatgtgctctgttttgatcacgacaacagcaaagacatggacgcgctaatggcaaccccgctgtggcaggccatgccgtttgtccgcgccggacgctttcagcgcgtacccgcagtctggttttatggtgcgacgctctcggcaatgcactttgtgcgcgttctggataacgccatcggaggtaaagcgtgagtaaacgaattgcgctttttccggcgttattgctggcgctgctggtgattgtcgctacggcgctgacctggatgaacttttcgcaggcgctgccgcgtagccagtgggcgcaggccgcctggtcgccggatattaacgtcatcgagcagatgatttttcactacagcttgttaccacgtctggcgatttctctactggtgggcgcgggcctggggctggtgggcgtgctgtttcagcaagtgctgcgtaacccgctggcggaaccgacgacgttgggcgttgctacaggcgcgcaactggggattaccgtcaccacgctctgggcgatcccaggtgctatggcgagccagtttgctgcgctggcaggggcttgcgttgttggcttaattgtctttggcgtcgcgtgggggaaacggctgtcgccggtaacgctgattctcgcggggctggtagtgagcctttattgtggggcaatcaatcagttactggttatcttccatcatgaccagttgcaaagcatgttcctgtggagcaccggaacgctgacgcaaaccgactggggcggcgttgagcgtttatggccgcagttgctgggcggcgtgatgctgacgttactgctacttcgtccgttaaccctgatggggcttgatgatggcgtggcgcgcaatctcgggctggccttgtcgctcgcgcgtctggcggcgctgtcgctggcgatagtcatcagtgcgctgctggtgaacgcagtggggattatcggctttatcgggttgttcgcgccactgctggcaaaaatgctgggggcgcggcgtttgttgccacggttgatgctggcgtcgctgattggtgcgttaattctgtggctttctgatcaaatcatcctctggctgactcgcgtgtggatggaagtttccaccggttcggtcactgcgttgatcggtgcgccgctgctactgtggctgctgccgcgtttacgcagcattagcgcgccggatatgaaggtcaacgatcgtgtcgcgactgaacgccaacatgtgctggcgtttgccctcgcgggcggcgtgctgctgttgatggctgtggtagtggcgctgtcgtttggtcgtgatgcgcacggctggacgtgggcgagcggggcgttgctcgaggatttaatgccctggcgctggccgcgaattatggcggcgctgtttgcgggcgtcatgctggcggtagcgggctgtattattcagcggctgaccggcaacccgatggcaagcccggaagtgctggggattagctccggcgcagcgtttggcgtggtgttgatgctgtttctggtgccgggtaatgcctttggctggctgttacctgcaggcagtctcggggcggcggtgacgctgttgatcattatgatcgccgccggacgcggtggattttccccacaccgcatgttactggcggggatggcgttaagtaccgcgttcaccatgcttttgatgatgttgcaggcaagtggtgacccgcgaatggcgcaagtgctgacctggatttccggttcgacctacaacgcgaccgatgcgcaggtctggcgcacgggaattgtgatggtaattttgctggcgattaccccgctgtgccgccgctggctgaccattttaccgctgggtggtgataccgcccgagccgtaggaatggcgctgacgccgacgcgaattgcgctgctgctgttagcggcttgcctgacggcgaccgcgacgatgactattggaccgttgagttttgttggtttaatggcaccgcatattgcgcggatgatgggctttcgacggacgatgccacacatcgtaatttcggcgctggtgggtggtttactgctggtgttcgctgactggtgtgggcggatggtgctgtttccattccagatcccggcggggctgctgtcaacctttatcggcgcgccatattttatctatttgttgagaaagcagagccgttaatagaatgcctcgcccggtgggcgaggcaaaatcatcacaacttcgcaaacacccgacgtgcagcatcgatggtgttattgatatcttccatgctgtgcgccacggacataaagcccgcttcaaacgctgacggtgccaggtaaacaccttcgtccagcatcatatggaagaaacgcttaaagcgttccacgtcacaggccatcacatcctgatagcacgtcacggactcggcgtcggtaaagaaaataccgaacatgccgccaacgtggttaacgaccagcggaattccggcttcttctgccgcttccagcagaccttctgccagacgtgttgtcagctcatccagcgtttcgtgaacgcccggctgcgcgacttcattcagacaggcgaaacccgctgccatcgcaattgggttaccggaaagcgtacccgcctgatagaccggacccgtcggggccagcgcatccattacatcacgacgaccaccgaatgcgcctaccggcattccaccgccgatgatttttccgaggcaggttaaatctggcactacgccgtaataatcctgtgcaccagccagtgccacgcggaagccagtcattacttcatcgatgatcagcaatgcgccaaattcgtcgcacagcgcgcgcagacctggcaggaactctggcagcggcggaacacagttcatattgcctgccaccggctcaacgataatacaggcaatctcttgcgggtattgctcaaacgcggcgcgtacagaagccagatcgttataagtacaggttaaggtatgtttggcgaaatctgccggaacacccggcgagtttggctggcctaacgtgagtgcgccagaaccggctttcaccagcaggcagtcagcgtgaccgtggtaacaaccttcaaatttaatgattttgtcgcgaccggtaaaaccacgggccaggcggatggcgctcatggtcgcttcagtgccggagttcaccatgcgcaccatatccatggtcgggaccagttcggtcaccagttgcgccattttcacttccatttcggttggtgcaccaaagcttaaaccacgctcggcggcttcaatcacggcattgcggattgccggatggttatggcccagcaccatcggcccccaggaaccgacataatcgatataggctttgccatcaacatcgtacagataagcgccgtccgctttttcgataaacagtggagtgccgcccacgccagtaaaggcgcgaacaggggagttcacaccgccagggatcagctcgcgcgctgcgctgtaaagattttcagacttactcatggagggttcctgattcgtagaaaaagtgaatggctgctattctatgttattcataacaagttaaatactcgtcaaacatcaggctgcttgtactggtgcaatcctgatttcttagagtataaaagttttgtgcatttgaaacattacgctttgcaaaggattttcatggaacgtgcgagtaaaatgccgtcatcttatttgtatgaccaataagtgatcattggatgaaaactgatactccctctttagaaacaccgcaggccgcgcgcctgcgacgcagacaactgattcgccaacttcttgagcgcgataaaaccccgttagccattttgtttatggcggcagtcgtcggcacgcttgtcgggctggcagcggttgcttttgacaaaggtgtcgcctggttgcagaaccaacgtatgggggcgctggtacatactgctgataattatccgctactgttaaccgtcgcttttctctgttcggcggtgctggcgatgttcggctactttttggtgcgcaaatacgcgcccgaagcagggggatcggggatcccggaaattgaaggggcgctggaagatcaacgtcctgttcgctggtggcgtgtattgccggtgaaattctttggcgggctggggacactcggcggaggcatggtgctagggcgcgaaggaccaaccgtgcagatcggcggcaatatcggtcgcatggtgcttgatattttccgcctgaaaggtgatgaagctcgccatacgctgctggcaaccggtgctgctgcggggctggctgcggcctttaacgcgccgctggcgggtattttgtttattatcgaagagatgcgtccgcagtttcgctatacgttaatttcgattaaagcggtatttattggcgtcattatgtcgaccattatgtaccggatttttaatcatgaagttgcgttgattgacgtcggtaaactttctgatgcgccgcttaatacgctgtggctttatctgatcctcggtattatttttggcattttcggccctatttttaataaatgggtgctggggatgcaggatttgctgcaccgtgtgcacggcggcaatattaccaaatgggtactgatgggtggtgcgattggcggtctgtgtggattgctggggtttgtggcaccagcaacgtcgggcggcggttttaacctgattcctatcgctaccgcggggaatttcagcatgggaatgctggtgtttatcttcgtcgctcgggtcattaccaccttactctgcttctcttccggcgcgccgggcggtatttttgccccgatgctggcgctgggtactgtgctgggaaccgctttcggaatggttgccgttgagctgtttccgcaatatcacctggaggcggggacgtttgctattgccggaatgggggcattactggcggcatctattcgcgcgccgttaacggggatcattctggttctggagatgaccgataactaccagctcattttgccaatgattattaccggtcttggcgcaacactattagcgcaatttaccggcgggaaaccgctatactcggcgattcttgcgcgcacgctggcaaaacaggaagctgagcaactggcgcgaagcaaggctgcatcagccagcgagaatacttgaacgaaataccagggtattagataatggcgattattattgggttagaatttgcccaattgccgatgtcgtttggagcaaaatatgagtgatgacgtagcactgccgctggagtttaccgacgcagcagccaacaaagttaaaagcctgatcgctgacgaagataacccgaatctgaaattacgcgtgtatatcaccggtggcggttgcagcggcttccagtatggtttcacctttgatgatcaggtgaacgaaggcgatatgaccatcgaaaaacagggcgttggcctggtggttgatccgatgagcctgcaatatctggtcggcggttccgttgactacaccgaaggactggaaggttctcgtttcatcgtgaccaacccgaacgcgaaaagcacctgcggttgcggttcttcctttagcatctaatctgttgttcatgtgccggataaactatccggcacatcttctctcttcaacgcccattctcatccagcgcaaacgtcggtagcttaagatgccaacgaatagccgccagccgaatcaatagcgtcacgaccatgcccatcatactggctgtttccagtggtacggaaaatgtgtaataagccgtagcgtggacaataccgccgataatacaggcagttgcgtagatttctgtacgtaaaatcatggggatctcgcgggccagtacatcacgaatgatcccgccgccaacgccagtaatgacgcccatacaaaccgcgattaacggaccggcttccgcattaaaggctttattcacgccaatgccgacaaacaccgccagaccaacggcgtccagcaccggcaacatccattttggtaagcgtcttggctggcgcaccagcacgatggtcagcatgctggtgaccattgcaacgaccagatcggtgggatctttcacccaaaataccgggccgtgatccagcgccatgtcgcgaattgttccgccgcctactgcggtaaccacgcccagtaccagaacaccaaaagggtccatacgcaattttccggctaacaaaacgccggagatggcaaataccgctgtgccgactatatccagccaatagacgagcattgttcaatccccactgagcacctgaaaaggtcaggcactaatctacctgtgaaagcgcattacagagctgttgtgcagcgaggataatacgtgggcttgcacgttcaaaccagtcactcgtgagaggaataacgggaattttgagctgttcaccccagtattgtttgattttaggaatttggtccggtccgcctgtaatgacaatcgcctgtggcgagcgtgctaacacctgttcgcggctaacttgcggccagggaacccggctgtctttaaagatgttttctccgccacaaacttcgagtacctggttctgaatcgactcttttccactggtaaatggcggattaatgccgaattgcagaaaaacacgttttttaggtttatcagcatattgcgctttcaattgcgcgtactgatccagcagggattgcgcggcttgttcggccttgtctggttgcggactccagggggccagttgacgtaacgcattggcaatttgttcaatgcttgtcgcatcgacccacatcacttttattcccagcgaagccagctggtcaacctgccgctcggcattacctccacgccaggcaatcaccagatcgggcttcagcgcgacaatgcgttccagattcatcccctgccaggtggaaacctgctcaatcttttgcgcttgtggaggatagtcggaatagctgctgaccccaaccggcgtgatcccggcagcaaaggcaagttcagtgttggcgggagaaagcgtgatgacgcgcggcgcggcgttgagccacagtggcgcaagaaaagacagggcgaccagcgccctgaacagtgacttagccatgtgcaagtttctgcaccagtgactcaaccatcaggctggactgtttagcggcaacagccaggaactcatcgaagctaagatgagactgttgatcggccacgtcggagatggcgcgtacgacaacaaacgggacgttgaaattgtggcagacatgggcgattgccgtcgcttccatctctacagcaatggcctgtgggaagttgtggcggattttcgccagaccaacagaaccgttgatgaaagcgtcgccgctaacaatcaggccacgtacagcgttaagattcagttcggcaaggcaggcctcagcggcagcgatcagtttatcgtcagctttaaagcctgccggacagcctggtaactgaccgtattcataaccaaatgccgtgacatccgcgtcgtgataacgtgcttcgtccgagacaacgatatcgcccactttcaacgttggtgccaggccaccggcagaaccggtgttaataatcacatctggcttgcagtgttccaacagcaaagtggcacccagcgccgcagcgactttaccgatgcccgatttcagaagcgcaacctcggttccattcagttggccggtatagatttcgcaaccgccgagactgatagtttgacggttttcgattttgtcacgcagcagcgtaacttcttcttccattgcaccaatgatgccgattttcatagatttactcgcgataagcccgatttgaaggcatagtttaccatgcgcttacggggaagcgtatttctcacgcgggagaggacatggcacagattgatttccgaaaaaaaataaactggcatcgtcgttaccgttcaccgcagggcgttaaaaccgaacatgagatcctgcggatcttcgagagcgatcgcgggcgtatcatcaactctccggcaattcgtcgtctgcaacaaaagacccaggtttttccactggagcgcaatgccgccgtgcgcacgcgtcttacccactcgatggaagtccagcaggtggggcgctacatcgccaaagaaattttaagccgtctgaaagagcttaaattgctggaagcatacggcctggatgaactgaccggaccttttgaaagcattgttgagatgtcatgcctgatgcacgatatcggcaatccgccgtttggtcattttggcgaagcggcgataaatgactggtttcgccagcgtttatacccggaagatgccgaaagccagcctctgactgacgatcgctgcagcgtggcggcactacgtttacgggacggggaagaaccgcttaacgagctgcggcgcaagattcgtcaggacttatgtcattttgaggggaatgcacaaggcattcgtctggtgcatacattgatgaggatgaatctcacctgggcacaggttggcggtattttaaaatatacccgtccggcgtggtggcgtggcgaaacgcctgagacacatcactatttaatgaaaaagccgggttattatctttctgaagaagcctatattgcccggttgcgtaaagaacttaatttggcgctttacagtcgttttccattaacgtggattatggaagctgccgacgacatctcctattgtgtggcagaccttgaagatgcggtagagaaaagaatatttaccgttgagcagctttatcatcatttgcacgaggcgtggggtcagcatgagaaaggttcgctcttttcgctagtggttgaaaatgcctgggaaaaatcacgctcaaatagtttaagccgcagtacggaagatcagttttttatgtatttacgggtaaacaccctaaataaactggtaccatacgcggcacaacgatttattgataatctgcctgcgattttcgccggaacgtttaatcatgcattattggaagatgccagcgaatgcagcgatcttcttaagctatataaaaatgtcgctgtaaaacatgtgtttagccatccggatgtcgagcagcttgaattgcagggctatcgggtcattagcggattattagagatttatcgtcctttattaagcctgtcgttatcagactttactgaactggtagaaaaagaacgggtgaaacgtttccctattgaatcgcgcttattccacaaactctcgacgcgccatcggctggcctatgtcgaggctgtcagtaaattaccgtcagattctcctgagtttccgctatgggaatattattaccgttgccgcctgctgcaggattatatcagcggtatgaccgacctctatgcgtgggatgaataccgacgtctgatggccgtagaacaataaccaggcttttgtaaagacgaacaataaatttttaccttttgcagaaactttagttcggaacttcgcgctataaaacgaatctgaagaacacagcaattttgcgttatctgttaatcgagactgaaatacatgaaaaaaaccacattagcactgagtgcactggctctgagtttaggtttggcgttatctccgctctctgcaacggcggctgagacttcttcagcaacgacagcccagcagatgccaagccttgcaccgatgctcgaaaaggtgatgccttcagtggtcagcattaacgtagaaggtagcacaaccgttaatacgccgcgtatgccgcgtaatttccagcagttcttcggtgatgattctccgttctgccaggaaggttcaccgttccagagctctccgttctgccaggggggccagggcggtaatggcggcggccagcaacagaaattcatggcgctgggttccggcgtcatcattgatgccgataaaggctatgtcgtcaccaacaaccacgttgttgataacgcgacggtgattaaagtccagctgagcgatggtcgtaagttcgacgcgaagatggttggcaaagatccgcgctctgatatcgcgctgattcagatccagaacccgaaaaacctgaccgcaattaagatggcggattctgatgcactgcgcgtgggtgattacaccgtagcgattggtaacccgtttggcctgggagagacggtaacttccgggattgtctctgcgctggggcgtagcggcctgaatgccgaaaactacgaaaacttcatccagaccgatgcagcgatcaaccgtggtaactccggtggtgcgctggttaacctgaacggcgaactgatcggtatcaacaccgcgatcctcgcaccggacggcggcaacatcggtatcggttttgctatcccgagcaacatggtgaaaaacctgacctcgcagatggtggaatacggccaggtgaaacgcggtgagctgggtattatggggactgagctgaattccgaactggcgaaagcgatgaaagttgacgcccagcgcggtgctttcgtaagccaggttctgcctaattcctccgctgcaaaagcgggcattaaagcgggtgatgtgatcacctcactgaacggtaagccaatcagcagctttgccgcactgcgtgctcaggtgggtactatgccggtgggcagcaaactgaccctgggcttgctgcgcgacggtaagcaggtcaacgtgaatctggaactgcagcagagcagccagaatcaggttgattccagctccatcttcaacggcattgaaggtgctgagatgagcaacaaaggcaaagatcagggcgtggtagtgaacaacgtgaaaacgggcactccggctgcgcagatcggcctgaagaaaggtgatgtgattattggcgcgaaccagcaggcagtgaaaaacatcgctgaactgcgtaaagttctcgacagcaaaccgtctgtgctggcactgaacattcagcgcggcgacagcaccatctacctgttaatgcagtaatctccctcaaccccttcctgaaaacgggaaggggttctccttacaatctgtgaacttcaccacaactccatacatcttcatcatcctttgggcatttgcacaatgccgtacgttacgtacttccttatgctaagccgtgcataacggaggacttatggctggcatcttgataccaaaatggcgcaggatatcgtggcacgtaccatgcgcatcatcgataccaatatcaacgtaatggatgcccgtgggcgaattatcggcagcggcgatcgtgagcgtattggtgaattgcacgaaggtgcattgctggtactttcacagggacgagtcgtcgatatcgatgacgcggtggcacgtcatctgcacggtgtgcggcaagggattaatctaccgttacggctggaaggtgaaattgtcggcgtaattggcctgacaggtgaaccagagaatctgcgtaaatatggcgaactggtctgcatgacggctgaaatgatgctggaacagtcgcggttgatgcacttgttggctcaggatagccgtttgcgggaggaactggtgatgaacctgattcaggcagaggagaatactcccgcacttactgaatgggcgcaacggctggggatcgatctcaatcaaccgcgagtggtggctattgttgaggtcgacagcggtcagcttggtgtggacagcgcaatggcggagttacaacaactgcaaaacgcgctgactacgcccgagcgtaataatctggtggcgattgtctcgctaaccgaaatggtggtgttgaaaccggcgttgaactcttttgggcgcagggatgcagaagatcatcgtaagcgagttgaacaactgattacccgcatgaaagagtacggccagctgcgttttcgcgtttcactgggcaactattttaccggtcctggcagtattgcccgatcctatcgtacggcgaaaacgacgatggtggtgggtaaacagcggatgccagaaagtcgctgctatttttatcaggatctgatgttacctgtgttactcgacagtttgcgtggcgactggcaggccaacgaactggcgcgaccgctggcgcggctgaaagcgatggacaataacggcttgctgcgacgaacgctggcggcgtggtttcgtcacaatgtgcaaccgctggcaacgtcaaaggcgttgtttattcatcgtaatactctggagtatcggcttaatcgtatatcggaactgaccgggcttgatttgggtaattttgatgacaggttgctgctgtatgtggcgttgcagctggatgaagagcggtaggttatgcgttaaggtcgaggcggcgctggctcattcccctcagcccgaagggtagaggggaatgtccgagttaaccgtcagttcggcattatttacgcgttagtttttccagatcggcttcaatctcgctgatcttattggttacgactgactccaggtgacgtaagtcgtcgaggatcttacgcttaagatcaacttcgctgcggtcacgctggcagatttgatcaagctcatcaatgatataccgtagattcgggctgatttcctggacttctttataaccctgacccacaccatcagcgacgaccgttttacgctgacgcggatatttaaacttaacgctcttggcgaaaaactcgcctttgtctttctggaaatagattttcagaatatcgttgttggcttcctgccggaggctgtaacgatcaatttcttcaggattggtaatacccagacttttcagattgtcgtacatagcgttacctcaaaatgagtcagtaaattgtgcttattttagcatttggcctggcccgcccggctcgactgtgatcgcagaaagcctttttcttccagacttctatcatggcgtaaaaatcaaaaaattacctgctttattgtggcgatattccatgggatggattagcacatttatcttcgttttgcgaattacatgacagtccgaaacaagatgaaaaagtatttaaaaaaggggggaagaatgagtaggtcgaattattctgagccagaaagcatacgggcagcattatgctgcccgtatatgtactcttaatcgatggtacgcagcagttcgttaatgccgactttgccgcgagttttcgcgtcaactttcttaacgataaccgcacagtagaggctgtatttgccatctttcgacggcagattacctgaaacaaccacagaccccgccggaacgcgaccgtagtggatttcgccggtttcacggtcgtaaatacgggtgctctgaccaatgtatacgcccatagagatgacggaaccttcttcgacaatcaccccttcaaccacttcggagcgtgcgccaatgaagcagttatcttcaataatggtcgggttagcctgcagcggctccagcacgccgccgatgcccacgccaccggaaaggtggacgtttttaccaatctgcgcacaagaaccgacggtcgcccaggtatcaaccatcgtgccttcatcaacatatgcgccgatgttgacgtaagacggcatcagcacggtgttacgggcaataaatgcaccctgacgtaccgccgctggtggcacaacgcggaagccttctttctgaaaacgcgcttcgtcgtagtcggcgaatttcatcggcactttatcgaagtagcggctttctgccccttcgatcacctgattatcattaatacggaaagagagcagcaccgcttttttcaaccactgatgcgtcacccactgaccgtcaattttttccgctacacgcagtgcgccggaatccagcagggcgatcacctgatttaccgcttcgcgggttacggtgtctgcattggctggcgtgatctcggcacggcgttcaaaagcggtttcaataatgttctgtaactgctgcattgttaaactcttttcatatcagtaaacacatcaccctttatcgtttggattgagggcctctgtcaaccgctgatgcacttcctgctgcaactcgttattaagtgcacgccggtcagcggtggcaattatgaataaatcttctactcgctcgccaatggttgtaattcgggcaccatgaagcgaaattcccagatcggcaaaaattttcccgactctcgccagcagtcctggctggtcgagcgcgataagctcaaggaacgatttgcggtcggtatgggtcggcaaaaacgttacttcggtttcaacagtaaaatggcgtaatttggcgggttggcgacggggctgcggtggctgccagctactttgcgtcagtacttgctccagaccaaaccgaataacctcatgacgatctgcggacagcgggctgccatcgggttccagcacgataaaggtatccatcgccataccgtcgcgagtggtgaaaatttgtgcgtcgtgaacacttaaattgcggcggtctaattcggcacagacggcggcaaacagataggggcggtccgggctccagataaaaatctcggtgcctccacgcgtagcctgcgggctaagcaataccagcggtttgcttaaatcatgctgtaataaatggcgggcatgccaggccagttgatttgggctatggcggacaaaatagttagcacgacagcgtgaccaaatttggtgcagcgcctcttcgtcgatgttatccatgcgcagtagtgccagtgcctggagttggtgatggcgaacccgttcgcgcatatccggcgtgttttgcattccgcgtcgtagctgcttttcggtggcaaaatagagttcgcgcaacagactttgcttccagctattccacagcgtttcgttggtggcgcaaatgtcagccactgtcaggcataccagatagcgcagacgattttccgtttgaacttcttcggcaaactgcttgatgacttcagggtcctgaatatcgcggcgttgtgctgtcaccgacatcagcaagtgctggcgaaccagccaggcaaccagctgtgtttcgcgtgagttcagcccgtggagttctgcaaaatgcactacatcctgagcaccgagaatggagtggtcgccgccgcgtcctttggcgatatcgtgaaacagcgcggcgatgaaaatcagctcagttgacggcaggcgcggccagacgtccacacacaacggatggcgctggcgcgtttcttcactggcaaaactctccagtttcagcatcacgcggatagtatgttcatccaccgtgtaggcgtggaacagatcaaactgcatctgcccgacgatatgcgaccattgcggcatatacgcgccgagcacgctatggcgatgcattggcaatagcccgcgccgcaccgctccggggtgacgcagaatgctcaaaaacagttttcgtgcttccggaatattacacagcggttgttgcagatggcgacgggcatggcgtaactggcgcagcgtggtggagtaaatgccggtgatcgcactgttgcgcaccatggtgtagaacatacgcaagatggcttccggctggcgcataaatagtgtttcatcacgcaggtcgattagcgtaccgcgtagctgaaactcatcgtcgattggacgtggtttttcgtcggcgggaagggcgaggatggcttcatcgaacagttgcagcagcatctggttgagttcactgacgcggcgtgtaacgcggaagtaatccttcatcatccgctcgaccggttcgttgccttcaccactgtaattcagacgctgagcgacgctaagttggcgatcgaataacagacgattatcgtaacggctgacgaccagatgcagggcaaagcgaatacgccacagtatatgcagacattcgtttaattccgcccgctccgctgaggttaagaagccaaacccgaccatttcatccagcgatgttgcgccaaaatgacggcgggccacccattgcagagtgtgaatatcgcgcaagccgccagggctacttttgatgtctggttcaaggttgtagctggtgccatggtaacgctgatggcgctggttctgttcttcaactttcgccgcgtagaacttgtcggaaggccagaatccttcgctaaaaatatgtttttgcagttcgaggaagagcgcaacatcgccaattaataagcgggattcgattaaattggtggcgacggttaaatccgataacccttccagcatgcactcttcaagcgtgcgcacactatgaccgacttccagctttacatcccagagcagcgttaacagctcgcccactttttgcgcctgatcgtccgggagctttttacggcttaaaatcagtaaatcgatgtcagaaagtggatgcagctcgccacgaccgtagccaccgacggcgaccaatgccaggtcggcaatctggctgaatcccgcttcaatccataatcgttgcaggagctggtcgataaactcggtgcgcgcctcaatcaactgttctgcagagatcccattgtcaaaggcatcacccagccaacgctggaaagtatcgatatgggcttttatcccaccgacggttaattcatcacggggccagacgcatggattttgcggttgaccgggcagggtggggagagcggtgtttgcgtactgttctggaagggtattcattgtgcgccacccataagattaaattatcgcattaaaaaagccggcattcgccggcttcatcttattcgtcgtgcgagattatcgccgggatggtgtcatccttgcgtagcgtcaaaatttcgcagccgttatcagtcaccacaatagtatgctcatattgtgcagacaagctgcgatctttggtttttaccgtccagccatctttcatggtgcggatctcttttttacccgcgttgaccattggctcaatggtgaacgtcatcccaggtttcagtacgacgttggtttcacgggagtcatagtgcagcacctgcggttcttcatggaagccgcgaccaataccgtgtccacaatattcacgaacgacggagaagccttctgcttcgacaaacttctgaatcgccgcaccgatttcgcgcaggttaatgcctggtttgaccatgcgcagcgccaggtacaggctttcttgcgtgatgcggcacagacgttcgcccatgatggtcggcttaccgacgataaacattttcgaggtatcgccgtggaaaccatctttgattacggtgacatcaatgttaacgatatcgccatctttcagcagcttagcatcgtccgggataccgtggcacaccacttcattaatagagatgcaaacggatttcggatagccgtgatagccgaggcaggcagaaaccgcgtgttgttcattaacaatgtaatcattacagatgcgatccagctcgccggtgctgacgcccggtttaacatacggttcgatcatctccagcacttcggcagccagtcggccagcgacgcgcattttttcgatatcttctggggtcttgattgagatagccattaattctgtccatcagcgtcggtgataccgacaatatatatgtaagtgccgtcaatggtatcacacccgggcaaattgagaatcattctgaatttcgccaaacgtgccactgaaggttttctataatagaaaattcgacatctgatgctgtacacagcgccaacaattattggtgtccatgacgtatttgtggtataaagcgcgccggacttccgatccatttcgtatacacagactggacggaagcgacaatctcactttgtgtaacaacacacacgtatcggcacatattccggggtgccctttggggtcggtaatatgggatacgtggaggcataaccccaacttttatatagaggttttaatcatggcaactgtttccatgcgcgacatgctcaaggctggtgttcacttcggtcaccagacccgttactggaacccgaaaatgaagccgttcatcttcggtgcgcgtaacaaagttcacatcatcaaccttgagaaaactgtaccgatgttcaacgaagctctggctgaactgaacaagattgcttctcgcaaaggtaaaatccttttcgttggtactaaacgcgctgcaagcgaagcggtgaaagacgctgctctgagctgcgaccagttcttcgtgaaccatcgctggctgggcggtatgctgactaactggaaaaccgttcgtcagtccatcaaacgtctgaaagacctggaaactcagtctcaggacggtactttcgaaaagctgaccaagaaagaagcgctgatgcgcactcgtgagctggagaaactggaaaacagcctgggcggtatcaaagacatgggcggtctgccggacgctctgtttgtaatcgatgctgaccacgaacacattgctatcaaagaagcaaacaacctgggtattccggtatttgctatcgttgataccaactctgatccggacggtgttgacttcgttatcccgggtaacgacgacgcaatccgtgctgtgaccctgtacctgggcgctgttgctgcaaccgtacgtgaaggccgttctcaggatctggcttcccaggcggaagaaagcttcgtagaagctgagtaataaggcttgataactcccccaaaatagttcgagttgcagaaaggcggcaagctcgagaattcccgggagcttacatcagtaagtgaccgggatgagcgagcgaagataacgcatctgcggcgcgaaatatgaagggggagagcccttatagaccaggtagtacacgtttggttagggggcctgcatatggccccctttttcacttttatatctgtgcggtttaatgccgggcagatcacatctccgaggattttaaaatggctgaaattaccgcatccctggtaaaagagctgcgtgagcgtactggcgcaggcatgatggattgcaaaaaagcactgactgaagctaacggcgacatcgagctggcaatcgaaaacatgcgtaagtccggtgctattaaagcagcgaaaaaagcaggcaacgttgctgctgacggcgtgatcaaaaccaaaatcgacggcaactacggcatcattctggaagttaactgccagactgacttcgttgcaaaagacgctggtttccaggcgttcgcagacaaagttctggacgcagctgttgctggcaaaatcactgacgttgaagttctgaaagcacagttcgaagaagaacgtgttgcgctggtagcgaaaattggtgaaaacatcaacattcgccgcgttgctgcgctggaaggcgacgttctgggttcttatcagcacggtgcgcgtatcggcgttctggttgctgctaaaggcgctgacgaagagctggttaaacacatcgctatgcacgttgctgcaagcaagccagaattcatcaaaccagaagacgtatccgctgaagtggtagaaaaagaataccaggtacagctggatatcgcgatgcagtctggtaagccgaaagaaatcgcagagaaaatggttgaaggccgcatgaagaaattcaccggcgaagtttctctgaccggtcagccgttcgttatggaaccaagcaaaactgttggtcagctgctgaaagagcataacgctgaagtgactggcttcatccgcttcgaagtgggtgaaggcatcgagaaagttgagactgactttgcagcagaagttgctgcgatgtccaagcagtcttaattatcaaaaaggagccgcctgagggcggcttctttttgtgcccatcttgtaaattcagctaacccttgtggggctgcgctgaaaagcgacgtacaatgtcgctagtattaattcatttcaatcgttgacagtctcaggaaagaaacatggctaccaatgcaaaacccgtctataaacgcattctgcttaagttgagtggcgaagctctgcagggcactgaaggcttcggtattgatgcaagcatactggatcgtatggctcaggaaatcaaagaactggttgaactgggtattcaggttggtgtggtgattggtgggggtaacctgttccgtggcgctggtctggcgaaagcgggtatgaaccgcgttgtgggcgaccacatggggatgctggcgaccgtaatgaacggcctggcaatgcgtgatgcactgcaccgcgcctatgtgaacgctcgtctgatgtccgctattccattgaatggcgtgtgcgacagctacagctgggcagaagctatcagcctgttgcgcaacaaccgtgtggtgatcctctccgccggtacaggtaacccgttctttaccaccgactcagcagcttgcctgcgtggtatcgaaattgaagccgatgtggtgctgaaagcaaccaaagttgacggcgtgtttaccgctgatccggcgaaagatccaaccgcaaccatgtacgagcaactgacttacagcgaagtgctggaaaaagagctgaaagtcatggacctggcggccttcacgctggctcgtgaccataaattaccgattcgtgttttcaatatgaacaaaccgggtgcgctgcgccgtgtggtaatgggtgaaaaagaagggactttaatcacggaataattcccgtgatggataaataagggtaagattccgcgtaagtatcgcgggggcgtaagtctggttataaggcgttattgttgcaggcagtttggtcacggccagcgcgcagcaaccggagcgtacaaaagtacgtgaggatggcgagcactgctcggggccaaaatggcaaataaaatagcctaataatccagacgattacccgtaatatgtttaatcagggctatacttagcacacttccactgtgtgtgactgtctggtctgactgagacaagttttcaaggattcgtaacgtgattagcgatatcagaaaagatgctgaagtacgcatggacaaatgcgtagaagcgttcaaaacccaaatcagcaaaatacgcacgggtcgtgcttctcccagcctgctggatggcattgtcgtggaatattacggcacgccgacgccgctgcgtcagctggcaagcgtaacggtagaagattcccgtactctgaaaatcaacgtgtttgatcgttcaatgtctccggccgttgaaaaagcgattatggcgtccgatcttggcctgaacccgaactctgcgggtagcgacatccgtgttccgctgccgccgctgacggaagaacgtcgtaaagatctgaccaaaatcgttcgtggtgaagcagaacaagcgcgtgttgcagtacgtaacgtgcgtcgtgacgcgaacgacaaagtgaaagcactgttgaaagataaagagatcagcgaagacgacgatcgccgttctcaggacgatgtacagaaactgactgatgctgcaatcaagaaaattgaagcggcgctggcagacaaagaagcagaactgatgcagttctgatttcttgaacgacaaaaacgccgctcagtagatccttgcggatcggctggcggcgttttgctttttattctgtctcaactctggatgtttcatgaagcaactcaccattctgggctcgaccggctcgattggttgcagcacgctggacgtggtgcgccataatcccgaacacttccgcgtagttgcgctggtggcaggcaaaaatgtcactcgcatggtagaacagtgcctggaattctctccccgctatgccgtaatggacgatgaagcgagtgcgaaacttcttaaaacgatgctacagcaacagggtagccgcaccgaagtcttaagtgggcaacaagccgcttgcgatatggcagcgcttgaggatgttgatcaggtgatggcagccattgttggcgctgctgggctgttacctacgcttgctgcgatccgcgcgggtaaaaccattttgctggccaataaagaatcactggttacctgcggacgtctgtttatggacgccgtaaagcagagcaaagcgcaattgttaccggtcgatagcgaacataacgccatttttcagagtttaccgcaacctatccagcataatctgggatacgctgaccttgagcaaaatggcgtggtgtccattttacttaccgggtctggtggccctttccgtgagacgccattgcgcgatttggcaacaatgacgccggatcaagcctgccgtcatccgaactggtcgatggggcgtaaaatttctgtcgattcggctaccatgatgaacaaaggtctggaatacattgaagcgcgttggctgtttaacgccagcgccagccagatggaagtgctgattcacccgcagtcagtgattcactcaatggtgcgctatcaggacggcagtgttctggcgcagctgggggaaccggatatgcgtacgccaattgcccacaccatggcatggccgaatcgcgtgaactctggcgtgaagccgctcgatttttgcaaactaagtgcgttgacatttgccgcaccggattatgatcgttatccatgcctgaaactggcgatggaggcgttcgaacaaggtcaggcagcgacgacagcattgaatgccgcaaacgaaatcaccgttgctgcttttcttgcgcaacaaatccgctttacggatatcgctgcgttgaatttatccgtactggaaaaaatggatatgcgcgaaccacaatgtgtggacgatgtgttatctgttgatgcgaacgcgcgtgaagtcgccagaaaagaggtgatgcgtctcgcaagctgaggataatccggctacagagagtcgcgctatttgttagcgtagggcttcagtgatatagtctgcgccatctgatcgtaagtagttggctttataaggtcaggtatgccgtggttttacacggcttttttttgtataggcttcagtattcctgagtaccgtaaaccctgtcagggaataaaaaacgcgtgatgttgtctgctactcaaccacttagcgaaaaattgccagcgcatggctgccgtcatgttgcgatcattatggacggcaatggtcgctgggcaaaaaagcaagggaagattcgtgcctttgggcataaagccggggcaaaatccgtccgccgggctgtctcttttgcggccaacaacggtattgaggcgttaacgctgtatgcctttagtagtgaaaactggaaccgaccagcgcaggaagtcagtgcgttaatggaactgtttgtgtgggcgctcgatagcgaagtaaaaagtctgcaccgacataacgtgcgtctgcgtattattggcgataccagtcgctttaactcgcgtttgcaagaacgtattcgtaaatctgaagcgctaacagccgggaataccggtctgacgctgaatattgcggcgaactacggtggacgttgggatatagtccagggagtcaggcaactggctgaaaaggtgcagcaaggaaacctgcaaccagatcagatagatgaagagatgctaaaccagcatgtctgtatgcatgaactggcccctgtagatttagtaattaggactgggggggagcatcgcattagtaactttttgctttggcaaattgcctatgccgaactttactttacagatgttctctggcccgatttcgatgaacaagactttgaaggggcgttaaatgcctttgctaatcgagagcgtcgtttcggcggcaccgagcccggtgatgaaacagcctgatgggggtcgcttttgctgaagtatcgcctgatatctgcttttgtgttaatacccgtcgtcatcgcggcgttgtttctgttgccgccggtggggttcgccatcgtaacgctggtggtctgcatgctggcagcgtgggaatggggacagcttagcggttttaccactcgttcgcagcgagtatggttggcggtgttatgcgggttattgttggcgctgatgctttttctgttgccggaatatcaccgaaatattcatcaaccgctggttgaaatctcactttgggcttcgctgggttggtggattgtcgcgctattgctggtgctgttttacccaggttccgcagcaatctggcgtaactctaaaacattgcgccttatttttggcgtgctaaccattgttcccttcttctggggcatgctggcgttacgggcctggcactatgacgagaatcattacagtggcgcaatatggctgctctatgtcatgatcctggtatggggcgctgactccggcgcatatatgtttggcaaattgtttggtaaacataagctggcaccgaaggtttctccgggtaaaacctggcaaggctttataggtggactagcgaccgcagcggtaatctcatggggttatggcatgtgggcgaatctcgacgtcgctcccgtcaccttactcatttgctctattgtcgcagcgttagcctcagtgctcggcgatctgaccgagagtatgtttaagcgtgaagcaggaattaaggacagcggtcatttaattccaggacacggtggtattttagatcgtattgatagcctgacggctgcggtaccggtctttgcttgcttgttgttactggtattcaggacgctttaacggaaggtaatatgctgagttttctctgggatttggcttcgttcatcgttgcactgggtgtacttatcaccgtgcatgaatttggtcatttctgggttgcccggcgttgtggtgttcgcgttgagcgtttctcaatagggtttggtaaggcgctctggcggcgaactgataagctcggcaccgaatatgttatcgccctgatcccgctgggcggttatgtcaaaatgctggatgagcgcgcagaaccggtcgttccggaactccgccaccatgccttcaataataaatctgttggccaacgagcggcgattattgccgcaggtccggttgcaaacttcatttttgctatcttagcctactggctggtttttattattggtgtgcctggcgtacgtccggtggttggtgaaatagcagccaattcgatagctgcggaagcacaaattgcaccaggtacggaactaaaagccgtagatggtatcgaaacgcctgattgggatgccgtgcgtttgcagttggtcgataaaattggcgatgaaagcaccaccattacagtagcgccatttggcagcgaccaacggcgggatgtaaagctcgatttacgtcactgggcgtttgagcctgataaagaagatccggtatcttcgctggggattcgtcctcgtgggccgcaaattgaacctgtactggaaaatgtgcagccaaactcggcggcaagcaaggcaggtttgcaagcaggcgacaggatcgttaaagtcgatggtcagcccttaacgcagtgggtgacctttgtgatgcttgtccgggataacccgggtaaatccttagcgttagaaatcgaaaggcaggggagtcccttgtctttgacattaatcccggagagtaaaccgggtaatggtaaagcgattggttttgtcggtattgagccgaaagtcattcctttgccagatgagtataaagttgtacgccagtatgggccgttcaacgccatcgtcgaagccacggacaaaacgtggcagctgatgaagctgacggtcagtatgctgggaaaattgatcaccggtgatgtgaaactgaacaacctcagtgggccgatctctatcgccaagggggctgggatgacagcggaactcggggtagtttattacctgccgtttcttgcgcttattagcgtgaacttagggataattaacctgtttccgttgcccgtactagacggggggcatctgctgttccttgcgatcgaaaagatcaagggcggaccggtatccgagcgggttcaagacttttgttatcgcattggctcgattctgctggtgctgttaatggggcttgcacttttcaatgatttctctcggttatgagagttagttaggaagaacgcataataacgatggcgatgaaaaagttgctcatagcgtcgctgctgtttagcagcgccaccgtatacggtgctgaagggttcgtagtgaaagatattcatttcgaaggccttcagcgtgtcgccgttggtgcggccctcctcagtatgccggtgcgcacaggcgacacggttaatgatgaagatatcagtaataccattcgcgctctgtttgctaccggcaactttgaggatgttcgcgtccttcgtgatggtgatacccttctggttcaggtaaaagaacgtccgaccattgccagcattactttctccggtaacaaatcggtgaaagatgacatgctgaagcaaaacctcgaggcttctggtgtgcgtgtgggcgaatccctcgatcgcaccaccattgccgatatcgagaaaggtctggaagacttctactacagcgtcggtaaatatagcgccagcgtaaaagctgtcgtgaccccgctgccgcgcaaccgtgttgacctaaaactggtgttccaggaaggtgtgtcagctgaaatccagcaaattaacattgttggtaaccatgctttcaccaccgacgaactgatctctcatttccaactgcgtgacgaagtgccgtggtggaacgtggtaggcgatcgtaaataccagaaacagaaactggcgggcgaccttgaaaccctgcgcagctactatctggatcgcggttatgcccgtttcaacatcgactctacccaggtcagtctgacgccagataaaaaaggtatttacgtcacggtgaacattaccgaaggcgatcagtacaagctttctggcgttgaagtgagcggcaaccttgccgggcactccgctgaaattgagcagctgactaagatcgagccgggcgagctgtataacggcaccaaagtgaccaagatggaagatgacatcaaaaagcttctcggtcgctatggttatgcctatccgcgcgtacagtcgatgcctgaaattaacgatgccgacaaaaccgttaaattacgcgtgaacgttgatgcgggtaaccgtttctacgtgcgtaagatccgttttgaaggtaacgatacctcgaaagatgccgtcctgcgtcgcgaaatgcgtcagatggaaggtgcatggctgggaagcgatctggtcgatcagggtaaggagcgtctgaatcgtctgggcttctttgaaactgtcgataccgatacccaacgtgttccgggtagcccggaccaggtagatgtcgtctacaaggtaaaagagcgcaacaccggtagcttcaacttcgggattggttacggtactgaaagtggcgtgagcttccaggctggtgtgcagcaggataactggttaggtacaggttatgctgttggtatcaacgggaccaaaaacgattaccagacctatgctgaactgtcggtaaccaacccgtacttcactgtagatggtgtaagcctcggtggtcgtctcttctataatgacttccaggcagatgacgccgacctgtccgactataccaacaagagttatggtacagacgtgacgttgggcttcccgatcaacgaatataactcgctgcgtgcaggtctgggttatgtacataactccctgtccaacatgcagcctcaggttgcgatgtggcgttatctgtactctatgggtgaacatccgagcacctctgatcaggataatagcttcaaaacggacgacttcacgttcaactatggttggacctataacaagcttgaccgtggttacttcccgacagatggttcacgtgtcaacctgaccggtaaagtgaccattcctggatcggataacgaatactacaaagtgacgttagacacggcgacttatgtgccgatcgatgacgatcacaaatgggttgttctggggcgtacccgctggggttatggtgatggtttaggcggcaaagagatgccgttctacgagaacttctatgccggtggttccagcaccgtgcgtggcttccagtccaatacaattggtccgaaagcagtttacttcccgcatcaggccagtaattatgatccggactatgattacgaatgtgcgactcaggacggcgcgaaagacctgtgtaaatcggatgatgctgtaggcggtaacgccatggcggttgccagcctcgagttcatcaccccgacgccgtttattagcgataagtatgctaactcggttcgtacttccttcttctgggatatgggtaccgtttgggatacaaactgggattccagccaatattctggatatccggactatagtgatccaagcaatatccgtatgtctgcgggtatcgcattacaatggatgtccccattggggccgttggtgttctcctacgcccagccgttcaaaaagtacgatggagacaaggcagaacagttccagtttaacatcggtaaaacctggtaagtgttctccacaaaggaatgtagtggtagtgtagcgatgactttaggcgatcaatataagatcgccgggccacgcaaagaactgcaccctccggtgcaaatgggatggtaaggagtttattgtgaaaaagtggttattagcggcaggtctcggtttagcactggcaacttctgctcaggcggctgacaaaattgcaatcgtcaacatgggcagcctgttccagcaggtagcgcagaaaaccggtgtttctaacacgctggaaaatgagttcaaaggccgtgccagcgaactgcagcgtatggaaaccgatctgcaggctaaaatgaaaaagctgcagtccatgaaagcgggcagcgatcgcactaagctggaaaaagacgtgatggctcagcgccagacttttgctcagaaagcgcaggcttttgagcaggatcgcgcacgtcgttccaacgaagaacgcggcaaactggttactcgtatccagactgctgtgaaatccgttgccaacagccaggatatcgatctggttgttgatgcaaacgccgttgcttacaacagcagcgatgtaaaagacatcactgccgacgtactgaaacaggttaaataagtaatgccttcaattcgactggctgatttagcgcagcagttggatgcagaactacacggtgatggcgatatcgtcatcaccggcgttgcgtccatgcaatctgcacaaacaggtcacattacgttcatggttaacccaaaataccgtgagcatttaggcttgtgccaggcgtccgcggttgtcatgacccaggacgatcttcctttcgcgaaaagtgccgcgctggtagtgaagaatccctacctgacttacgcgcgcatggcgcaaattttagataccacgccgcagcccgcgcagaacattgcacccagtgcggtgatcgacgcgacggcgaagctgggtaacaacgtatcgattggcgctaacgcggtgattgagtccggcgttgaactgggcgataacgtgattatcggtgccggttgcttcgtaggtaaaaacagcaaaatcggtgcaggttcgcgtctctgggcgaacgtaaccatttaccatgagatccagatcggtcagaattgcctgatccagtccggaacagtggtaggcgcagacggctttggttatgccaacgatcgtggtaactgggtgaagatcccacagattggtcgcgtaattattggcgatcgcgtggagatcggtgcctgcacaaccatcgatcgcggcgcgctggatgacactattattggcaatggcgtgatcattgataaccagtgccagattgcacataacgtcgtgattggcgacaatacggcggttgccggtggcgtcattatggcgggcagcctgaaaattggtcgttactgcatgatcggcggagccagcgtaatcaacgggcatatggaaatatgcgacaaagtgacggttacgggcatgggtatggtgatgcgtcccatcactgaaccaggcgtctattcctcaggcattccgctgcaacccaacaaagtctggcgcaaaaccgctgcactggtgatgaacattgatgacatgagcaagcgtctgaaatcgcttgagcgcaaggttaatcaacaagactaacgttccatcttttgttcgccaaactttacggcctgtctcattcttacgattgcggcaggccgtgttattattgtcgtttcttatattttgacaggaagagtatcttgactactaacactcatactctgcagattgaagagattttagaacttctgccgcaccgtttcccgttcttactggtggatcgcgtgctggattttgaagaaggtcgttttctgcgcgcagtaaaaaatgtctctgtcaatgagccattcttccagggccatttccctggaaaaccgattttcccgggtgtgctgattctggaagcaatggcacaggcaacaggtattctggcgtttaaaagcgtaggaaaactggaaccgggtgagctgtactacttcgctggtattgacgaagcgcgcttcaagcgcccggtcgtgcctggcgatcaaatgatcatggaagtcactttcgaaaaaacgcgccgcggcctgacccgttttaaaggggttgctctggtcgatggtaaagtagtttgcgaagcaacgatgatgtgtgctcgtagccgggaggcctgatacgtgattgataaatccgcctttgtgcatccaaccgccattgtggaagagggcgcgtcaattggcgcgaacgcacacattggtcctttttgtatcgttggaccccatgtcgaaattggtgagggtaccgtactgaaatctcacgttgtcgtgaatggtcatactaaaattggccgcgataatgagatttatcagttcgcctccatcggcgaagttaaccaggatctgaaatatgctggcgaaccgacccgtgtggaaatcggcgatcgtaaccgcattcgcgaaagcgtcaccattcatcgtggcacagtccagggcggtggattgacgaaggtgggcagcgacaacttactgatgatcaacgcgcacattgcgcacgattgtacggtaggtaaccgctgtattctcgccaacaacgcaacgctggcgggtcacgtatcggttgacgacttcgcgatcatcggcggcatgaccgcagtccatcagttctgcatcattggtgcgcacgtgatggttggcggctgctccggtgtggcgcaggacgtccctccttatgtcattgcgcagggtaaccacgcaacgccgttcggtgtcaatatcgaagggctgaagcgccgcggattcagccgtgaggcgattaccgctatccgcaatgcgtataagctgatttatcgtagcggtaaaacgctcgatgaagtgaaaccggaaattgctgaactggcggaaacatatccggaagtgaaagcctttaccgatttctttgcacgctcaacgcgcggtctgattcgttaatgactgaacagcgtccattaacgattgccctggtcgccggagaaacctccggcgatatcctgggggccggtttaatccgcgctctgaaagaacgtgtgcccaacgcccgctttgttggtgttgccgggccacgaatgcaggctgaaggctgcgaagcctggtacgaaatggaagaactggcggtaatgggcattgttgaagtgctcggtcgtctgcgtcgcttactgcatattcgtgccgatctgacaaagcgttttggcgaactgaagccagatgtttttgttggtattgatgcgcccgacttcaatattactcttgaaggtaacctcaaaaagcagggtatcaaaaccattcattacgtcagtccatccgtctgggcgtggcgacagaaacgcgttttcaaaataggcagagccaccgatctggtgctcgcatttctgcctttcgaaaaagcgttttatgacaaatacaatgtaccgtgccgctttatcggtcataccatggctgatgccatgccgttagatccagataaaaatgccgcccgtgatgtgctggggatccctcacgatgcccactgcctggcgttgctaccggggagccgtggcgcagaagttgaaatgcttagtgccgatttcctgaaaacggcccagcttttgcgccagacatatccggatctcgaaatcgtggtgccactggtgaatgccaaacgccgcgagcagtttgaacgcatcaaagctgaagtcgcgccagacctttcagttcatttgctggatgggatgggccgtgaggcgatggtcgccagcgatgcggcgctactggcgtcgggtacggcagccctggagtgtatgctggcgaaatgcccgatggtggtgggatatcgcatgaagccttttaccttctggttggcgaagcggctggtgaaaactgattatgtctcgctgccaaatctgctggcgggcagagagttagtcaaagaattattgcaggaagagtgtgagccgcaaaaactggctgcggcgctgttaccgctgttggcgaacgggaaaaccagccacgcgatgcacgataccttccgtgaactgcatcagcagatccgctgcaatgccgatgagcaggcggcacaagccgttctggagttagcacaatgatcgaatttgtttatccgcacacgcagctggttgcgggtgtggatgaagtcggacgcgggccgttagttggcgcggtcgtcaccgctgcggtgatccttgacccggcgcgcccgattgccgggctgaatgattccaaaaagctgagcgaaaaacgccgtctggcgctctatgaagagatcaaagagaaagcgttgagctggagtctgggccgcgcggaaccccacgaaatcgacgagctgaacattcttcatgcgaccatgctggcgatgcagcgtgccgtcgctgggctgcatattgcgccggaatatgtgttgattgatggtaaccgctgcccgaaattaccgatgcctgcgatggctgtggtgaaaggcgatagccgcgtaccggaaatcagtgccgcgtctatcctggcgaaagtgacgcgtgacgccgaaatgacggcgctggatattgttttcccgcaatatggttttgcccaacacaaagggtacccaaccgcttttcatctggaaaaactggctgaacacggcgcgaccgaacaccatcggcgcagctttgggcctgtcaaacgcgcactgggacttgcgtcctgattcttgtgtcgagattaagtaaaccggaatctgaagatgtctgaaccacgtttcgtacacctgcgggtgcacagcgactactcgatgatcgatggcctggccaaaaccgcaccgctggtaaaaaaggcggcggcgttgggtatgccagcactggcgatcaccgatttcaccaacctttgcggtctggtgaagttctacggagcgggacatggcgcagggattaagcctatcgtcggggcagattttaacgtccagtgcgacctgctgggtgatgagttaacccacctgacggtactggcggcgaacaataccggctatcagaatctgacgttgctgatctcaaaagcgtatcagcgcgggtacggtgccgccgggccgatcatcgatcgcgactggcttatcgaattaaacgaagggttgatccttctttccggcggacgcatgggcgacgtcggacgcagtcttttgcgtggtaacagcgcgctggtagatgagtgtgtcgcgttttatgaagaacacttcccggatcgctattttctcgagctgatccgcaccggcaggccggacgaagaaagctatctgcacgcggcggtggaactggcggaagcgcgcggtttgcccgtcgtggcgaccaacgacgtgcgctttatcgacagcagcgactttgacgcacacgaaatccgcgtcgcgatccacgacggctttaccctcgacgatcctaaacgcccgcgtaactattcgccgcagcaatatatgcgtagcgaagaggagatgtgtgagctgtttgccgacatccccgaagcccttgccaacaccgttgagatcgccaaacgctgtaacgtaaccgtgcgtcttggtgaatacttcctgccgcagttcccgaccggggacatgagcaccgaagattatctggtcaagcgtgcaaaagagggcctggaagagcgtctggcctttttattccctgatgaggaagaacgtgttaagcgccgcccggaatatgacgaacgtctggagactgaacttcaggttatcaaccagatgggcttcccgggctacttcctcatcgttatggaatttatccagtggtcgaaagataacggcgtaccggtagggccaggccgtggctccggtgcgggttcactggtggcctacgcgctgaaaatcaccgacctcgatccgctggaatttgacctgctgttcgaacgtttccttaacccggaacgtgtctccatgcctgacttcgacgttgacttctgtatggagaaacgcgatcaggttatcgaacacgtggcggacatgtacggtcgtgatgcggtatcgcagatcatcaccttcggtacaatggcggcgaaagcggtgatccgcgacgtaggccgcgtgctggggcatccgtacggctttgtcgatcgtatctcgaaactgatcccgcccgatccggggatgacgctggcgaaagcgtttgaagccgagccgcagctgccggaaatctacgaagcggatgaagaagttaaggcgctgatcgacatggcgcgcaaactggaaggggtcacccgtaacgccggtaagcacgccggtggggtggttatcgcgccgaccaaaattaccgattttgcgccgctttactgcgatgaagagggcaaacatccggtcacccagtttgataaaagcgacgttgaatacgccggactggtgaagttcgacttccttggtttgcgtacgctcaccatcatcaactgggcgctggagatgatcaacaagcggcgggcgaagaatggcgagccgccgctggatatcgccgcgatcccgctggatgacaagaaaagcttcgacatgctgcaacgctcggaaaccacggcggtattccagcttgaatcgcgcggcatgaaggacctgatcaagcgtctgcaacctgactgcttcgaagatatgatcgcactggtggcgctgttccgcccaggtccgttgcaatcagggatggtggataactttatcgaccgtaaacatggtcgcgaagaaatctcctatccggacgtacagtggcagcatgaaagcctgaaaccggtactggagccaacctacggcatcatcctgtatcaggaacaggtcatgcagattgcgcaggtgctttctggttataccctcggtggcgcggatatgctgcgtcgtgcgatgggtaagaaaaagccggaagagatggctaagcagcgttctgtatttgctgaaggtgcagaaaagaacggaatcaacgccgaactggcgatgaaaatcttcgacctggtggagaaattcgcgggttacggatttaacaaatcgcactctgcggcctatgctttggtgtcatatcaaacgttatggctgaaagcgcactatccggcggagtttatggcggcggtaatgaccgccgatatggacaacaccgagaaggtggtgggcctggtggatgagtgctggcggatggggctgaaaatcctgccaccagatataaactccggtctttaccatttccacgtcaacgacgacggcgaaatcgtgtatggtattggcgccatcaaaggggtaggtgaaggtccgattgaggccatcatcgaagcccgtaataaaggcggctacttccgcgaactgtttgatctctgcgcccgtaccgacaccaaaaagttaaaccggcgggtgctggaaaaactgatcatgtccggggcgtttgaccgtcttgggccacaccgcgcggcgctgatgaactcgctgggtgatgcgttaaaagcggcagatcaacacgcgaaagcggaagctatcggtcaggccgatatgttcggcgtgctggccgaagagccggaacaaattgaacaatcctacgccagctgccaaccgtggccggagcaggtggtgttagatggggaacgtgaaacgttaggtctgtaccttacgggacaccctatcaaccagtatttaaaagagattgagcgttatgtcggaggcgtaaggctgaaagacatgcacccgacagaacgtggtaaagtcatcacggctgcggggctcgttgttgccgcgcgggttatggtcaccaagcgcggcaatcgtatcggtatctgcacgctggatgaccgttccgggcggctggaagtgatgttgtttactgacgccctggataaataccagcaattgctggaaaaagaccgcatacttatcgtcagcggacaggtcagctttgatgacttcagcggtgggcttaaaatgaccgctcgcgaagtgatggatattgacgaagcccgggaaaaatatgctcgcgggcttgctatctcgctgacggacaggcaaattgatgaccagcttttaaaccgactccgtcagtctctggaaccccaccgctctgggacaattccagtacatctctactatcagagggcggatgcacgcgcgcggttgcgttttggcgcgacgtggcgtgtctctccgagcgatcgtttattaaacgatctccgtggcctcattggttcggagcaggtggaactggagtttgactaatacaggaatactatgagtctgaatttccttgattttgaacagccgattgcagagctggaagcgaaaatcgattctctgactgcggttagccgtcaggatgagaaactggatattaacatcgatgaagaagtgcatcgtctgcgtgaaaaaagcgtagaactgacgcgtaaaatcttcgccgatctcggtgcatggcagattgcgcaactggcacgccatccacagcgtccttataccctggattacgttcgcctggcatttgatgaatttgacgaactggctggcgaccgcgcgtatgcagacgataaagctatcgtcggtggtatcgcccgtcttgacggtcgtccggtgatgatcattggtcatcaaaaaggtcgtgaaaccaaagaaaaaattcgccgtaactttggtatgccagcgccagaaggttaccgcaaagcactgcgtctgatgcaaatggctgaacgctttaagatgcctatcatcacctttatcgacaccccgggggcttatccgggcgtgggcgcagaagaacgtggtcagtctgaagccattgcacgcaacctgcgtgaaatgtctcgcctcggtgtaccggtagtttgtacggttatcggtgaaggtggttctggcggcgcgctggcgattggcgtgggcgataaagtgaatatgctgcaatacagcacctattccgttatctcgccggaaggttgtgcgtccattctgtggaagagcgctgacaaagcgccgctggcagctgaagcgatgggtatcatcgctccgcgtctgaaagaactaaaactgatcgactccatcatcccggaaccgctgggtggtgctcaccgtaacccggaagcgatggcggcatcgttgaaagcgcaactgctggcggatctggccgatctcgacgtgttaagcactgaagatttaaaaaatcgtcgttatcagcgcctgatgagctacggttacgcgtaattcgcaaaagttctgaaaaagggtcacttcggtggcccttttttatcgccacggtttgagcaggctatgattaaggaaggattttccaggaggaacacatgaacatcattgccattatgggaccgcatggcgtcttttataaagatgagcccatcaaagaactggagtcggcgctggtggcgcaaggctttcagattatctggccacaaaacagcgttgatttgctgaaatttatcgaacataaccctcgaatttgcggcgtgatttttgactgggatgagtacagtctcgatttatgcagcgatatcaatcaacttaatgaatatctcccgctttatgccttcatcaacacccactcgacgatggatgtcagcgtgcaggatatgcggatggcgctctggttttttgaatatgcgctggggcaggcggaagatatcgccattcgtatgcgtcagtacaccgacgaatatcttgataacattacaccgccgttcacgaaagccttgtttacctacgttaaagagcggaagtacaccttttgtacgccggggcatatgggcggcaccgcatatcaaaaaagcccggttggctgcctgttttatgattttttcggcgggaataccctcaaggctgatgtctctatttcggtcaccgagcttggttcgttgctcgaccacaccgggccacacctggaagcggaagagtacatcgcgcggacttttggcgcggaacagagttatatcgttaccaacggaacatcgacgtcgaacaaaattgtgggtatgtacgccgcgccatccggcagtacgctgttgatcgaccgcaattgtcataaatcgctggcgcatctgttgatgatgaacgatgtagtgccagtctggctgaaaccgacgcgtaatgcgttggggattcttggtgggatcccgcgccgtgaatttactcgcgacagcatcgaagagaaagtcgctgccaccacgcaggcacaatggccggttcatgcggtgattaccaactccacctatgatggcttgctctacaacaccgactggatcaaacagacgctggatgtcccgtcgatccacttcgattccgcctgggtgccgtacacccattttcatccgatctaccaggggaaaagtggtatgagcggcgagcgtgttgcgggaaaagtgatcttcgaaacgcaatcgacccacaaaatgctggcggcgttatcgcaggcttcgctgatccacattaaaggcgagtatgacgaagaggcgtttaacgaagcctttatgatgcataccaccacctcgcccagttatcccattgttgcttcggttgagacggcggcggcgatgctgcgtggtaatccgggcaaacggctgattaaccgttcggtggagcgggcgctgcattttcgcaaagaggtccagcggttgcgggaagagtctgacggttggtttttcgatatctggcaaccgccgcaggtggatgaagccgaatgctggcccgttgcgccaggcgaacagtggcacggctttaacgatgcggatgccgatcatatgtttctcgatccggttaaagtcactattttgacaccggggatggacgaacagggcaatatgagcgaggaggggatcccggcggcgctggtggcaaaattcctcgacgaacgtgggatcgtagtagagaaaaccggcccttataacctgctgtttctctttagtattggtatcgataaaaccaaagcaatgggattattgcgtgggttgacggaatttaaacgctcttacgatctcaacctgcggatcaaaaatatgctacccgatctctatgctgaagatcccgatttctaccgcaatatgcgtattcaggatctggcgcaagggatccataagctgattcataaacacgatcttcccggtttgatgttgcgggcattcgatactttgccggaaatgatcatgacgccacatcaggcatggcagagacagattaaaggtgaagtagaaaccattgcgctggaacaactggtcggtagagtatcggcaaatatgatcctgccttatccaccgggcgtaccgctgttgatgccaggagaaatgctgaccaaagagagccgcacggtactcgattttctactgatgctttgttccgtagggcaacattaccccggttttgaaacggatattcacggcgcgaaacaggacgaagacggcgtttaccgcgtacgagtcctaaaaatggcgggataacttgccagagcggcttccgggcgagtaacgtgctgttaacaaataaaggagacgttatgctgggtttaaaacaggttcaccatattgcgattattgcgacggattatgcggtgagcaaagctttctactgcgatattcttggtttcacgctgcaaagcgaagtctatcgcgaagcgcgcgactcgtggaaaggggatttggcgcttaatgggcaatatgtgattgagcttttctcttttccgttcccgccggagcgccccagccgaccggaagcttgcggcctgcgtcatctggcttttagcgttgatgacatcgatgcggcagtggcgcaccttgaaagccataacgtgaagtgtgaagccatccgtgtcgatccatacacgcaaaaacgcttcaccttctttaacgatccggacgggctgccgttggaactgtatgagcagtaaggcttgtcatcgccgcatttgcccggtaacgtgccgggcattgctactgtaaaatcgcaccatcatgacactcacgctcaatagacaacttctcacctcacgccagattctggtggcctttagcggcgggcttgactccaccgttctgctgcatcagttggtgcagtggcggacggaaaatccgggcgtcactctgcgcgctattcatgtgcatcacggtttaagtgccaatgccgatgcctgggttacgcattgcgaaaacgtctgccaacagtggcaggtgccgctggtggtcgaacgcgtacaacttgcgcaagaggggctggggattgaggcccaagcgcggcaggcgcgttatcaggcatttgcccgtaccctattgcccggcgaagtgctggtcaccgcgcaacatctcgacgatcaatgtgaaacctttctgctggcgctaaaacgcggtagcggccctgccgggctttcggctatgggggaagtctcggagtttgccggaacacggcttatccgcccgttgcttgcccgcacgcggggggaactggcgcagtgggcattggcgcatggtttacgctggattgaagacgaaagtaatcaggacgactcatacgatcgtaactttctgcgcctgcgcgtagtgccgttattgcagcagcgttggccgcattttgccgaagcaacggcccgcagcgccgcactttgtgctgaacaagagagtctgttggatgaactgctggcggatgatttagcacactgccaaacgtcgcaggggacgctgcagattgcgccaatgctagcgatgagtgatgcccgtcgcgcggcgattatccgccgctggctggcagggcagaatgcaccgatgccttcccgcgacgcgctggtgcggatctggcaggaagtggcgctggcgcgggaagatgcctccccctgtttacgttttggcgcgtttgaaatacggcgctatcagtcgcaactgtggtggattaactccgtcactgggcaaagcgaaaccattgtgccgtggcagacgtggctacaaccgctggaattaccggcggggctgggaagtgtacagcttactgcgggaggcgatattcgccctccgcgtgcagacgaagcggtcagcgtgcgtttcaaagcgccaggattgctgcatattgtcgggcgtaacggcggacgtaagctaaagaaaatctggcaagagctgggcgtgccgccgtggctacgtgacaccacgccactgctgttttatggcgaaacgctgattgcggcggcaggggtatttgtgacgcaagaaggtgtggctgaaggtgagaatggcgtaagttttgtctggcagaaaacgcttagttaagtgaaagccggataagacgcatcaaacgtcgcatccggcgaaagtcaatcaggactcgctcaccaccaccgtaccgatttccgggtggctaaagctggtaattttatccagacgtagctcacgggtttcgccagcggcctcgacgaccagatactccacatttttgcgggagactaaatcgctggcttttgcctgcaatttttcgccatctttcagctcaagtgtcagcattaaatgatgctggcaggcgagctcaagattatcgtaatcatcacaattgattggttgatacgtatcattcattgacataatcgctcaccagtaagtttgccgcagcgtatgctgctttttccctgacagcctcagaaagggcgtcgtcggcagccatttcattcagcactttcaaaacgcagcccagcgcgtccggaacgtatcctaagtctccgctggcgatttccgcgtaccgcttgcgtattaactcacaatatttttccacatgccctcctgtcagcactctgacttaaccgtggatgcaagtctaagcctacgaagataaactctgtttcgcaaggtgactataccacactcatttctgcaatatcagcgccgcaactgcacgtattccgttacaatggcctcctgattcgaaaggagttttcttatggcgcttaaagcgacaatttataaagcgacggttaatgtggccgatctcgaccgcaaccagtttctcgatgcctctctgacgctggcgcgccacccttcagaaacccaggagcgtatgatgctgcgcttgctggcgtggctgaaatatgctgatgaacgtctgcaatttacccgtggtttgtgtgccgatgatgagccggaagcgtggctgcgtaacgatcacctgggcattgatttgtggattgagctggggctgccggatgagcggcggattaagaaagcctgcacccaggccgcagaagtggtgctgtttacctataatagtcgggcggcgcaaatctggtggcagcaaaatcagagcaaatgtgtgcagtttgccaatctttccgtctggtatctggacgatgaacaactggcgaaagtaagcgcctttgccgatcgtaccatgacgctgcaggcaacgattcaggatggcgtgatctggttatcggacgataagaataatctggaagttaacttaaccgcctggcaacaaccttcatgattgtgatttcccgacatgttgctattcccgatggtgagcttgagatcaccgccattcgtgcgcagggcgcgggcgggcagcatgttaataagacctcaacggccattcatctgcgttttgacattcgggcgtccagcctgccagagtattacaaagagcgtctactcgccgccagccatcatttgatcagcagtgatggcgtgattgtcattaaggcacaggaataccgcagtcaggaactgaaccgcgaagccgcgctagcccggctggtggcagtgattaaagatttaacaacagaacaaaaagcccgacgacccacgcggcccacccgtgcatcgaaagagcgcaggctggcatcgaaagcacaaaaatcaagcgtgaaggcgatgcgcggcaaagtacgcagcggtcgggaataaaaagaaggaatagatggtgaaaaaagcgatagtgacagcgatggctgtaatcagcctctttactctgatgggatgtaataatcgggccgaagttgatgcgctttctccggcgcaggctgccgaactgaaaccgatgccgcaaagttggcgcggcgtgctgccgtgtgctgattgcgaaggaatcgaaacctctctgttcctcgaaaaagacggaacatgggtgatgaatgagcgttatctcggtgctcgtgaagaaccttcctccttcgcttcctacggtacatgggcgcgaaccgctgacaagctggtattaaccgacagcaaaggtgaaaagtcatattatcgggcgaaaggcgatgcgctggagatgctcgatcgtgaaggcaatccgattgaatcgcagttcaactatacgctggaaccggcacaatccagtttacctatgacgccgatgaccctgcgaggcatgtatttttatatggctgatgcggcgaccttcactgattgcgcgaccggaaaacgtttcatggtagcgaataacgcagagctggagcgtagctacctggctgcgcgcggtcacagtgaaaaaccggtgttactgtcagtagaaggtcactttacgcttgaggctaatccggatactggtgcgccaaccaaagtattagcgcccgatacggcgggtaaattttacccgaataaggattgcagtagtttggggcagtaaacctgcttaaggcagaaacaaacgcaaaattgcctgatgcgctgcgcttatcaggccttgtattatccctccagtgcagagaaaatcggccagttttctctgcctgcagtccgcatgccgtatcgggccttgggttctaacctgttgcgtagatttatgcagcggactgcctt

SEQ ID NO: 21 - DNA, 171836 bp, Escherichia coli
  source 1..171836: mol_type = genomic DNA
ggtgcttttgccgttacgcaccaccccgtcagtagctgaacaggagggacagctgatagaaacagaagccactggagcacctcaaaaacaccatcatacactaaatcagtaagttggcagcatcaccccattttcaataccgataccggtgcggcatttaacaatgttagcctggcgatcggtgactctctgggtacctcttacaaaagcggcatgggtattgaccagaaaatagtgaaagacacttctaccaataaaggcaaagcgaagcagacactgaactttaaagcctggctggtcggcgcagctgatgcgccagatctgggtaatttcgaagcaaataccaccttccagattacttacctgtaaggcatacccccatagcgacactgctatgggggatttaaatggattttgaccgaacaagaataaaaacggatagaaacgtgtatgcctgaccattctctttttcgattacggattcttccgtggtgcattgcgctggcaatgtcagggagttatagcagtgtctgggctgaagacgacattcagtttgattcccgttttctggaattaaaaggcgacacaaaaattgatctgaagcgtttttccagccagggatatgttgagcccggaaaatacaatttacaggttcaactaaataaacagccattggcggaagagtacgatatttactggtatgctggtgaagatgacgcgagcaaaagctatgcttgtctgacaccggaactggtagcgcagtttggtttaaaagaagacgtggcgaaaaatctgcaatggagccacgatgctaaatgcctgaaatccggtcaactggaaggcatggaaattaaggctgatttaagccagtccgcattagtcatttcactgccacaggcttacctcgaatatacttatcccgactgggatccgccttcacgttgggatgacggcatctccgggatcgtcgcggactacagcatcaacgcacaaacccggcacgaagaaaatggcggtgatgatagtaacgagatcagcggcaacgggacggtcggggttaacctggggccgtggcgtatgcgtgctgactggcagactaactatcaacatactcgcagtaatgatgacgatgaattcagcggcgatgaaactcaaaaaaaatgggagtggagtcgctactatgcctggcgggcgttaccatcattaaaagccaaactggcgctgggcgaggattacctcagatccgatatttttgatggttttaactatgttggtggcagtgtcagtactgacgatcaaatgttgcctcccaatctgcgcggctacgcgccagacatttccggcgtggcacacaccacagcaaaagtgaccgtcagccagatggggcgtgtgatttacgaaacgcaggttccggctggaccgtttcgtattcaggatcttggtgattctgtctccggtacgttgcatattcgcattgaagaacagaacggccaggtgcaggaatatgacatcagcaccgcctcgatgccatacctcactcgtccaggtcaggttcgctataagatcatgatgggccgtccgcaagagtggggacaccatgtcgagggtgaatttttttctggtgctgaagcttcctgggggatcgctaacggctggtcgttatatggcggcgcactgggagatgaaaactatcagtctgcggcgcttggcgtcggtcgcgatttgtctacattcggcgcggtcgcgtttgatgttactcactcgcacaccaaactggataaagacaccgcttatggcaaaggttcgctggacggtaactccttccgtgtgagttattccaaagactttgaccagctcaacagccgcgttacttttgctggatatcgcttctcggaagagaactttatgaccatgagcgagtatctggatgccagtgacagcggaatggtacgcacgggcaacgacaaagagatgtacaccgccacttataaccagaacttccgcgatgcgggtgtttcggtttatctcaactatacccgccatacctactgggatcgcgaggagcagacaaactacaacatcatgctctcgcactatttcaatatgggcagtattcgtaatgtcagcatctcgatgactggctaccgttacgagtatgacaaccaggccgacaaaggcatgtacatttcgctcagtatgccgtggggcgacaacagtaccgttagctataacggtaactatggcagtgggacggacagcagtcaggtcggttatttcagccgtgtcgatgacgcgactcactatcagttgaacgtcggcaccagtgacaaacacaccagcgttgacggctattacagccatgatggttcgctggcgcaggttgacctcagtgcgaactaccatgaagggcaatacacctctgcgggcttgtcgttacagggcggcgcaacgcttactgcccacggtggcgcacttcaccgtacccagaatatgggcgggacacgcttgttgattgatgccgatggcgttgccgatgttccggtagaaggtaacggtgctgctgtttataccaatatgtttggtaaagccgtcgtttctgacgtcaataactattaccgcaatcaggcgtatatcgacctcaacaaactgccggaaaacgccgaagcaacccagtcggtggtacaagccacgctaactgaaggggcgattggctaccgcaaatttgccgtcatcagtggtcaaaaagcgatggcggtgctgcgtttacaagacggcagccatcctccgtttggcgcagaagtaaaaaatgataacgagcagacagtgggccttgtcgatgatgacggcaatgtttatctggctggggtgaaacctggcgaacacatgagtgtgttctggagtggtgttgcgcattgcgatatcaacctgccggacccgctgcctgccgatctgtttaacggcttgttactgccatgccagcataaaggcaacgtcgcgccggttgttcctgatgacataaagcctgtcattcaggagcagacgcaacaggtgacacccaccaatccccctgtttctgtttcagctaaccaataacgtgattaaggaatgatccatgtctgatttactttgctctgccaaattgggtgctacgacgctagcgttactgcttagcgctgccagtttgtctgcccaggcttctgtaacgccagatcgtacccgtttgatatttaatgaaagcgacaaatcaatcagcgtgacgttgcgcaataacgatccgaaactgccttatctggcccaaagctggatcgaagatgaaaagggtaacaagatcagttcaccgttaactgttctgccaccggtgcaacgcatcgattcaatgatgaacgggcaggtaaaagtgcagggaatgccggatatcaacaaattgcctgccgatcgtgaaagcctgttctacttcaacgtgcgtgagatcccgccaaaatcaaacaaagccaacacgctgcaaatagcactacaaacgcgtattaagttgttctggcgaccgaaggcgctggagaacgtcagcatgaaaaacccctggcaatataaggttactttaacccgcaacggtcaggaatttaccgtcaataacccgacgccgtattacgtcattttcagtaatgccagcacacagaaaaatggcaatccggcagccggtttctcgccaatagtgatgtcgccgaaaacctctgcaccgctgaatgtgaagatgggtagcgtgccggtactgacctatgtcaacgactatggcgctcggatgccgctctttttcacttgcaacggtaacagttgccaggtcgatgaagagcagagccgcaaaggctgaggccgggagagccagtatgaaaggatcttgttctgtctgggcggtaactgggttactgatatgttgtgttggtagcggctttgcagttgcagcgagtaagtcagtaagtatgaatttacgggtgcttgtcgatgcccctcctccttgtacggtaaatggtgcggcagttgagtttggtaatgtattcattaataagatcaatggggttgattataaacgtcccattgactactcgcttgtttgtaacaatctggcaatggatgacctgcgtctacagatgcaggcgacaacggtcgtgattaacggtgaaacagttatcagcacgggtattcctgggtttggtattcgggttcagaaaagtagtgatcacacaatactcgacttaaactctggctcatggttgccatttaatttttcctcgggagttcccgttctggaagctgtgccggtgaaacagagtggtacaacgttagcggcagctgaatttaacgccagtgccacaattgtggtggattaccaatgaaacggatctcgcttattttgctgtggggcttttgctcgatggcactctcaaacgtctcttttcacggttatttagtgcagccgcctaactgcacgattagcaacgctcaaaccattgaaataacttttcaggatgtgcttattgatgacattaatggcagcaattatgagcaaaccgtgccgtattccattacctgcgatacggcggttcgcgacccattaatggaaatgaccttgagctggagtggcacaccaagcgattttgataatgctgcagtaagcagcaatatcactggtttaggcattcagctcaaacaggcagggcagagttttacgatcaatacgccacttgtggtgaatgaaaccgatttaccggtgttaacggctgtgccagtaaaaaagagtggtgtcgttttgccagaggcggactttgaggcctgggccacgttacaggtagattaccaatgaagaaaaagcgtacgttgttttttattagtagcctgatgttgctgggcagtggaaccacaatagcaggagataatttgcactttaccggcaatttaatcagtaaatcgtgtacgccagtgattaatggtagccagttggcagaagtacattttcctgccattgccgccagcgatttaatgaaccttgggcagtcagagcgagtgccattggtgtttcaattgaaagattgtcatagttctacatcgtttaatgtcaaagtaacgttgacaggaacagaagatagtgctttacccggctttctggcctttgactcctcgtcatcagcatccggcgctgggattggtattgaaactgcggcaggcacatcggtgccaatcaacaatacaacaggcgtcacgctcccactgaatcagggaaataacagcctaaattttaatacctggttacaggcaaagagcgggcgagatgtaacgtccggagactttagtgccatagtgacggcaacctttgagtatttctgaaatgaaaaaatggaccataattttcgcgagcctaatgctgctcgttctgagtgttgtcggcgcatctaaaagttatgctggagataaacttatgagtgcgagttttgacagtgtgagagtttattatgccatggacaaggtaaccggtgctgtagcgagcagtgttttcaatgttacggtgataacgccaaaggaggttgcatatgggaaatatgattcttttgcgtataaaggcgatacgttgcgggttatttcctggtctgggtcgggttcagctccaactttggtactgactgactttgatacaattaataactcaaattgccctggcatagatacgaaaatttttcgttgtgcatatatgacgtttaaaattaccgttgcatctgatgattatggttgcccttggatcgcatccttttattcctatacagatttacccggatttggaagctatacggcccctacagtgcataacacaatatgcccaacgataccggtcgcttcatacgatatctcctggagtgaaaattatgtcagccataataaggcgttacgaattcagtccacggggtcaacagtgaccaccacgctttcgacctacctgatggaaggcggcagactctgtgatggcagtaatttttctgataatgatggcagaggagcatactgccgcgcggtatcagaattgttaacctttacctcttacggttgtgataaatcaacggtaacggttacgccaactcgtcatccggtaacggataaagtacttcacgatattgtggtgaatgtgaataccagtagtgggcaaccgattgattcgacgtgtcgttttcagtatgtattgaatgaactgtagttcgtagtattgctctgatgcgtcttatcaggcctacgaagtgaattgcaatttattgaattatcacatatttgtaggccggataaggcgtttacgctgctccggcatttgctgccagcattcagggcaactccggcggcaaccactcttccacttcaatcaacaccaacaaagccgcatcaccgccgtactctttcggtgcctggtgaaatgccatcacatgcggatgttgtgccagccacagcggtgtttgctgcttcaatatgtgcttcccgtgaccatgcatcacgcaggcacaaaacacatgttcgcggcggcaggcagcaatcaatgcgcctaattcctgcttggcttgtagctgcgtcagaccgtgcaaatccaaaaacaactccggtgaataatcgccgcggcgcagtttcttcgcctcaaaatggctgacatccgggcgaacatatttcaccggaccttcggtattcaataacggctgaaactcatcggaaaaataatggctggcatcggcctgctcctgaatcaagcgtttcaccggcacttcgctaattttcttacgctgcggtcggtggacaatcgtgtcctgcttaatcttgcgagtccccgccatcaactggcgaaacagagcctggtcctcctcgctaagtgttgttttctttttcatttatctgtctcaatttctaattttcctacagtttacccgactcgtagcgcaatcgatcgttttaaacgtatttttcctcactcaccgcgcgtgaatgctgatttatcgtcatcttcatggcaaactagccgccgaaattattgcgatcatgccctggaggaatacgtggataaaattttcgttgatgaagcagtaaatgagctgcaaaccattcaggacatgttgcgctggtcggtgagccgcttcagcgcggcaaatatctggtacggtcacggcaccgataacccgtgggatgaagccgtacagctggtgttaccatcgctctacctgccgctggatatcccggaagatatgcgcaccgcgcgtctgacctccagcgaaaaacaccgtattgttgaacgcgtgatccgccgcgtcaacgagcgcattccggtggcttacctgaccaacaaagcctggttctgcggtcatgaattttacgtcgatgaacgcgtgctggtgccgcgctcgccgattggtgaactgatcaacaataaatttgccggactcatcagcaagcaaccgcagcacattttagatatgtgtaccggtagcggctgcatcgccattgcctgtgcttatgccttcccggatgcggaagtcgacgcggtggatatctctcccgacgcgctggcggttgctgaacagaacatcgaagaacacggtctgatccacaacgtcattccgattcgttccgatctgttccgcgacttgccgaaagtgcagtacgacctgattgtcactaacccgccgtatgtcgatgcggaagatatgtccgacctgccaaacgaataccgtcacgagccggaactaggcctggcatctggcaccgacggcctgaaactgacgcgtcgcattctcggaaacgcggcagattaccttgcggatgatggcgtgttgatttgtgaagtcggcaacagcatggtacatcttatggaacaatatccggatgttccgttcacctggctggagtttgataacggcggcgatggtgtgtttatgctcaccaaagagcagctgctggcggcccgtgaacatttcgcgatttataaagattaagtaaacacgcaaacacaacaataacggagccgtgatggctggaaacacaattggacaactctttcgcgtaaccaccttcggcgaatcgcacgggctggcgctcggctgcatcgtcgatggtgttccgccaggcattccgctgacggaagcggacctgcaacatgacctcgaccgtcgtcgccctgggacatcgcgctataccacccagcgccgcgagccggatcaggtcaaaattctctccggtgtttttgaaggcgttactactggcaccagcattggcttgttgatcgaaaataccgaccagcgttctcaggattatagtgcgattaaggacgttttccgtccaggccatgccgattacacctacgaacaaaaatacggactgcgcgattatcgcggcggtggacgttcttccgcccgcgaaaccgccatgcgcgtagcggcaggggcgattgccaaaaaatatctcgctgagaaatttggtattgaaatccgcggctgcctgacccagatgggcgacattccgctggaaatcaaagactggtcgcaggttgaacaaaatccgttcttctgcccggacccggataaaatcgacgcgttagatgaactgatgcgcgcgctgaaaaaagagggcgactccatcggcgcgaaagtcaccgttgttgccagtggcgtccccgccggacttggcgagccggtatttgaccgcctggatgccgacatcgcccatgcgctgatgagcatcaacgcggtgaaaggcgtggaaattggcgacggctttgacgtagtggcgctgcgcggcagccagaaccgcgacgaaatcaccaaagacggtttccagagcaaccatgcgggcggcattctcggcggtatcagcagcgggcagcaaatcattgctcatatggcgctgaaaccgacctccagcattaccgtgccggggcgcactattaaccgctttggcgaagaagttgagatgatcaccaaaggccgtcacgatccctgtgtcgggatccgtgcagtgccgatcgctgaagcgatgctggcgatcgttttaatggatcacctgttacggcagcgggcgcaaaatgccgatgtgaagactgatattccacgctggtaaaaaatgaacaaaaccgcgattgcgctgctggctctgcttgccagtagcgctagcctggcagcgacgccgtggcaaaaaataacccaacctgtgccgggtagcgcacaatcgataggcagtttttctaatggctgtattgtcggcgctgacacgttgccgatacagtccgaacattatcaggtcatgcgtaccgatcagcgtcgctatttcggtcacccggatctggtgatgtttatccagcgtctgagtagccaggtgagcaatctgggcatgggtacggtgctgattggcgatatggggatgcccgctggtgggcgtttcaacggcggtcatgccagccaccagaccggactggatgtcgatatctttctgcaactgccgaaaactcgctggacctccgcgcagctcttgcgcccgcaagcactggacttagtttcccgcgacggtaaacacgttgtctccacgctgtggaagccagaaattttcagcttgatcaaactcgccgcccaggacaaagacgtcacgcgcatttttgttaatccggcgattaaacaacaactttgccttgatgcgggcaccgatcgcgactggttgcgcaaagtgcgaccctggttccagcatcgtgcgcatatgcatgtacgattacgttgtcctgccgatagtctggagtgtgaagatcaacctttaccgccaccaggcgatggttgcggggcagaactgcaaagctggtttgaacctccaaaaccgggaacaacaaagcctgagaagaagacaccgcctccgttgccgccttcctgccaggcgctactggatgagcacgtgatctaatggaaacgtttaatagcctgtttatggtttccccgctgttgctgggtgttctcttttttgtcgccatgctggcgggatttatcgactcgattgccggtggcggtgggttactcaccattccggcattgatggcggcagggatgtctcccgctaatgcgctggcaaccaataaactgcaagcctgcggcggctctatttccgccactatctactttattcgccgcaaagtggttagtttaagcgatcagaaactcaatattgccatgacctttgtcggctcaatgagcggcgcactgttggtacagtacgttcaggctgatgtcttacggcagattttgcccattctggtgatttgtatcggcctctatttcttgctgatgccaaagctgggtgaagaagatcgccagcgccggatgtacggtttacccttcgcgttaattgccggtggctgcgtcggtttttatgacggattctttggcccggctgccggatcgttttacgcgctggccttcgttacgctgtgcggattcaacctcgccaaagccacggctcacgccaaattactcaacgcaacgtcaaacattggcggtctgctgctgtttattctcggcggcaaagtgatttgggcgacgggctttgtgatgctggtggggcagttcctcggcgcgcgcatgggttcacggctggtgttgagcaaaggacaaaagctgatccgcccgatgattgttatcgtctcggcggtgatgagtgccaaattactttacgatagccacggacaggagatcctccactggttggggatgaactaatgaacagtacacaccactatgagcagttgattgaaatttttaatagctgctttgccgatgaatttaatacccgtctgattaaaggcgacgacgaaccgatctatcttcctgctgatgcggaagtaccgtataaccgaattgtctttgcccacggcttttatgccagcgcaattcatgagatttcgcactggtgtattgccggaaaagcgcgccgtgagctggttgatttcggctactggtattgcccggatgggcgtgatgcccaaacgcaaagccagtttgaagatgttgaagtgaagccgcaggcactcgactggttgttctgtgtggcggcgggatatccgtttaacgtcagttgcgacaatctggaaggcgacttcgaaccggatcgtgtggtgtttcaacggcgggtacatgcgcaggtgatggattacctagcaaacggcattcctgaacgcccggcacgcttcattaaagcactacaaaattattatcacacgccggaacttacggcggaacagttcccgtggccggaagcgctcaactaaagccagcgccacgttttacaatgaggaaagaagatgatcgcggagtttgaatcacgcattctggcattaatcgacggtatggttgaccatgccagtgatgatgagttgtttgccagtgggtatttgcgtggccacctgacattagccatcgcagaactggaaagtggtgatgaccactccgctcaggcggtgcatacgaccgttagccagagtctggaaaaagccattggtgccggtgaattgtcgccgcgtgaccaggcgctggtgaccgatatgtgggaaaacctgtttcagcaggcgtcacagcagtaagttgcggcgtctggagcaccatgcctgatgcgacgcttatcgcgtcttatcaggcctacacgtcacacgtaggtcggataaggcgttcacgccgcatccggcaaacactgcgagagcagattacctcgccttaaccgctttacccttcaacaatttccgcacccataaccgattcgggtttaacgccgccagcgtactggcatccatcggaatcggttcgtcgctcatctgcgccgccagaatctcggcacacagcggggcagaacacaaaccgcgagaacctaaagccgcaaacataaagagatcgtcaaaaaccggcgcgcttaccgcctcatctttctgctccgccaacgacgcatattccacgagtgttgcctcataatcgggaacattgcctaccattggcagatgatcgcgggtggcacaacgcacaccgcagcgcgcctctttatcactgacatcaacctcttttgcccactgtgcctgcgggaaacaatcaatcaaccgctggcgattctgctgctgatcgtcctcactgtacgccgtatcttcgctgccgcgatgataactggcaccaatacaatgatgttgattcgccggattttgtggcgtgagataaccgtcatagcacagcacctgcttcagctctgccaattccggcgttgtcggaatatggctgacctgcccggcaaccgaatacaccgggagagtcgacgtatggctgaatcggctgatttgatgcccgttcgccagtaccactacgctgtgtgttgcttgctgatctcctgcaaaattcaacaaccaacagtcatccttacgggataaattctgtaactgatattgataataaatctgcaaaccctgctgttgcgccagttccagcacattacgggtcagttctgctgggcacagccaaccaccttgcggataagtaatgccgctgcaatttgtcgcaacgcccgtaatttgttcaaccgcatttgcctcaacggctacagccagttctgcgggtaaatccattgacaacatctgtgcgattttatgctggcttttctcatcccagcctaactgcgtgacgccgcaccagtcatgatcaaatttaacgggtaattggtcgtaaaaccgacgagcaaaagtaaacgcattagagaaaaagcggtttagcgcctcatcgtgtttgcttaataacggatacagcgccccctggcgattgccggaagcacccagtgcgggggcctcatccgcgcaataaagcgttacctgccagccgcgccgtaatagcgccagcgacaacaacgcgctggcaataccaccgccgataatcgccgcttcccgtttgctactgcccgtgcggttaaaccacggcgcggagcaggggagcggtaatgtctgttccatcaccccgcaaagcatttcccgtttgcgcccaaagcccttacgtttttgcatcgtgaatccggcgtcctgcaaaccgcggcggacaaaaccggcagacgtaaatgtcgccagcgtgccgcccggacgcgccaaccttgccatggcgttaaacagattttgcgtccacatatccgggtttttcgctggcgcaaagccgtccagaaaccaggcatctactttttgatttagcgaatcgtccagttggctggtcagttcgttaatatcgccaaaccataaatccagcgtcacgcggccttcatcgagcaataaacgatggcaaccgggcaagggcattggccactgcgcctgaagttgttctgcccacggagccagttccggccagtgttgatgcgctaaggctaaatccgcacgggtgaggggaaatttctcaaaactaatgaaatgtaagcgttgtaattgcgcttgcggatgcgcttcgcgaaactgatcaaatgcctgccatagcgtcaggaagtttaatccggtgccgaagccgctctctgctaccacaaacagaggatgtggatgctcaggaaagcgtacctctaattggttgcctcccagaaaaacataacgcgtctcttccagcccgttatcgttggaaaaatagacatcgtcaaaatctcgggaaacaggtgtaccctcagcattaaattcgaggttggcaggttgtatggagtagtgtttcacgtaagttactcgtcttacaggcggtggctcgatcttagcgatgtgtgtaaggctgcgcaaatttctctattaaatggctgatcggacttgttcggcgtacaagtgtacgctattgtgcattcgaaacttactctatgtgcgacttacagaggtattgaatgaaacgtgcagtgattactggcctgggcattgtttccagcatcggtaataaccagcaggaagtcctggcatctctgcgtgaaggacgttcagggatcactttctctcaggagctgaaggattccggcatgcgtagccacgtctggggcaacgtaaaactggataccactggcctcattgaccgcaaagttgtgcgctttatgagcgacgcatccatttatgcattcctttctatggagcaggcaatcgctgatgcgggcctctctccggaagcttaccagaataacccgcgcgttggcctgattgcaggttccggcggcggctccccgcgtttccaggtgttcggcgctgacgcaatgcgcggcccgcgcggcctgaaagcggttggcccgtatgtggtcaccaaagcgatggcatccggcgtttctgcctgcctcgccaccccgtttaaaattcatggcgttaactactccatcagctccgcgtgtgcgacttccgcacactgtatcggtaacgcagtagagcagatccaactgggcaaacaggacatcgtgtttgctggcggcggcgaagagctgtgctgggaaatggcttgcgaattcgacgcaatgggtgcgctgtctactaaatacaacgacaccccggaaaaagcctcccgtacttacgacgctcaccgtgacggtttcgttatcgctggcggcggcggtatggtagtggttgaagagctggaacacgcgctggcgcgtggtgctcacatctatgctgaaatcgttggctacggcgcaacctctgatggtgcagacatggttgctccgtctggcgaaggcgcagtacgctgcatgaagatggcgatgcatggcgttgataccccaatcgattacctgaactcccacggtacttcgactccggttggcgacgtgaaagagctggcagctatccgtgaagtgttcggcgataagagcccggcgatttctgcaaccaaagccatgaccggtcactctctgggcgctgctggcgtacaggaagctatctactctctgctgatgctggaacacggctttatcgccccgagcatcaacattgaagagctggacgagcaggctgcgggtctgaacatcgtgaccgaaacgaccgatcgcgaactgaccaccgttatgtctaacagcttcggcttcggcggcaccaacgccacgctggtaatgcgcaagctgaaagattaattcgcagtaggtcggagtagacgcgccagcgtcgcatccgacgttacgcgccaatgcggcctccggcactaacgcaaaagggaacctgatggttccctttttcacatcattgacaatcgccgccagttccaggcaaacttcccgctttgtcgatttccttctgaaaagacgtacgcgttaaatcctgccaacgcaccgtaaccctgaaaccagagagatgagacggggatactcctcgccttgcgctgcattctggagtaatgcatgactgctgtaagccaaaccgaaacacgatcttctgccaatttttcgctcttccgcatcgcttttgcggtttttctcacctacatgaccgtagggttgccgttgccggttatcccgctgtttgttcatcatgaactgggctatggcaataccatggtcggcattgccgtcgggattcagtttctggctacggtgctgacgcgtggttacgccgggcgactggccgatcaatatggtgcaaaacgttcggcgcttcagggaatgttagcttgtggtctggctggcggcgcgttgctgctggcggcgattttgcctgtctccgcaccgttcaaatttgctctgttggtcgtcgggcgtttgattcttggctttggtgaaagccagttactgacaggcgctctgacctggggactaggcatcgtagggccaaaacactctggcaaagtgatgtcatggaacggaatggcgatttacggtgccctcgctgttggtgctccgcttggcctgttgattcatagccattacggttttgccgcactggcgatcaccacaatggtattacccgtactggcgtgggcctgtaacggcacagtgcgcaaagtaccggccctggcgggagaacgtccatcgctgtggagcgttgtcgggcttatctggaaaccagggttaggtctggcactacaaggcgttggttttgctgttatcgggactttcgtttcgctctactttgccagcaaaggatgggcgatggcgggctttactcttaccgcgtttggcggcgcatttgtcgtgatgcgcgtcatgtttggctggatgccggaccgttttggcggcgtgaaagtggcgattgtctctctgcttgtagaaacggtgggcttgttgctgctctggcaagccccaggtgcatgggtcgcattagcgggcgcggcgttaaccggagccggatgttcgcttatctttcctgcgctgggcgtggaggtggttaaacgcgtcccctcacaagttcgcggcaccgcactgggcggttacgccgcgtttcaggatatcgccctcggcgtctccgggccgctggcgggaatgctggcgaccacgtttggttactcttcggtatttcttgccggggcgatctctgcggtgctgggtattattgtcacgatactgtcatttcgtcggggttaacgaaccagccagaccagcatcaggataatcgcgactaacagtatccacagcgcgggacgcgttgccatattttgcaacgtgtccatcatcggtggaaaaggattaagcagcggttgcataacacgcggatcaatccctttaacccgccgttgataaagctgattaagaatatcctcggcctgggcagaagaaagcgatgattgcgcagaaagaccatatttttgctggatatatgccgataacgccgccagttcactggcatctaaaggttgttttagcgtcatctgtagtgattccagcgtcggcgtattttgctggcttagcgtctgacgcgcctgtagccaggtcaccagatggttaaacagtttcgctggaattaactcgccatctttcaccccggaaagttccagcatcgattgccagatctgtttgctgggttcccccgttgccgccgcaagtttggtcaccagctgttttagcgcattgtgctccgccggtaataaaggacggtcggtcgcctcgcgctgctgtggttgcggaataaccatcttcccttcctgcaacagggtgagaatggtttttaattgctccggtgagagctgattcagcggcgtctgaccaaagttatgacggatataatccgtgaccgcctgacgattattccccagacgtaaatactcccctaattgcgctaaaagctggcgggcagaatggcttttttgcgcggccagcagacgttgcgccagattatgctcagcggcagggaagtgacgcgaaagcagcggtgaatctcccgacagaccaatatcgtgcctgatacccgcccacagttctgctctttgctgttgcgtcagtgaggtcactttcgtcattaagctttccagcgaagtacgttgctgactggataaaggctgattgcccgcgccagacggcaggttatctccctgacctggtggttgcccaggaggagggccggaaataggttgtatcattacgtatccttatacctgaaatcttcgcaagtatgcctggccgcgagattatggcacacttgtccggttaactctcgtctcatacaggtaacacaaacgtgaaaatccttgttgatgaaaatatgccttatgcccgcgacttatttagccgtttgggtgaggtgaccgcggttcccgggcgtccaatccccgtcgctcaactggcagacgcggatgcgctgatggtgcgttcggtcacgaaagtgaatgaatctttgctggcaggaaaacccattaaatttgttggcactgccactgcggggaccgaccatgtcgatgaagcatggttgaagcaggcgggaattggtttttccgctgcacctggctgtaatgcgattgcggtggtggaatatgttttctcctcactactgatgcttgccgaacgcgatggattttcactgcacgaccgtacggtggggatcgtgggcgttggttacgttggacgtcgattgcaggcgcgactggaagcgttagggattaaaacattgctttgcgatccgcctcgcgctgaccgtggggatgagggtgatttccgctcgctggatgaattagttcagcatgcggatattctgactttccatacgccactcttcaaagatgggccgtacaaaacgctgcatctggcggatgaaaaactgatccgtagcctgaagccgggagcgattctgattaacgcctgccgtggcgcagtcgtcgataatactgcgttgctgacctgcctgaatgaaggccagaagttaagcgtagtgctggatgtctgggaaggcgaaccggaacttaacgtggagttgctgacaaaagtggatatcggcacgccgcatatcgcaggttataccctggaaggtaaagcacgcggtactacgcaagtgtttgaagcctatagcaagtttattgggcatgaacagcacgttgcgctggatacattactgcccgcgccagagtttggtcgcattacgctgcatggcccgctcgatcaaccgacgctgaaaaggctggtgcatttggtgtatgatgtgcgccgcgatgacgcaccgctgcgtaaagtcgccgggataccgggtgagttcgataaactgcgcaaaaactatcttgagcgccgtgaatggtcatctctgtatgtaatttgtgatgacgccagtgcggcatcattgctgtgtaaactgggttttaacgccgttcatcatccggcacgttaatctcttcttcatgctctctgctgtaacattggcagggagctttgctatttctggagtaaaccaccatgtctgaaggctggaacattgccgtcctgggcgcaactggcgctgtgggcgaagccctgcttgaaacgctggctgaacgtcagttcccggttggggaaatttatgcactggcacgtaacgaaagcgcaggcgaacaactgcgctttggtggtaaaacaatcaccgtgcaggatgccgctgaattcgactggacgcaggcgcagctggcattttttgtcgcaggcaaagaagctaccgctgcctgggttgaagaagcgaccaactcaggttgcctggtgatcgacagcagcggactgtttgctctcgaacccgacgtaccgctggtggtgccggaagtaaacccgtttgtactgaccgattaccgcaaccggaatgtcatcgccgtaccagacagtctgaccagccagctgctggcggcactgaaaccgttaatcgatcagggcggtttgtcgcgtatcagtgttaccagcctgatttcagcctccgcccagggcaaaaaagcggtcgatgcgttagcggggcagagtgcgaaattgctcaacggcattccgattgacgaagaagatttcttcggtcgtcaactggcgttcaatatgctgccgttgttgccggatagcgaaggtagcgtgcgtgaagaacgtcgtatcgttgacgaagtacgcaaaatcctgcaggacgaagggctgatgatttcggcaagcgtcgtccaggcaccggtattctacggtcatgcccagatggtcaactttgaagcactgcgtccgctggcggcagaagaagcgcgtgatgcgtttgctcagggcgaagatattgtgctctctgaagagaacgaattcccgactcaggtaggggatgcttcgggtacgccgcatctttctgttggctgcgtgcgtaatgactacggtatgccggagcaagtccagttctggtcggtggccgataacgttcgctttggcggcgcgctgatggcagtaaaaatcgccgagaaactggtgcaggagtatctgtactaatgtccgaccagcaacaactgccagtttataaaattgcgctgggcattgagtacgacggcagtaagtattacggctggcaacggcagaatgaagtccgcagtgtgcaggagaagctggaaaaggcgctctcccaggtggcgaacgaacccatcaccgtcttctgcgccgggcgtactgacgcaggggtacacggtaccgggcaagtggtgcatttcgaaacaaccgcgcagcgcaaagacgcggcgtggaccttgggcgtaaatgcgaatttacctggtgacatcgccgtgcgttgggttaaagctgtacctgatgattttcatgcccgatttagcgccacggctcgccgttatcgctacatcatctacaatcatcggctgcgcccggcggtactgagtaaaggggtaacccatttttacgaaccgctggacgctgaacggatgcatcgggctgcgcaatgcttgctgggcgagaatgatttcacctcgttccgtgcggtgcagtgccagtcccgaaccccgtggcgtaacgttatgcatattaatgtcacgcgtcacggtccttatgtggtggtagatatcaaagcgaatgcctttgtacatcatatggtcaggaatattgtcggcagcctgatggaagtcggtgcccacaaccagccggagagctggatagcagagttgctggcggcaaaggacagaacgctggcggcagcaacggcaaaagcggaagggctgtatctggtcgcggtggattaccctgaccggtatgatcttccaaaaccgccaatgggcccgctatttctggcggactaacgagaataatgctcggaacatttcaggctgtagccaacgtagttacagcctgaaagatgacgagtacaaggcataggcaaatatggacctgatttatttcctcatcgattttatcctgcacattgacgtgcatctggcagagctggtcgcggagtacggcgtctgggtttatgccattctgtttttgattctgttctgcgaaacggggctggtggtaacgccattcctgcctggtgattcgctgctgtttgttgctggtgcattggcgtcgctggaaactaacgatctcaatgtccatatgatggtggtgcttatgttgattgccgctattgtcggtgatgcagtgaactataccattggacggttatttggtgacaaactgttcagtaacccggattcgaaaatctttcgtcgcagttatcttgataagactcatcagttttacgagagacatggcggcaaaacgattattctcgcccgttttgtaccgatcgtcagaacgttcgcgccgtttgttgcgggaatgggccacatgtcgtaccgtcatttcgccgcttataacgtgatcggcgcactgttgtgggtactgatttttacctacgcgggttatttcttcggcacgctccccttcattcagagcaaccttaagctgatgattgttggcattatttttgtttcaatattgcctggggttttcgaatttattcgtcacaaacgcgctgcggcacgcgccgcaaaataaaaagtaactccgcggttcgaccacttttttatccaaagtttcgggctgttatgttttaatgtgcaacattcatggtctgttgggggcaaaaatggcattatgcgtccccaaagataaaactggcatcgaaccaggttcagacagaaaggtccctaatgagctggattgaacgaattaaaagcaacattactcccacccgcaaggcgagcattcctgaaggggtgtggactaagtgtgatagctgcggtcaggttttataccgcgctgagctggaacgtaatcttgaggtctgtccgaagtgtgaccatcacatgcgtatgacagcgcgtaatcgcctgcatagcctgttagatgaaggaagccttgtggagctgggtagcgagcttgagccgaaagatgtgctgaagtttcgtgactccaagaagtataaagaccgtctggcatctgcgcagaaagaaactggcgaaaaagatgcgctggtggtgatgaaaggcactctgtatggaatgccggttgtcgctgcggcattcgagttcgcctttatgggcggttcaatggggtctgttgtgggtgcacgtttcgtgcgtgccgttgagcaggcgctggaagataactgcccgctgatctgcttctccgcctctggtggcgcacgtatgcaggaagcactgatgtcgctgatgcagatggcgaaaacctctgcggcactggcaaaaatgcaggagcgcggcttgccgtacatctccgtgctgaccgacccgacgatgggcggtgtttctgcaagtttcgccatgctgggcgatctcaacatcgctgaaccgaaagcgttaatcggctttgccggtccgcgtgttatcgaacagaccgttcgcgaaaaactgccgccaggattccagcgcagtgaattcctgatcgagaaaggcgcgatcgacatgatcgtccgtcgtccggaaatgcgcctgaaactggcgagcattctggcgaagttgatgaatctgccagcgccgaatcctgaagcgccgcgtgaaggcgtagtggtacccccggtaccggatcaggaacctgaggcctgataactgataagggcagggccactggctctgcccttttgctattctcaccgtaacgaatcagcggataccatgattatcaaacgcactcctcaagccgcgtcgcctctggcttcgtggctttcttatctggaaaacctgcacagtaaaactatcgatctcggccttgagcgcgtgagccaggtcgcggcgcgtcttggcgttctgaaaccagcgccatttgtgtttaccgttgcgggtacgaatggcaaaggcaccacctgccgtacgctggagtcgattctgatggcggcagggtacaaagtgggcgtctacagttcgcctcatctggtgcgttataccgagcgcgtacgtgtgcagggtcaggaattgccggaatcggcccacaccgcctcttttgcggagattgaatcggcacgcggtgatatttccctgacctatttcgagtacggtacgctgtcggcgttgtggctgttcaaacaggcacaacttgacgtggtgattctggaagtagggctgggcggtcgtctggacgcaaccaatattgtcgacgccgatgtcgcggtagtaaccagcattgcgctggatcataccgactggctggggccagatcgcgaaagtattggtcgcgagaaagcaggcatctttcgcagcgaaaaaccggcaattgtcggtgagccggaaatgccttctaccattgctgatgtggcgcaggaaaaaggtgcactgttacaacgtcggggcgttgagtggaactattccgtcaccgatcatgactggacgtttagcgatgctcacggcacgctggaaaatttgccgttgccgcttgtcccgcaaccgaatgccgcaacggcgctggcggcactgcgtgccagcgggctggaggtcagtgaaaatgccattcgcgacgggattgccagcgcaattttgccgggacgtttccagattgtgagcgagtcgccacgcgttatttttgatgtcgcgcataatccacatgcggcggaatatctcaccgggcgtatgaaagccttaccgaaaaacgggcgcgtgctggcggttatcggtatgctacatgataaagatattgccggaactctggcttggttgaaaagcgtggttgatgactggtattgtgcgccactggaagggccgcgcggtgccacggcagaacaactgcttgagcatttgggtaacggcaaatcatttgatagcgttgcgcaggcatgggatgccgcaatggcggacgctaaagcggaagacaccgtgctggtgtgtggttctttccacacggtcgcacatgtcatggaagtgattgacgcgaggagaagcggtggcaagtaagtttcagaatcggttagtgggcacgatcgtgctggtggcgctgggggtgattgtacttccagggctgctggacgggcagaaaaaacattatcaggatgagtttgcggctatcccgctggttccaaaagcgggcgatcgcgatgagcctgatatgatgccagccgccacccaggcgttgccgacgcagccgccggaaggcgcagcggaagaggtgcgggcaggtgatgccgcagcaccgtcgctcgatccggccactattgcagccaataacaccgagtttgaaccggaacctgcaccggtcgccccaccgaagccgaaaccggtggagccgcctaaaccaaaggttgaagcaccacctgcgccgaagccagaaccgaagccggtcgtggaagaaaaagctgcaccgacgggtaaagcctatgttgtgcaactgggtgcgctgaaaaatgccgataaagtgaatgagattgtcggtaagctgcgcggtgccggttatcgggtttatacgtcgccatccacgccagtgcagggtaaaattacccgtattctggttgggccggatgcctcgaaagataagctgaaaggttcgctgggtgagttgaagcaactttctggcttaagtggcgtggtaatgggctatacgccgaattaatacagtcttgcctgatgcgacgctggcgcgtcttatcaggcctgggcagtgttagaaccgtaggtcggataaggcgtttacgccgcatccgacacgcattgcacgatgccgcaaaggcataaaaagtcgatggcgttgaatattttttcagcgccatttttattgatgcgtgggaaggaaatccctacgcaaacgttttctttttctgttagaatgcgccccgaacaggatgacagggcgtaaaatcgtgggacacatatggtctggattgattacgccataatcgcggtgattgctttttcctctctggttagcctgatccgcggctttgttcgtgaagcgttatcgctggtgacatggggttgtgctttctttgttgccagtcattactacacttacctgtcagtctggtttacgggctttgaagacgaactggttcgaaatgggattgccatcgcggtactgtttatcgctaccctgatcgttggtgctatcgtgaacttcgtgataggccagttggtggagaaaacggggttgtcaggcaccgatcgggtgctgggcgtctgtttcggtgcgttgcgcggtgtgttgattgttgccgccattctcttctttctcgactcctttaccggggtgtcgaaaagcgaagactggagcaaatcacagctgatcccgcaattcagttttatcatcagatggttttttgattatctgcaaagctcgtcaagtttcttgcccagagcgtaagtgctctgagatgtggcttaacgaggaaaaagacgtatgtgcggtattgtcggtatcgccggtgttatgccggttaaccagtcgatttatgatgccttaacggtgcttcagcatcgcggtcaggatgccgccggcatcatcaccatagatgccaataactgcttccgtttgcgtaaagcgaacgggctggtgagcgatgtatttgaagctcgccatatgcagcgtttgcagggcaatatgggcattggtcatgtgcgttaccctacggctggcagctccagcgcctctgaagcgcagccgttttacgttaactccccgtatggcattacgcttgcccacaacggcaatctgaccaacgctcacgagttgcgtaaaaaactgtttgaagaaaaacgccgccacatcaacaccacttccgactcggaaattctgcttaatatcttcgccagcgagctggacaatttccgccactacccgctggaagccgacaatattttcgctgccattgctgccacaaaccgcttaatccgcggcgcgtatgcctgtgtggcgatgattatcggccacggtatggttgctttccgcgatccaaacgggattcgtccgctggtactgggaaaacgtgatattgacgagaaccgtacagaatatatggtcgcttccgaaagcgtagcgctcgatacgctgggctttgatttcctgcgtgacgtcgcgccgggcgaagcgatttacatcactgaagaagggcagttgtttacccgtcaatgtgctgacaatccggtcagcaatccgtgcctgtttgagtatgtatactttgctcgcccggactcgttcatcgacaaaatttccgtttacagcgcgcgtgtgaatatgggcacgaaactgggcgagaaaattgcccgcgaatgggaagatctggatatcgacgtggtgatcccgatcccagaaacctcgtgtgatatcgcgctggaaattgctcgtattctgggcaaaccgtaccgccagggcttcgttaaaaaccgctatgttggccgcacctttatcatgccgggccagcagctgcgtcgtaagtccgtgcgccgtaaactgaatgccaaccgcgccgagttccgcgataaaaacgtcctgctggtcgacgactccatcgtccgtggcaccacttctgagcagattatcgagatggcacgcgaagccggagcgaagaaagtgtacctcgcttctgcggcaccggaaattcgcttcccgaacgtttatggtattgatatgccgagcgccacggagcttatcgctcacggtcgcgaagttgatgaaattcgccagatcatcggtgctgacgggttgattttccaggatctgaaagatctgatcgacgccgttcgcgctgaaaatccggatatccagcagtttgaatgctcggtgttcaacggcgtctacgtcaccaaagatgttgatcagggctacctcgatttcctcgatacgttacgtaatgatgacgccaaagcagtgcaacgtcagaacgaagtggaaaatctcgaaatgcataacgaaggatgatgccttcgctgagggtgccggtctggcaccctgacttgcaactcccgccgaaatcctgcaaagtctgcctgcaagtctgacagggcaactatttatgaaacgactcattgtaggcatcagcggtgccagcggcgcgatttatggcgtgcgcttattacaggttctgcgcgatgtcgcagatatcgaaacgcatctggtgatgagccaggcggcgcgccagaccttatccctcgaaacgggtttttccctgcgcgaagtgcaggcattagctgatgtcacgcacgatgcgcgcgatattgccgccagcatctcttccggttctttccagacgctggggatggttattttaccctgttcaatcaaaaccctttccggcattgtccatagctacaccgatggtttactgacccgtgcggcagatgtggtgctgaaagagcgtcgcccgttggtgctctgcgtgcgtgaaacaccattgcacttaggccatctgcgtttaatgactcaggcagcagaaatcggtgcggtgattatgcctcccgttccggcgttttatcatcgcccacagtcccttgatgatgtgataaatcagatggttaatcgtgttcttgaccagtttgcgataacccttcctgaagatctctttgcccgctggcagggcgcataactccgctgttgccctgtttcagggcaattttgcaaccgcgatcaaatcctcgacattttgtttctgccattcaatcgaaacgctgcgattcaaccgctatacctgctatcttcaacttcaggacaataatgcaacgtcttattaacatatttaacgttgaatgttactgttgtcgtcaagatggcataagacctgcatgaaagagcctgcaaacacacaacacaatacacaacataaaaaagccattttcacttgagggttatgtatgaagaagtcgattctcgctctgtctttgttagtcggtctctccgcagcggcttccagctatgcggcgctaccggagacggtacgtatcggaaccgataccacctatgcgccgttctcgtcgaaagatgctaaaggtgattttgttggctttgatatcgatctcggtaacgagatgtgcaaacggatgcaggtgaaatgtacctgggttgctagtgactttgacgcgctgatcccctcactgaaagcgaaaaaaatcgacgccattatttcgtcgctttccattaccgataaacgtcagcaggagattgccttctccgacaagctgtacgccgcagattctcgtttgattgctgccaaaggttcaccgattcagccaacgctggattcactgaaaggtaaacatgttggtgtgctgcagggatcaacccaggaagcttacgctaacgagacctggcgtagcaaaggcgtggatgtggtggcctatgccaaccaggatttggtctattccgatctggctgcaggacgtctggatgctgcgttacaagatgaagttgctgccagcgaaggattcctcaagcaacctgctggtaaagatttcgcctttgctggctcatcagtaaaagacaaaaaatacttcggtgatggcaccggtgtagggctacgtaaagatgatgctgaactgacggctgccttcaataaggcgcttggcgagctgcgtcaggacggcacctacgacaagatggcgaaaaagtatttcgactttaatgtctacggtgactgatacgtcgctgggaagctgtacctgatggaatgatcatcatggtgcacgccaggtttgttgcactatcgtggtgcattgaaatgcatacttaagcatttttaatgaaaaataatacgtctaacggggcgggatattttgccttgatggtcaattttatggcacgataagtgtaacaaacctgtaaatattccctataaaaagactgtcagttgaggacattatgaaaaaactggtgctatcgctctctctggttctggccttctccagcgcaactgcggcatttgctgcgattccgcaaaacatccgcatcggtaccgacccgacctatgcgccatttgaatcaaaaaattcacaaggcgaactggttggcttcgatatcgatctggcaaaggaattatgcaaacgcatcaatacgcaatgtacgtttgtcgaaaatccgctggatgcgttaatcccgtccttaaaagcgaagaagattgacgccatcatgtcatcgctttccattacggaaaaacgtcagcaagaaattgccttcaccgacaaactgtacgctgccgattctcgtctggtggtggcgaaaaattccgacattcagccgacagtcgagtcgctgaaaggcaagcgggtaggcgtattgcagggcaccacccaggagacgttcggtaacgaacactgggcaccaaaaggcattgaaatcgtctcgtatcaggggcaggacaacatttattctgacctgactgccggacgtattgatgccgcgttccaggatgaggtcgctgccagcgaaggtttcctcaaacaacctgtcggtaaagattacaaattcggtggcccgtctgttaaagatgaaaaactgtttggtgtagggaccggcatgggcctgcgtaaagaagataacgaactgcgcgaggcactgaacaaagcctttgccgaaatgcgcgctgacggtacttacgagaaattagcgaaaaagtacttcgattttgatgtttatggcggttaatcgccatcggtgaaagaaagcccgctcccttcgggtaaccggagggagacaagaggcggtaattcaccacacacgacaggacaggcagcatgttgtatgggttttcaggtgttattttacagggtgcgctcgtcacgctggagctggctatcagctctgtagtgctcgctgtaatcatcggtttaattggcgctggcggtaagctctcgcaaaatcggctttcggggctgattttcgaagggtacaccacgctgattcgtggcgtgccggacttagtgttgatgctgctgattttctacggtttgcagattgcgctaaacacggtgacggaggcgatgggcgtcgggcagattgatatcgatccgatggtcgctggtattatcactctcggttttatctacggtgcttattttaccgaaacgttccgtggtgcttttatggcagtgccgaaaggacatatagaggcggcgacggcgttcggttttactcgtgggcaagtgtttcggcggatcatgtttccggcgatgatgcgttacgccctgccaggcattggcaacaactggcaggtgatcctcaaatctaccgcactggtttcgttactcggcctggaagatgtggtcaaagccacccaactggcaggcaaaagtacctgggaaccgttctatttcgccatcgtctgtggcgtgatttacctggttttcaccactgtttccaatggtgtgctgctgttccttgagcgccgctactccgtgggtgtgaagagggctgacctgtgatcgaaatcttacatgaatactggaaaccgctgctgtggaccgacggttatcgctttactggtgtggcgatcactctgtggctgcttattttgtcggtagtgataggcggagtcctggcgctgtttctggcgattggtcgtgtctccagtaataaatacatccagtttccaatctggttatttacctatatttttcgcggtacgccgctgtatgttcagttgctggtgttctattccggcatgtacacgcttgagattgttaagggaaccgaattccttaacgctttcttccgcagtggcctgaactgtaccgtgctggcgctgacgcttaacacctgcgcttacactaccgagatttttgctggggcaatccgttcggttccgcatggggaaattgaagccgccagagcctatggcttctcgacttttaaaatgtatcgttgcattattttgccttctgcgctgcgtattgcgttaccggcatacagcaacgaagtgatcctgatgctgcactctactgcgctggcgtttacggccactgtgccggatctgctgaaaatagcccgcgatattaacgccgccacgtatcaaccttttaccgccttcggcattgccgcggtgctctatttaatcatctcttatgtcctgatcagcctctttcgcagagcggaaaaacgctggttgcagcatgtgaaaccttcttcaacgcactgagaatacgatgtccgagaataaattaaacgttatcgatttgcacaaacgctacggcgaacatgaagtgctgaaaggggtctcactgcaagcgaatgccggagatgtaataagcatcatcggatcgtcgggatcggggaaaagtacctttctgcgctgcattaacttcctcgaaaaaccgagtgaagggtcgatcgtggtcaatggccagacgatcaatctggtgcgcgacaaagacggtcaactcaaagtcgccgataaaaatcaactgcgcttactgcgcacacgcctgacgatggtattccagcacttcaatctctggagccatatgacggtgctggaaaacgtcatggaagcgccgattcaggtgttgggcctgagcaagcaggaagcgcgcgagcgggcggtcaagtatctggcaaaagtcgggatagacgaacgtgcgcaggggaaatatccggtgcatctttccggcggtcagcaacagcgtgtttctatcgcgcgggcgctggcgatggaaccggaagttttactgtttgatgaacctacctcggcgctcgatcctgaactggtaggcgaagtgttacgtattatgcagcaactggcagaagaggggaaaaccatggtggtagtgactcacgaaatgggctttgctcgccatgtttctactcacgtcattttcctccatcaggggaaaatagaagaagagggcgcgccggagcagttatttggcaacccgcaaagccctcgtctgcaacagttccttaagggatcgctgaaataatttcctctccggtggctaacgctgccggagtattttcatggggaatttgtgagtcagcttccgctgaaatgtaaaagttgcagtccgctaaaaatacttctgaattcgctgtccaaagataaaaactgcctgctgcattgggtgttaatcgtggttattgtcgcgtcatcttaaatttgaggggtgacggaacgccatgacaatatcgacaacttccacgccgcatgatgcggtatttaaatcttttttacgccatccagacaccgcgcgggattttattgatattcatcttcccgcgccgcttcgcaaactgtgtgatttaacgacgcttaaactagaaccaaacagttttattgatgaagacctgcggcaatattattccgacctcttgtggtctgtgaaaacgcaggagggagtgggttatatttatgtagtgatagagcaccaaagtaagccggaagaattaatggcttttcgcatgatgcgttattccattgcggcaatgcaaaaccatcttgatgcgggctataaagagcttccattggtgatcccgatgctgttttatcatggttgcagaagtccttatccttattcactctgctggcttgatgaatttgccgagcctgctatagcccgcaaaatatattcatcagcgtttccgttggtggatattaccgtggtgccggatgacgagattatgcaacaccgcaaaatggcgctgttggagttaattcagaaacatattcgtcagcgcgatctgttgggattagtcgaccaaattgtttcgctgctagttacagggaacactaatgacagacagctaaaagccctgtttaattacgtattacaaacaggggatgcccagcgttttcgtgcatttattggtgagatagcggaacgcgcatcacaagaaaaggagaaactgatgaccattgctgacagattacgtgaagaaggcgcaatgcagggcaaacacgaagaagccctgcgtattgctcaggagatgctggatagaggtttagacagagagttagtcatgatggtgacccgactttcaccagacgatcttatcgcgcaaagccactaatcctgtaacaccgggagttaactggcggatgtttgctgtaaaccacatcagcgaacgacatccgccagcgcctcttctaaatcgtaccagcgaaacgcaaaacccgcttcttccagccgtttaggcagcgcgcgttgtccacctaataccagtactgaagattcgcccattaacagtcgaatggcggtcgcggggacgcgcaaaatggccgggcgatgcagcgcatgaccgagcgcatgggcaaattgttcattgcgtaccgggtagggcgaaaccatattaaatggcccgcgcagctcgttatccagcagccagagaataccgttgaccatatcatcaatatgaatccaggccagatactgccgaccagagccaatcggcccgcccaggccaagacgaaacggcggcagcattttaccgagaataccgccatccggtgccagcactacaccggtacgcagcaggcacactcgcgttttgtcactttgcgcccggcaggcaatttcttcccagcgggcgcagagtttatgggtaaattcgttatgcggcggttcctcttcggtaaccaccacttcacctaagtcgccataatagcccgttgccgagccggaaatgagtaccgacggcggcgtgtcgctggcattaatcaaatcgaccagtttttgcgtgatattccagcggctttggcagagacgctctttttgctcgtgagtccagcgtttatcagcaatcggttctccggccaggttgattaccgcatcaacgccgttgaggttgctttgagcggctagcccttgccatagcgtcacccgagggccgagaacggaactggctttctgtgggttacgcgtcactaccgtgatttgatggcccagctccagcaaacgcggaatcaaatggcgaccaattaatcccgtccctccggtgatcactatgttcatgcagcctcccgatatggcggttaacgctgccagcttaaggtcatggataccgaatcggcgtagcgcagcgcgtgcagtttatcgatctccacttcagcatacgtcacccagtgatgttcacgtgcgatatcgagcacatcctgagttaatttttccaacaaagagaaacggttattctctacatgctgaataatgtttttcgttacggtgcgataattcagcgcatcgttgatatcttcgctagtgcgcgctttatcggcggggtagtggatcgtcacattgataacaatatcctgacggttgttaatttcttcttccttaattccgataaacgtacgtaaacgaaggttctttatacgaataatagcggcaggttgtgccattgcaggttctccgttgttttacttaggatgaaataatacacgagaacctgtttctgttaactatccgaacgctcatcaccgagttgtgcttttagcagtgcctgcccggtggcagggcgcgaacggatccgctcatgccagttcttgactgccggatacattgcgaggtcaattcgctggcgagtccaggcattaacccacggccagcaggcaatatccgcaatgctgtagttctcgcctcccagccagggcgagttttccagccgcttgttcagtacatggtaaagacgctgagtttcaacctgataacgttcaatagcgtaaggaatggtttggggggctgcgtgattaaaatgatgattttgcccaagcatcggccccagtccgcctacctgccagaataaccactgtaatgtggcggcgcgctcacgcgtttcatgactcaaaaagagtcctgttttctcagccagatacaacaaaatggcaccagactcaaagaggcttaacggttcgccgccatcggcaggagaatgatcaacaattgccggaattttgttgttgggcgaaatgcgcaaaaattccggacgaaactgaccgcctttccccaggtctaccttaatcaagcgataatcaagctctgcttcttcgagaaacagcgtaattttgtgaccattgggtgtcggggcgaaatagagatcgatcattgcagctccggttgtttaatcatctgaacaccacaagtatagaaagcgcggcgaattacgtgagtattcgtcacgtgacagtgacaaaaaggctctatagtttgatagccagccccctttattgccgaggacataatgagtaaacccgctatcacgctttggtcagatgcccactttttctccccttatgtgttatccgcctgggtggcgttgcaggaaaaaggcctgtcgtttcatatcaagaccatcgacctcgacagcggtgaacatttgcagccgacgtggcaaggttacggtcagacacgccgtgtgccgttattacaaatcgatgattttgagttgagtgaatcttctgccattgcggagtatctggaagatcgatttgcgccaccgacctgggaacgtatttatccgcttgatttagaaaatcgtgcgcgtgcacgacagattcaggcctggctgcgcagcgatctgatgcccatccgcgaagagcgtccgacggatgttgtctttgcgggggcgaaaaaagcgccactaacggccgagggaaaagccagtgcagagaaactgtttgcgatggcagaacatttgttagtactgggtcagccgaatttatttggtgaatggtgcattgctgatactgatctggcgctaatgattaaccgcctggtactacatggcgatgaggtgccagaacgcctggtggattatgcgacattccagtggcagcgagcgtctgtccagcgttttattgcactttcggcgaagcaatctggctgatagcaacgacagaatccagtatcatagcttacgttttttcgacgaggagtgagtgatgaaactgatgtttgcatcggacattcatgggtcgttaccggcgacggaacgtgttctggagttgtttgcccaaagcggtgcccagtggctggtgatccttggcgacgtgttgaatcacggcccgcgtaatgctttaccggagggttacgcgccagccaaagtcgctgaacggcttaatgaagtggcacataaggttatcgctgtgcgcggcaactgcgacagcgaagtggatcaaatgctgctgcatttcccgataaccgcgccgtggcaacaggtattactggaaaaacaacgtctgtttttgacgcatggtcatctttttggcccggaaaatctacctgctttaaaccagaacgatgtgctggtgtacggtcatacccatctgccagtggcagaacagcggggggagattttccatttcaaccccggctcggtgagtattccgaaaggcggtaatccggcgagttatggcatgctggataatgacgtacttagtgtaatcgcactcaatgatcaaagtatcattgcgcaggtcgcgattaatccgtaatttacccacaactcaaaatgcgccgtaagagcgccagaaaaagaaggtttcctgataatggaacagcgtcgtttggcaagtactgaatgggtggatattgtcaatgaagagaacgaagtcattgcacaagccagccgggaacaaatgcgggcacagtgtctgcgtcatcgtgcaacttacatcgtcgtgcatgatggcatgggcaaaattctggtccagcgtcgtaccgagacaaaagactttttacccggcatgttagatgcgaccgcaggcggtgtggttcaggccgatgagcaactgctggaatccgcgcgtcgcgaagcggaagaagagttgggcattgccggtgtcccctttgccgagcacgggcagttctatttcgaagataaaaattgccgtgtctggggcgcattgttcagctgcgtctctcacggtcccttcgcactacaggaagatgaagtcagtgaagtttgctggctgacgccggaagaaatcaccgcacgctgcgatgagttcactccagactcgctgaaagcgctagcgttgtggatgaagcgcaatgccaaaaatgaagccgtagagactgaaacggcagaatgaaaaaagagccgcaattgcggctcttaacatttttagtggtagcccatcaactgagcgccgatcactacgacgctggacataataaacagcagtccaagtagggtcgcgcccaccttcagccagttacggaagtccaccctgcacacaccgagcgttgccattaacgacgctgaggttgggtaaatgatgtgactgaagccatcaccaaactggaacgccagcacggtaacctgacggttaacaccgaccagatcgccaagcggtgccagtaacggcatggttaacgccgcctgaccagaaccggacgtcacgaagaaattaaataccgcctggaagagcaacataaaccaggccgcgaccgcgttgtccagaccgctaatggcattggcaatgctgttgaggatggtatttaacacgctggcatcacccgcttcaccattaccgaccagcagcaaaatccctttggcgaaacccaccagcagggcaggggcgatcatcattcgcgccccttcggtaaaggatgaagccatggtattaaccgtcatgccgttaaggcggaaaacaacgccgatgatgccaatcaccagacccatggtgaagaactggctggcaatttctggaataaaccaggcattaacgatcacgccccaaatcacccagaccattacggcggtcaggacaatcaataccagccagtcaccaaaggtaaacggacgttgttcaacatcagcctgcttttcacgaaagaagcggtcggactcatgcacgcgtgacagaagaggattctttttcactcgtgaggcgtacaccatggtaaagatcaggccaatcagagtggcgataacccacaccacgatgcgcaacccggagccagaaagcaccggaacgccggcaatcccctgagcaacgaccacacaaaacgggttcatccacgaactggcaaaaccgatttgcgtggcaatataggtcaccaggacggtggtaatactgtcatagcccagccggaccattagcggtgcgatgataatggcaaaggcgacggcctcttctcccataccaaataccgcgccgccaagtgaaaacagaataaacagcgcaggaataaagagaatttcattcccgcgggtatggcgaataagcgccaggataccgttatcaatggttcctgtacgcatcacaatgccaaacgcgccgccaatcaccagcataaacatgatgatgccaacggctgtcccgtatttcgatcctgaggttaatccttcaaacgggaagttcatcaggcccgggcgttcatcgcccgtcgtgaacagctgtacgcggtgatactcaggttcgcctgcttcgttagtcagaatgcgaaatgagtgtggatctacgactttgcgtgtttttgtttgaccatcaacctgatactgcacttcctgactgtcaaacatccccaccggaactacccaggtggcaaggctggttaaaatagcaacaaaaaagataatcaccaacgtatcgggcattgcccatcttcttgttggtttggattcagtgattgcggacatagcgcaaatattcccttgcacaaaacaaagtggtaagtatgcaaagtgagatggcgcaattcattgatgcagcgcagttaagcaagataatcagaaaggattaatgcaaattaagagaataaaaaaccggaaatagtgattatttccggttcagatatccgcagcgcaaagctgcggatgatgacgagattactgctgctgtgcagactgaatcgcagtcagcgcgatggtgtagacgatatcgtcaaccagtgcgccacgggacaggtcgttaaccggcttgcgcataccctgcagcatcggcccgatggagatcaggtcggcagaacgctgtaccgctttgtaggtggtgttaccggtgttcagatccgggaagatgaacacggtagcgcgacctgcaaccggagagttcggcgctttggatttcgcaacgtcagccattaccgcagcgtcgtactgcagcggaccgtcgatcatcaggtcaggacgtttttcctgcgccagacgagttgcttcgcgaactttttctacgtcgctacctgcaccagaagtaccggtggagtaggagagcatagcaacgcgcggttcgataccgaaggccgcagcggaatcagcggactgaatcgcgatttctgccagctgttcagcggtcggatccgggttgatcgcacagtcaccgtaaacgtaaacctgttccggcagcagcatgaagaacacggaagataccagggagctgcccggtgcagttttgatcagctgcagcggcggacggatggtgtttgcggtagtgtgaacagcaccggaaaccagaccatcaacttcatcctgttccagcatcagcgtaccgagcaccacgttgtcttccagctgttcgcgggcaacggtttcggtcatgcctttgttcttacgcagttcgaccagacgaccaacatagctttcgcgaaccacttctggatcaacgatttcaatccctgcacccagttctacaccctgagacgctgcaacacggttgatctctgccggattacccagcagtacgcaagttgcgataccacgttcagcacagatagcggctgctttaacggtacgcggttcgtcaccttccggcagtacgatacgtttgcccgctttgcgcgcaagttcagtcagctgataacggaacgcaggcggagacagacgacggctgcgctcagaagtggcagtcagagattcgatccagtcagcgttgatgtagttagcaacgtattcctgaactttctcgatacgctcgtgatcgtcaaccggaacttccaggttgaagctctgcaggctcagagaggtctgccaggtgttggtgttcaccataaataccggcaggccggtagcgaaagcacgttcgcacagtttagaaatgcgcgcgtccatttcgtagccgccagtcagcagcagggcaccgatttctacgccgttcatggctgccaggcaagcggccaccagcacgtcaggacggtctgcggaagtcaccagcagagaaccggcacggaagtgctccagcatgtgcggaatgctgcgtgcgcagaaagtgacggatttaacgcggcgagtattgatgtcgccttcgttgatgatggtcgcattcaggtggcgagccatatcgatcgcacgagtcgcgatcaggtcaaagctccacggcacagcgccgagaaccggcagcgggctggattcttgcagcttcgccggatcaacattgtttactttagctttggaagagtcgtcgaaaatctcggacagatccgggcgagtacgcccctgttcatcaaccggtgcgttcagtttgttaacgataacgccggtgatgttggtgtttttggcaccgccgaagctgttgcgggtcagttcgatacgctctttcagctgttccggggtgtcagtgccctgagacataacgaagacgatttccgcattcagcgttttagcgatttcgtagttcagagactgggcaaactggtgcttacgtgtcgggaccagaccttcaaccagaacgacttcagcgtctttggtgttagcgtggtagtttgcgacgatctcttccatcagcacatctttctgattgctggaaagcagaccttcaacgtagctcattttcagcggttcagcggccgtcgtggtggaagagttcgcacgcacgatagtcgtagtctgatcgggcgcatcgccaccggtacgcggctgagcgataggtttgaaaacgctcagacgaacgcctttgcgttccattgcacggatcacgccaaggctgacgctggtcagaccgacgctggttccggtagggatcagcataataatacgggacacggtttatcctctttcgttaccgccgatttggcgggttacaaaacagcaccgccagctgagctggcggtgtgaaatcaggcagtcaggcggctcgcgtcttgcgcgataaccagttcttcgttggttgggataaccaccgcaggacgggtaccttctttgttgatgaaaccagatttgccgaaacgtgcagccaggttgcgttcatgatcaacttcaaagcccagcacgcccagtttgcccagagacagttcacgaaccatcgcggcattttcaccgataccaccagtgaatacaacagcgtccagacgaccatccatcagcgcagtgtaggcaccgatgtatttcgccaggcggtggcagtaaacgtccattgcgcgcttcgcgtcttctttcgtcgcgtagttgtcttcaacatagcggcagtcgctggtcacttcggtcagacccagcaggccagactctttggtcagcagtttgttgattgcgtcaacgctcatgcccagggtgtcgtgcaggtggaagatgatcgccggatcgatatcaccagaacgggtacccatgaccagaccttccagcggggtcaggcccatagaggtgtcaacgcatttaccgttgcggatagcagaaacggaaccaccgttgcccaggtggcaggtgatgatgttcagttcttctaccggtttgttcagcatttttgccgcttcctgggttacatagaagtggctggtgccgtgcgcgccgtaacgacggatgccgtgctctttgtacaggttgtacggcagggcgtagaggtaagactcttccggcatagtctggtggaacgcggtgtcaaatacagcaacgtttttgtctttcagctgtgggaaagatttcagagcttcttcgataccgatcaggtgagccgggttgtgcagcggtgcaaaagaagctgcatctttgataccctgaataacagactcatcgatcactacggagctggtatacttttcgccgccgtgtacgatacggtgaccgatagcagtcagctgcgcagacagttctggtttttgtgccagaatagtattaacgataaagttgagcgcttcgctgtgagcggcgcctgcacctaaagccgcttcctgtttattgccgtccattttccatttgatacgtgcttcgggcaggtggaaacattcggctaaaccagaaaggtactcttcaccatttactgcatcgatgatggcaaatttcagtgaagaactaccgcagttcagaaccagtactaacttactcgacatggaagtacctataattgatacgtggctaaaaaaacgtcagggagccatagagcgtagcgcatgatgacaccgacatttatgattaacatcatgcactgcaaattttttttgcatgatggaagaaatatcttgagtctatgccattttgcgtaattttcagccaatggcataatgtatatgaatttgacgactcaatgaatatgtactacttaggccttcaggctgctaaaggatacctgatagtgggtatggaagacaaaatgttttgaacgttgtcccgctgagttgtgaatttgcacaaatttttgaatctttatatgtgaagttgaggtgaagcatgtcaacgccggataatcgttctgttaatttttttagcttgtttcgccggggacagcattactcaaagacgtggccgctggaaaaacgccttgccccggtctttgtcgaaaatcgcgttatcaagatgacgcgttatgcgatccgttttatgccgccgatcgccgtatttactctctgctggcagattgccctgggcggtcagcttgggccggcagttgccactgcgctgttcgccttaagtttacccatgcagggattatggtggctgggcaagcgttctgtaacgccattaccccctgctatcctcaactggttttatgaagttcgcggtaaattgcaggagtctggacaggtgttggcacccgttgaaggcaagcctgattaccaggcattagctgacacgcttaagcgcgccttcaaacaactggataaaactttccttgatgatttgtaattgacccctgattacgcatataaaagaaggcatactcagccttcttttttttcaccgtagtagagtgatacaggagtcaacaatggaaatgaccaacgcgcaacgtcttattttgtctaatcagtacaagatgatgactatgctcgatccggcaaatgctgaacgttaccgtcgcctgcaaacaattattgagcgtggttacggattacagatgcgtgaattggatcgcgagtttggcgagctgaaagaagaaacctgccgcactatcatcgacattatggagatgtatcatgcgttgcatgtttcctggtctaatttgcaggaccagcaatccatcgatgaacgtcgtgtcaccttcctcggctttgacgccgccactgaagcacgttacctcggttatgtccgctttatggttaatgtggaagggcgctatacccattttgacgccggaactcacggttttaacgcccagacgccaatgtgggaaaaatatcagcgcatgcttaatgtgtggcatgcctgcccgcgtcagtaccatttgagcgccaacgaaattaatcaaattatcaacgcctgaggaggcccgcgtgcggtgcaaaggttttctgtttgatcttgatggaacgctggtggattccctgcctgcggtagaacgggcgtggagcaactgggccagacgtcatgggttagcgccggaagaggtgctggctttcattcacggtaaacaggcgatcacctctttgcgccattttatggcgggcaaatccgaggctgatattgccgccgaatttacgcgtctggagtacatcgaggccacggaaaccgaaggtattaccgcgcttccgggggcaatcgccttactcaatcatttgaataaagcaggtattccgtgggccattgtgacttctggctccatgccggtagcgcgagcgcgccataaaatagctgggcttcccgcaccagaggtgtttgtaaccgctgagcgagtgaagcgcggaaaaccagaacctgatgcgtatctgttaggcgcgcagctgctggggcttgcgccgcaggagtgtgtggtggtggaagatgctcccgctggcgtgctttctggcctggcggcgggttgccatgtcattgcggttaacgctccggcagataccccgcgcctgaatgaggtcgatttggtcctccacagtctggagcaaattactgtgaccaaacagccaaatggcgatgttattattcagtgaaacacctgatcatgatttagccccgtctcgtcggggcttttttatggcagaatcaagacatctccctcaattaacaaggataagttgtgaacggtgaattgatttgggttctttcattactggccgttgccattgtcttgtttgcgacgggcagagtgcgtatggatgcggtcgctttgtttgttattgtcgcgtttgcattaagcggaacgctgacagtccccgaagtattttccggcttttctgatcctaacgttgtcctgattgccgccttgtttattattggcgatggtttggtccgtaccggtgttgccaccgtaatgggaacatggctggtcaaagttgcgggcaacagtgaaatcaaaatgttggttttgttgatgctgaccgtcgcggggcttggcgcgtttatgagttcaaccggcgttgtcgctatctttattcccgtggtgttaagcgttgccatgcgtatgcaaacttcgccgtcacgtctgatgatgccgttgagttttgccgggctgataagcggcatgatgacgctggtggcgacgccgccgaacctggtagtcaacagtgaattgctgcgtgaaggctatcacggcttcagtttctttagcgtaacacctattggcctggtcgtgctggtgctgggtattttgtatatgttagtgatgcgtttcatgctgaaaggggatacccagaccccgcagcgcgaaggctggacgcgtcgaacctttcgcgatcttatccgtgaatatcgactgaccgggcgtgcgcgacgtctggctattcgccccggatcgccaatgattggtcaacggctggatgatctcaaattacgtgagcgttatggcgctaacgtcatcggtgttgaacgctggcggcgttttcgtcgcgttatcgtgaacgttaatggggtttctgaatttcgcgcgcgtgacgttttgcttattgatatgtctgcggctgatgtcgatctccggcaattttgtagtgagcaattgctggagccgatggtactgcgcggcgagtatttttctgaccaggcccttgatgtgggcatggcagagatttcattaattcctgagtcagaactgattggtaaatcggtgcgcgaaattggttttcgtacccgctacggactgaatgtggtggggctaaagcgcaatggcgtggcgctggaaggttcgctggcggatgagcctctgctgctgggcgatatcatcctggttgtgggtaactggaaactgatcggtatgctggccaaacagggccgcgacttcgtagcgctgaacttaccggaagaggtgagtgaagcatcgcccgcgcacagccaggcaccccatgccattttctgtctggtgctaatggtggcgttaatgctgacagatgaaattcctaatcctgttgccgctatcatcgcctgcctgctgatggggaaattccgctgtatagatgctgaaagcgcctataaatccattcactggccgagcattattttgatcgttgggatgatgccgtttgctgtggcattacagaaaacgggaggtgtcgcgctggcggtgaaagggctgatggacattggcggtggttacgggccacatatgatgctgggttgtttgtttgtcttgtcggcggttattgggctatttatctctaataccgcgacggcggtgttgatggctccgattgcgctggctgctgccaaaacgatgggggtgtcgccttatccattcgcgatggtcgtggcgatggcagcatccgccgcctttatgacaccggtttcttcacctgttaacacactggttttaggtccgggaaattacagcttcagtgactttgtgaagttgggggtaccgttcaccattattgtgatggcggtttgtgtggtgatgatcccgatgctgtttccgttttgacaagagcctgatgtcgcatccggcgcttattgcctgatgcgacgcagactccggctgcttacagcggtgaatcctggctaatctcatcgagcgaaagatggaagctgggaacaaatacttccatgaagtagtccatctcctggctgcgacgcgattcaagcgtcgcttccagtcgcgtttttgccagcaagaattcattatttccggccgcgagttcttccagacatttcagatatgcacacagtgcatctgcctgtttcaccagcgatttttcttcatcgctatatgcatgctcgtcaattaacggcgcaaagatatcccgcagctcttccggaaccatatcgaccagtttttgctgagcgattttttcaatagccttgtactcctgagcgatttgcgaattgaagtatttcaccggagtagggagatcgccggtgagcacttctgaggcatcgtggtacatcgccagtaaagcgatacgttcggcgttgacattaccgccaaattttcgatttttgatagctgccagcgcatgggcgaccatcgctacctgcaaactgtgttcggacacattttccgtcagcacgttgcgcattagcggccagcggttaatgagtttcaggcgggagagatgggcaaaaaaatggctctgtttcatagtgaccttacgtatgatgacatcatcaggtcattgtggcgggataacgctgccggatgcaatctccggcagtgaaattaagattacagctgatgataaccagaaaggaaacgcgcgaacttgctcaaagacagctcgatatcatcgacacgcggtagcgtgacaatgcggaagtgatccggccacggccagttgaatgccgtcccttgcaccaacagaactttttcctgcaacaggaaatccagcaccattttctgatcgtcgtgaatgttaaagcgtttggcgtcgattttcgggaacatatacagcgcaccacgaggtttcacgcaggaaacgcccggaatatcgttgatcagttcccacgcgcggttacgctgctcataaagacgaccgccaggggtaataaattcactgatgctctgataaccacccagcgcggtctgaatggcgtgttgcgcaggaacgttagcacacaggcgcattgaagccagcatttccagaccttcgatgtagcctttggcgtgttttttcggcccgttcaacaccatccacccctgacggaagcctgcaacgcggtacgttttcgacagtccgttaaaggtaatggtcagcaggtcaggtgccagcggcgcaattgagtgatgctcagcgtcgtcgtaaagaattttgtcataaatttcatcggcgaagataatgagattatgctgacgtgcaatctccacaatctccattaaaagctctttggaatataccgcgccggttgggttatttgggttgataataacgatcccacgcgtacgaggcgtaattttagcgcgaatatcatcgaggtccgggaaccagtcagaggattcatcgcaaagataatgcaccgctttaccgctggaaagcgaaaccgccgcggtccatagtgggtaatctggtgcaggaaccaacatttcgtccccgctgttcagcaatgcctgcattgcctgaacgataagctccgatacaccattgccgatgtaaatatcttccacggtaacatcacgcatgccacgagcctggtagtgctgcatgatggctttacgcgcggagtaaagacctttggaatcgcaatacccttgagcggtaggcaggttgcgtatcacgtcaacgaggatttcatctggcgcgtcaaaaccgaacggggctgggttgccgatgttcagtttcagtaccttgttaccttcttcttccaggcgttttgcttctttcagcaccggaccacggatgtcataacagacattctctaatttgctggatttttcaatgggggacatgaatcttgaccttttttgctgttatcgccactccctgccgtggaagtcagcttagaacaatgtactcccccaggacggtgttttgaaggtctgcagaataagattttgccagaggggaaggctcgattgtgctgttaataacttaataatgacaaaataatgaggtgtatatgctatacatgcaatgttatatagtgaattgttctgattcttaattgtaagtatggtttttttatctgtaagataattgtgtgaaaatgcctcatttaagaattcactaatgaaacgcgatgatgatatttccgcattacagagagtttaacagcgtgatgatttccgaggtgtcgtaatgggggcaaggtgtgaaactattgttaagcggaattaatgaatgaggatgatgctaattaattattatttaatattcaaaaaggttttgatgtgcttattaataatagaagattactttgcctaacataacataactttgcatcagataattcgcaatgacccttataaataaaaggtttttggggtaaaatgctcgcataaatgacggatccctgctcttgatgccgcctcaccattgctgtttgtacgtgttcgcgtatgaccagcgatgctgcacgagagtggaacaaggactcacatttacatttatacaaacacgcgcatgtcataaatagaaaagagtgagtaacttaatagatatgcgatccctgaagatatattctgtgatctacttcaggcattataacggaacaatgtgagtcgcttttttagtgcaactcatatgcatttttactttcgtccgggttccggatgaaactgccagggaggcacattacaaatggaattgcttgtttgtgtgtgcacagcattaaccagctcagtatgagccgccagtaagtgataatatatgataagtgcaaatcgtccgataattaacctcgacctcgatctgctgagaacatttgttgctgttgccgatctgaacacttttgctgccgcagctgccgctgtgtgtcgtactcagtccgccgtaagtcagcaaatgcagcgtctggaacaactcgttgggaaagaactgttcgctcgtcacggtcgcaacaaactgttaactgaacatggcattcaacttcttggttacgccaggaaaatcctgcgttttaatgatgaggcctgctcatcattaatgttcagtaatcttcagggcgtgttaactatcggtgcttcagatgaatctgccgatacgatcttacctttcctgttaaatcgcgtgagttcggtttatccgaaattagcgctggatgtccgcgttaaacgtaatgcctatatggcagaaatgctggaatcccaggaagtggatttgatggtaaccacccatcgtccttcagcgtttaaggcattgaacctgcgtacctcgccaacacactggtactgcgcagcggaatacatattgcaaaaaggcgagccgatccctcttgtattgctggatgatcctagcccgtttcgcgatatggtgctggcgacgcttaataaagcagatattccatggcgactggcttatgtcgcctcgacgcttccggccgttcgtgcggcagtgaaagccggtcttggcgtgacggcaaggccggttgaaatgatgagcccggacctgcgtgtgctgagtggagtagatggcttaccgccgctacctgataccgaatatttgctgtgctatgacccgtccagtaataatgagctggcccaggtgatctatcaggcgatggagagctaccataatccgtggcaatacagcccaatgtctgctccggaaggggatgattcattgttgattgaaagggatatcgagtaatcgacggacgatagataattcctgagacaatagtgtaaaaaacgagccgctgggggtgttttaaaccccagcggcttttttttagtaaaaatccttcctcgcatagtgcagaacgtacaaaactgttcatttttcaatcaccagagattcacgtcccgaacgcacaaataatcgcctgaaaaaaatcacctgctacaatgatgttaaaaaatacgtaaatttgttgctgcgtttttgttatggaatgacaaaagcgtgtcacagatcaagaaaatactctcttttggggggaggaatcgacacaaattcctgtcaaaatagacccgtattttttccattgcttcacaacggacacgattcaacaacatctaattatcctggagtcgtcaaggatctggggtgaaagggcattaaatgctaatggtgttgatattatgtaaactaatgtgaagaaacttttgttaaagttgacaaaaggttatagaaaggagtaaaagaccacatcaattagctgtataaaagaatttctacagtgattgtaaggttttttttattcctccccatgaatcgatgtggcgtccatctgccgtgaagagcagtgaatctggcgctacttttgatgagtaagcaatgagtatgtcaacatccactgaagtcatcgctcatcactgggcattcgctatctttcttatcgttgccattggcctgtgttgcctgatgctggtaggcggttggtttttaggcggtcgcgcacgcgcgaggtcgaaaaacgtgccgtttgaatccggtatcgactcggtcggctccgcccgcttacgcctgtccgccaagttttatctggtggccatgttcttcgttatcttcgacgttgaagcgctgtatctgttcgcatggtcaacctctatccgcgaaagcggctgggtaggctttgtggaagctgcaatttttatttttgtgttactggcaggtctggtttatctggtgcgtattggcgcgctggactggacgcccgcgcgttcacgccgcgagcgtatgaacccggaaacgaacagtatcgctaatcgtcaacgctaaccgcgaggcattaagatggattatacgctcacccgcatagatcccaacggtgagaacgaccgttaccccctgcaaaagcaggagatcgtaaccgaccctctggagcaagaagttaacaaaaacgtgtttatgggcaagctcaatgacatggttaactggggtcgtaaaaactcaatttggccgtataacttcggtctttcctgctgttacgttgagatggtgacttcgtttaccgcggtgcatgacgtggcgcgttttggcgcagaagtattgcgtgcttcgccgcgtcaggctgacctgatggtggttgcaggaacctgctttaccaaaatggcaccggttattcagcgtctgtatgaccagatgctggaaccaaaatgggttatctcaatgggtgcctgtgccaactccggcggtatgtacgatatttattccgttgtgcagggcgtcgataaattcatcccggttgatgtgtatatcccgggctgcccgccgcgtcctgaagcgtacatgcaggcactgatgctgttgcaggaatctatcggcaaagaacgtcgtccgctctcctgggtggttggcgatcagggcgtttatcgcgccaatatgcaatcagagcgcgaacgcaagcgcggtgaacgcattgccgtaaccaacctgcgtacacctgacgagatttaatttgcgcctgtcggcaaagggatttttcttcgcttattcctaaatctatttcgcgaagcttactgcgccgacagtcaccacggaccatttgcaatggtgaacaatatgaccgacttaaccgcgcaagaacccgcctggcagacccgcgatcatcttgatgatccggtgattggcgaactgcgcaaccgttttgggccggatgcctttactgttcaggcgactcgcaccggggttcccgttgtgtggatcaagcgtgaacaattactggaagttggcgatttcttaaagaaactgccgaaaccttacgtcatgctgtttgacttacacggcatggacgaacgtctgcgcacacaccgcgaagggttacctgccgcggatttttccgttttctaccatctgatttctatcgatcgtaaccgcgacatcatgctgaaggtggcgctggcagaaaacgacctgcacgtaccgaccttcaccaaactgttcccgaacgctaactggtatgagcgtgaaacctgggatctgtttggcattacattcgacggtcacccgaacctgcgccgcatcatgatgccgcaaacctggaaaggtcacccgctgcgtaaagattacccggcgcgcgctaccgaattctcgccgtttgagctgaccaaagccaaacaggatctggagatggaagccctgaccttcaaaccggaagagtgggggatgaagcgtggtactgaaaacgaggacttcatgttcctcaacctcggcccgaaccacccgtcggcgcacggggctttccgtatcgttttgcaactcgatggcgaagagattgtcgactgcgtaccagacatcggctaccaccaccgtggtgcggagaaaatgggcgaacgccagtcctggcacagctacattccgtataccgaccgtatcgaatacctcggcggctgcgttaacgaaatgccttacgtgctggcggtagagaaactggccgggatcaccgtgccggatcgcgttaacgtcattcgcgtaatgctctccgaactgttccgtatcaacagccacctgctgtatatctcgacctttattcaggacgtcggcgcaatgacgcccgtgttcttcgcctttaccgatcgtcagaaaatttacgatctggtggaagcgatcacgggtttccgtatgcacccggcgtggttccgtattggcggcgtagcgcacgacctgccgcgcggctgggatcgtctgctgcgtgagttcctcgactggatgccgaaacgtctggcgtcttacgagaaagcggcgctgcaaaataccattctgaaaggtcgttcccagggcgttgccgcctatggcgcgaaagaggcgctggagtggggcaccactggcgcgggcctgcgtgctaccgggatcgacttcgacgtgcgtaaggcgcgtccttattctggctatgaaaacttcgactttgaaatcccggttggtggtggtgtttctgactgctacacccgcgtaatgctgaaagtggaagagctgcgccagagtctgcgcattcttgagcagtgcctcaacaacatgccggaaggcccgttcaaagcggatcacccgctgaccacgccgccgccgaaagagcgcacgctgcaacatatcgaaaccctgatcacccacttcctgcaagtgtcgtgggggccggtgatgcctgccaatgaatctttccagatgattgaggcgaccaaggggatcaacagttactacctgaccagcgacggtagcaccatgagttatcgcactcgtatccgcacgccgagttatgcgcatttgcagcaaattccggcggcgatccgcggcagcctggtgtctgacctgattgtttatctgggcagtatcgattttgttatgtcagatgtggaccgctaattatgcacgagaatcaacaaccacaaaccgaggcttttgagctgagtgcggcagagcgtgaagcgatcgagcacgagatgcaccactacgaagacccgcgtgcggcgtccattgaagcgctgaaaatcgttcagaagcagcgtggctgggtgccggatggcgcgatccacgcgatcgccgatgtgctgggtattccggcgagcgacgtcgaaggcgtggcaacgttctacagccagatcttccgccagccggttggccgccatgtgatccgttattgcgacagcgtggtctgtcatatcaacgggtatcagggtattcaggcggcgctcgagaaaaagctaaacatcaaaccagggcaaacgacatttgacggtcgctttacgctgctgccaacttgctgcctggggaactgtgataaagggccaaacatgatgatcgatgaggacactcacgcgcatctgaccccggaagcgatccctgaactgctggagcggtataaatgaaaaacattatccgtactcccgaaacgcatccgctgacctggcgtctgcgcgatgacaaacagccagtgtggctggacgaatatcgcagcaaaaacggttacgaaggcgcgcgtaaggcgctgaccgggctgtctccggacgaaatcgttaatcaggtaaaagacgctggtctgaaagggcgcggtggcgcgggcttttctaccggcctgaaatggagcctgatgccgaaagacgaatccatgaacatccgttacctgctgtgtaacgccgatgaaatggagccaggcacctataaagaccgcctgctgatggagcaactgccgcacctgctggtggaaggtatgctcatctccgcgtttgcgctgaaagcttaccgtggctacatcttcctgcgtggcgaatatatcgaagcggcagtaaatctgcgccgcgccattgccgaagccactgaagcgggcttgcttggcaaaaacattatgggaacaggtttcgacttcgaactgttcgtccataccggggcagggcgctacatctgcggggaagaaacagcgttaatcaactccctggaagggcgtcgtgctaacccacgctcgaaaccccccttcccggcaacctccggcgtatggggcaaaccgacctgtgtcaacaacgtcgaaaccctgtgtaacgttccggcgatcctcgctaacggcgtggagtggtatcagaacatctcgaaaagtaaagatgctggcaccaagctgatgggcttctccggtcgggtgaaaaatccgggactgtgggaactgccgttcggcaccaccgcacgcgagatcctcgaagattacgccggtggtatgcgtgatggtctgaaatttaaagcctggcagccaggcggcgcggggactgacttcctgaccgaagcgcaccttgatctgccgatggaattcgaaagtatcggtaaagcgggaagccgtctgggtacggcgctggcgatggcggttgaccatgagatcaacatggtgtcgctggtgcgtaacctggaagagtttttcgcccgtgaatcctgcggctggtgtacgccgtgccgcgacggtctgccgtggagcgtgaaaattctgcgtgcgctggagcgtggtgaaggtcagccgggcgatatcgaaacacttgagcaactgtgtcgattcttaggcccgggtaaaactttctgtgcccacgcacctggtgcagtggagccgttacagagcgccatcaaatatttccgcgaagaatttgaggcgggaatcaaacagccgttcagcaatacccatttgattaatgggattcagccgaacctgctgaaagagcgctggtaaccgaatttcgattaacgctcagtctctgactgagaaaactggaagcatgctaatggctacaattcatgtagacggcaaagaatacgaggtcaacggagcggacaacctgctggaagcttgtctgtctctgggccttgatattccttacttttgctggcatccggcgctgggaagcgtcggtgcttgccgccagtgtgcggtgaagcaataccaaaacgcggaagacacgcgtggtcgcctggtgatgtcctgtatgacaccggcttccgatggcacctttatttccattgacgacgaagaagcgaaacagttccgtgaaagtgtggtcgagtggttaatgaccaaccacccgcacgactgtccggtatgtgaagaaggcggtaactgccatcttcaggatatgaccgtgatgaccggacacagcttccgtcgctaccgtttcaccaaacgtacccaccgtaatcaggatttggggccattcatctctcacgaaatgaaccgctgcatcgcctgctaccgttgcgtgcgttactacaaagattacgctgacggtacagatctgggcgtttacggtgcgcacgacaacgtctacttcggtcgcccggaagacggcacgctggaaagcgaattttccggtaacctggtcgaaatttgcccgaccggcgtatttaccgacaaaacgcactccgagcgttacaaccgtaaatgggatatgcagtttgcgccgagcatctgccagcaatgttctatcggctgtaacatcagtcccggcgagcgttatggcgaactgcgtcgtatcgaaaaccgttacaacggtacggtaaaccactacttcctctgcgaccgtggtcgtttcggttacggttacgtcaacctgaaagatcgtccgcgtcagccagtacagcgtcgtggcgatgatttcattaccctcaacgccgaacaggcaatgcagggtgcagcagatattctgcgtcagtcgaagaaagtgatcggcattggttctccgcgtgccagcgtggaaagcaactttgcgctgcgtgaactggtgggcgaagaaaacttctacaccggtatcgctcacggtgagcaggaacgtctgcaactggcgctgaaagtgctgcgtgaaggcggcatttatactccggctctgcgcgaaatcgaatcttacgatgcggtactggtgctgggcgaagacgttacccagaccggcgcgcgcgtcgcgctggcagtgcgtcaggctgtgaaaggtaaagcgcgcgaaatggcggcagcacagaaagtggctgactggcagattgcggcaatcctcaacatcggtcaacgtgcgaagcatccgctgtttgttaccaacgttgatgacacccgtctggatgatatcgcggcgtggacttaccgcgcaccggttgaagatcaggcgcgtttaggttttgccatcgcccatgcgctggataactctgcgccagcggttgacggtatcgaacctgagctgcaaagcaaaatcgacgtcatcgtgcaggcactggcaggtgcgaagaaaccgttgattatctccgggacgaacgccggtagcatagaggtgattcaggctgcggctaacgtcgcgaaagccctgaaaggtcgcggcgctgacgttggtatcaccatgattgcccgttccgtcaacagcatggggctgggcattatgggtggcggttcgcttgaagaagcgttgaccgaactggaaaccggacgcgccgacgcggtggtggtgctggaaaacgatctgcatcgtcacgcttccgctacccgcgtgaatgctgcgctggctaaagcgccgctggtgatggtggttgatcatcaacgcacagcgattatggaaaacgcccatctggtactttctgctgccagctttgctgaaagcgacggtacggtgatcaacaacgaaggccgcgcccaacgtttcttccaggtttacgatcctgcttattacgacagcaaaactgtcatgctggaaagctggcgctggttacactcgctgcacagcaccctgctgagccgtgaagtggactggacgcagctcgaccatgtgattgacgctgttgtggcgaaaatcccggaactggcaggtatcaaagatgctgcgccggatgcgacattccgtattcgtgggcagaaactggcccgtgaaccgcaccgttacagcggtcgtaccgccatgcgcgccaatatcagcgttcatgagccgcgtcagccgcaggatattgacaccatgttcaccttctcgatggaaggtaacaaccaaccgaccgcgcaccgttcgcaagtgccgtttgcctgggcaccgggctggaactccccgcaggcgtggaacaaattccaggacgaagtgggcggcaaactgcgctttggcgatccgggcgtgcgtctgtttgaaaccagcgaaaatggtctggattacttcaccagcgtaccggcacgcttccagccgcaggacgggaaatggcgtatcgcgccgtattaccacctgtttggcagcgatgaattgtcacagcgtgctccggtcttccagagccgtatgccgcagccgtacatcaaactcaacccagcggatgccgcgaagttgggcgtgaacgcaggcgctcgcgtctcctttagttacgatggcaacacggtcacgctgccggttgaaatcgccgaagggctgacggcagggcaggtgggtttgccgatgggtatgtccggcattgctccggtgctggctggcgcgcatcttgaggatctcaaggaggcacaacaatgagttggatatcaccggaactgattgagatcctgctgaccatcctcaaagcggtggtgatcctgctggtggttgtcacctgcggggcattcatgagctttggcgaacgtcgcctgctgggtctgttccagaaccgttacggacctaaccgtgttggctggggcggttcgctccagctggttgcggacatgatcaaaatgttctttaaagaagactggatcccgaaattctcggatcgcgtcatctttaccctggcaccgatgattgcctttacctcgctgctgctggcctttgcgattgtgccagtcagtccgggttgggtggttgccgacctgaacatcgggattttgttcttcctgatgatggcaggtctggcggtttacgcggtgctgtttgcgggctggtcaagtaacaacaaatactcgttgctgggtgcgatgcgtgcttctgcgcagaccctgagctacgaagtgttcctcgggctttccctgatgggcgtggtggcgcaggccggttcattcaacatgaccgacatcgtcaacagccaggcgcatgtgtggaacgttatcccgcaattctttggttttattacctttgccatcgcgggcgtggcggtatgtcaccgtcacccgtttgaccagccggaagccgagcaggaactggcggatggttaccacattgaatattccggtatgaagttcggtctgttcttcgtgggtgagtacatcgggattgtgaccatctctgcattgatggtgacgctgttcttcggtggctggcaaggcccgttgttaccgccattcatctggttcgcgctgaaaaccgcgttctttatgatgatgttcattttgattcgtgcgtcgttaccgcgtccgcgttatgaccaggtaatgtccttcggctggaaaatctgcctgccgctgacgctgatcaacttgctggtaacggcggctgtcattctctggcaggcgcaataaggggcaataagaccatgaccttaaaagaattgttagtaggtttcggcacccaggttcgtagtatctggatgatcggcctgcacgcgttcgccaaacgcgaaacgcgaatgtacccggaagagccggtctatctgccgccccgttatcgtggtcgtatcgttctgacccgcgacccggacggcgaagagcgttgcgtagcctgtaacctctgcgcggtagcctgcccggtcggctgtatctcgctgcaaaaagcagaaaccaaagacggtcgctggtacccggaatttttccgcatcaacttctcacgctgcattttctgtggtctgtgcgaagaagcctgtccgaccacggcgattcagttaaccccggatttcgaaatgggggaatacaagcgccaggatctggtttacgaaaaagaggatctgctgatctccggtccgggcaaatacccggaatataacttctaccggatggcaggtatggcaatcgacggcaaagataagggcgaagcagagaacgaagccaagcctatcgacgtcaagagcctgttaccgtaaggagaggggcaatggagttcgctttttatatctgtggcctgatagccatacttgcgaccttgcgagtgatcacccataccaatccggtacacgcactgctgtacctgattatttcgctgctggcgatttccggggtgttcttctcactgggcgcttacttcgccggtgcgctggaaattatcgtctacgcgggtgccattatggtgctgttcgtgttcgtggtgatgatgctcaacctgggcggttcagaaatcgaacaggaacgccagtggctgaaaccgcaggtgtggattggtccggcaattttgtcggccatcatgctggtggtgattgtttacgccatccttggtgttaatgatcagggtatcgacggtacgccaatcagtgctaaagcagtgggtattacgctgttcgggccttacgtactggcggtggaactggcttctatgctgctgctcgcgggtctggttgtggccttccacgtcggtcgtgaagagcgtgcgggtgaagtgctgagcaatcgtaaagacgacagcgcgaaaagaaaaacggaggagcacgcatgatccccttacaacatggactgatcctcgcggcaatcttattcgttcttggcttaaccggtctggttatccgtcgcaatctgctgtttatgctgattggtctggaaatcatgattaacgcctccgcgctggcctttgtggtcgccggaagctactggggtcagaccgacggtcaggtgatgtacattctcgccatcagcctcgcggcggcagaagcgagtatcggccttgcgctgctgctgcaacttcaccgtcgtcgccagaacctgaacatcgattcagtaagtgagatgcgcggatgaacatgcttgccttaaccattattttgccattgattggcttcgtcctgctggcgttctcccgtgggcgctggtctgaaaacgtttcggcgatcgtcggcgttggctctgtgggcctggcggcgctggtaaccgcctttatcggcgttgatttcttcgctaacggcgagcagtcatacagccagccgctgtggacgtggatgtcggtaggcgactttaacatcggtttcaatctggtgctggacggcctgtcgctgaccatgctctcggtggtcactggtgtgggtttccttattcacatgtacgcctcctggtacatgcgcggtgaagagggctactctcgcttcttcgcctacaccaacctgttcatcgccagcatggtagttctggtgcttgccgacaacctgctgctgatgtacctcggctgggaaggcgtgggcctgtgctcctatctgctgatcggtttctattacaccgatccgaagaatggcgcagcggcaatgaaagcgttcgtcgtgacccgtgtgggtgacgttttcctcgctttcgcactgttcattctttacaacgaactgggcaccctgaacttccgcgaaatggtggaactggcaccagcgcactttgctgacggcaataacatgctgatgtgggcgacgctgatgctgctgggcggtgcggtcggtaaatctgcgcagttgccgttgcagacatggcttgccgatgcgatggctggcccgacgcctgtctccgcgctgatccacgccgcaacgatggtaaccgcgggtgtctacctgatcgcccgtacccacggcctgttcctgatgacgccggaagttctgcatctggtgggtattgtcggggcggttacgctgctgctggccggttttgccgcgctggtacagaccgacatcaaacgtgttctcgcttactctaccatgagccagattggctacatgttcctcgcgcttggcgtgcaggcatgggatgcggcgattttccacttgatgactcacgcgttctttaaagcgctgctgttcctggcatccggttccgtcattctggcctgccatcacgaacagaacatcttcaagatgggcggtctgcgtaaatctattccgctggtttatctctgcttcctggtgggcggcgcagcactgtcggcactgccgctggtcactgcgggcttcttcagtaaggatgagatcctcgcgggtgcgatggcgaatggtcatatcaatctgatggtggcaggtctggtcggtgcgtttatgacctcgctctacaccttccgtatgattttcatcgtcttccacggaaaagaacaaattcacgctcacgccgtgaaaggggtaactcacagcctgccgctgattgtgctgctgatcctttccaccttcgttggcgcactgattgtaccgccgctgcagggcgtgcttccgcaaacgacggaactggcgcacggcagcatgttgaccctggaaattacctctggcgtggtcgcggtggtcggcattctgctggcagcctggctgtggctgggtaaacgtactctggtgacctccatcgccaacagtgcgccgggccgtctgctgggcacctggtggtacaacgcctggggatttgactggctgtatgacaaagtgttcgtcaagccgttcctgggtattgcctggttgctgaaacgcgatccgctgaactcaatgatgaacatcccggctgtcctttcccgctttgcaggtaaaggtctgctgttaagtgagaacggctatctgcgctggtatgtggcatccatgagcatcggtgcggtcgtggtgctggcactgttgatggtactgcgttgagttaaggattgtgggattgcccctgggcatataagaacgtaggtcggataagccgccttcgcggtgcatccgacactacccccagtccgaagagaattttctgtcgtgagaattcgttgaaaatccggtcctgacgggacttttacaaggaataaagatcgccatgttactaccctggctaatattaattccctttattggcggcttcctgtgctggcagaccgaacgctttggcgtcaaggtgccacgctggatcgcgctgatcaccatgggattgacgctggcgctgtcgctgcaactgttgttgcagggcggttattcactgacgcaatccgccggaattccgcagtggcagtctgaattcgacatgccgtggatcccgcgttttggtatctctattcatctcgccattgacgggctgtcgctgctgatggtcgtgctgaccggtctgctcggtgtgctggcggtactatgttcgtggaaagagatcgaaaaatatcagggcttcttccacctcaacctgatgtggatcctgggcggcgttatcggcgtgttccttgccatcgacatgttcctgttcttcttcttctgggaaatgatgctggtgccgatgtacttcctgatcgcactgtgggggcataaagcctctgacggtaaaacgcgtatcacggcggcaaccaagttcttcatttacacccaggcgagtggcctggtgatgttgattgccatcctggcgctggtttttgttcactacaatgcgaccggcgtctggaccttcaactatgaagagctgctgaatacgccaatgtccagtggtgtggaatacctgttaatgctgggcttcttcatcgccttcgcagtcaaaatgccggtggttccgctgcatggctggctaccggatgcgcactctcaggctccgaccgccggttccgttgacctcgcggggatcttgctgaaaactgccgcttacggtttgctgcgtttctccctgccgctgttcccgaacgcatcggcagagtttgcgccaatcgctatgtggctgggggttatcggcatcttctacggtgcgtggatggctttcgcccagaccgatatcaaacgtctgatcgcctacacctcggtttcccacatgggcttcgtgctgattgctatctacaccggcagccagttggcctaccagggcgcggtaatccagatgattgcgcacggcttgtcggcggcgggtctgtttattctttgtggtcagctttatgaacgtatccatacccgcgacatgcgcatgatgggcggtctgtggagcaagatgaaatggctgccagcactgtcgctgttctttgcggtggcaacgcttgggatgcctggcaccggtaacttcgtcggcgaatttatgattctgttcggcagcttccaggttgtcccggtgattaccgttatctctacctttgggctggtctttgcatctgtttattcgctggcgatgttgcatcgcgcttacttcggtaaagcgaaaagccagattgccagccaggaactgccagggatgtcgctgcgtgagctgtttatgatcctgttgctggtggtgctgctggtactgctgggcttctatccgcagccgattctggatacctcgcactccgcgattggcaatatccagcagtggtttgttaattccgttactactacaaggccgtaaatcgccatgacaataactccacaaaacctgatcgcactgctaccgttgctgatcgtcggcttgacggtggtggttgtgatgctctccattgcgtggcgacgcaatcatttcctcaacgctacgctctcggttattgggcttaacgcggcgctggtttcgctctggtttgtcggccaggcgggcgctatggacgttacgccgctgatgcgcgttgatggtttcgccatgctttacaccgggctggtattgttggcgagcctcgccacctgtactttcgcctacccgtggcttgaaggctataacgacaacaaggatgagttctacctgttggtgttaattgccgcgctgggcgggatcctgctggcgaatgccaaccatctggcgtctttgttcctcggtattgaactgatctctttgccgctgtttggcctggtcggttacgctttccgccagaaacgttcgctggaagccagtatcaaatacaccatcctttctgccgcagcgtcttctttcctgctgtttggtatggcgctggtgtatgcacagtctggcgacctgtcgtttgtcgcgctgggtaaaaacctcggcgacggtatgctcaacgagccgctgttgctggcaggtttcggactgatgattgttggcctcggcttcaaactctctctggtgccgttccacctgtggacgccagacgtataccagggcgcgcctgcgccggtttccactttcctggcgacggcgagcaaaatcgctatcttcggtgtggtgatgcgtctgttcctctacgcaccggtgggtgacagcgaagcgattcgggtagtgctggcgattatcgcctttgcctctatcatcttcggtaacctgatggcgctgagccagaccaatatcaaacgtctgctcggttactcatctatctctcacctcggctatctgctggtggcgctgattgcgctgcaaacgggcgagatgtcgatggaagcggtaggagtttacctggccggttatctgttcagcagcctcggcgcgttcggcgtggtcagcctgatgtccagcccgtaccgtggcccggatgctgattccctgttctcttaccgcggtctgttctggcatcgcccgatcctcgcggcggtgatgacggtgatgatgctgtctctggccggtattccgatgacgctgggctttattggtaagttctacgtgctggcggtcggtgtccaggcacacttgtggtggctggtgggcgccgtggttgtcggttcggcaatcggcctttactactacctgcgcgtggcggtgagcctgtacctgcacgccccggaacaaccgggtcgcgatgcaccgtcaaactggcagtacagcgcaggcggtatcgtggtgctgatctctgcactgttggtactggtgctgggtgtatggccacaaccgctgattagcattgtgcggttagcaatgccgctgatgtaagctatcagtttgtaagtcagaaagccgccgacatgttcggcggttttttttggtgccctgacaccatcacccaacaataaccgtcagcgcatgattcccttgtcgcagcatacgtcgatacgcgctaatcagcttttccatatcaagcatgatcgaagcaaagagttgcccctctaactcttctgaaaaggtcactcccggataaatctccatttcattgagtcgcttaatggaaaactgtttacgcagctcacttcgatccagtgattccagtcggtcgattgtcgcggctaactcctgattccaggtcaatcccaggaagccatctatgccatcttcgaggctgtgttcaccaagcacggcacgactcagcggatcattcttcgcgggatcaaaagcagaggtgcctgtcagcccaaagtgtaaaaaatcccagcgtttatcaatatccagtcggcgtaatcctgaaagcgtgtcatgtatattatccatcaaaggtttttcagtagactcaagcagttggttaatcttttctgagtcaatttctgcaaaataaccaatcattcccatttatttttcctccattgaattttatgtttcgcatcttaaaacagacgagggaaaataaaatgtacatgtcgctgtttctggacccgcctcgagaaatttttattatttactgttgtgtaacaaggttataacaccatctgagccattttctgataattcaatctgtctgctgtatcaccgggcaagtggtattgtttattacgataaaaagcggtgtcagtaatcattacggcgggaatatcgtgttgccaataattcaggtggtcagagaaatcaataccgggaataaaccatggggcattcatagaataaacagataaatcccgggatgataacaatgccgtttttacctgacgaacggcgttgatatcctgtattctgccgaccaggcaataaagtccccccgatcgggataaagccaggacattgcgggtaagggtaatcctggctaccaggcgcagagtcgtaatagccaatcggggacgccctgcgcggtaactctggcaccgctactgacaaagaactcttttatatactctacggacctattcagattatcaatattgtcggcattacgtggatgcacagtttgtgtaagataacgaactgttttttctaattgctcaggactgacgtgtcggggcgttggcgataatgcagtgacccagggttggtaaaaataatcagagggagtgaaatcagaaataatataacaaaaggattttttttcatatataaattatcaataaaagacgttattttatcattatttataatgagttatgagtgtttgttttattacggttgttagatctatacaaaaagtatcttttacagtggcttcgctattttaaaaaggaattcatataaggaaaaatataattatgttatttattggcagattgagttgacagggggcagaactctgagggtaagaaaagtcagcaacaacaatccactacatcaacagaccagcaatcgcgtgccgagatacgctggaaatacccgaagattgaactggcggatggtgtgactgacatcagtcagtgatgactgtttagcaaactatgttcgaccagtcagcatatttgctgactggtcgaattaattaacaatgatgttaactcactcttttgccggatgctctatttttgggttgtgagtgttttatttctaattgtgtataagaagcattgattcgtgcatcgccatatttatctaaataacaatttctgtttaccagtctatgttgaaaatcaatttcgtactgctcttctgctgaatattttttaaatctgtcagcatagttttttaataacgtatagggggcgctgtcagaattgctttccctttgttcaatcacttcctgggctgccatgcacacaaatgcaccgcaactttggcttaaatattgctgaagatcggcatgtaaaaatattatctcgggttcagttaaatgaacttttatattattattcgacatttctcccatgaattcagaattaaaactattaatgacacgcttaagtgaattttctttatcatggcctagtgcgcgcaatgagttgaatatgacgcattttatttgttgtgtattatttttttcatttactattttctgtagcgaaactaatatccagtgtccgccagtatttatggggaataactggactgctttcggccatgatggatcgctcttaatattttcattgagagcgtcttccaggtgagttctggtggagtaggggacgtagagaccagtaggataattgacttcagtattttttgcattagcggcgatcttctgaagatagcaatctatttcatctgtggttaattgacgatttttatcccagaagtttgtaccatcactcagttcattattctcatcatttaaaagcaccttcgaaagcgactgtttttcagatataagaggaatttcatcaccgataattgtcattaatttcgaaggggagaatagctttttgaacaggagatcctctgaattatccggaccagctggtttaaggggggagttggttgcggcatgtgccaaattatataattttaaacaagcatttttgataagtcggataatcgatagggtctcatttgttgggtttctaacaatatggtaaagaatatcttcagctttttttccaaattcatcatagcctaacgcaatattatgcagtaactcaatgctttcttcatctccggataacgctgttttttttaaagactgcagtaattcctcggtcacagtaaatttttctgcaaatgtctgactgagttgcttttgagataattgacaataattgctgacaactgtaaccatcatgggctccttttagttgcaaaggttgtgctgaatcaagataaatagaggcaacttattgctctgaatatagtgcgtgaggagatgaataaatatcaaaaatcgctcaatatgcccgtgtgggtggatatatgtagcgcgggttgcgataacagggcaagtttcgccctgtttttaataataagcagagttaaacgttaaacacggtgaaatcattcgccagttcagtcgccgggaaaattgacctgcattcacgtaacaggtgctgacaacctttgtcatcatagcgcgagctgacgtgggtaatgattagcataccgactccagcctcacgggccagtgtcgcagcctggcgtgtagagctatggccgcgactattggctttggcttccatggttatatccagcgtcgcttcgtgcaccatgacatcgacacctttagccagatcaagtgcggcatcgcaggggccggtatcgccgaaaatagcgagcgctttacctggcactggagcagctaagtaatctgcgccgttaatctgccttccatcttccagggtgattgttttgcccgcttttaattcctgaaacagtggaccaggcggcacgccagcagcttttaatgcctgggcatttaatgcacccggtttatcatgttcttcaatacgatagccataacattccagtgggtgttccagcggataagcggttactttgcgcaggccatcatcgagaatttcgccagcgccaatttcgacaatttccagcggataatcggtccatgagccgctaatccgcagcgcggtttccacaaattcacggataccttgcggaccataaatcgttaagggttggataatgcctgacatagaacgactgcacagcaagccgggtaaaccaaaaagatgatcgccatgaaggtgactgataaaaatcttgtccagttttccagggttaaaggcggtatgcagtagctgatgctgggtgccttcaccgcagtcaaacaaccaaagtccgctctgggtcggatgttgcaggttaagcaatattgccgtgacattgcgcgtgcgggttggcacaccggccgaagtacctaaaaaaattaattccatgagttcatcacgtttcaaaaaatattccggctagtataaggcatacatctaaaaggagagcattatgattgaatggcaagatctgcatcactctgaattatcggtttcccagctttatgccttattacaactgcgttgcgcggtgtttgttgtcgagcagaattgcccttatcaggatatcgatggtgatgatttgacgggggataatcgccatattcttggttggaaaaatgatgaactggtggcatatgcgaggattctgaaaagtgatgatgatcttgagccggtcgttataggtcgggtgattgtcagtgaagcgttgcgtggcgaaaaagtggggcagcaactgatgagtaaaacactcgaaacatgtacgcatcactggcctgataagcctgtttacctcggggcgcaggcgcatctgcaaaacttctaccagagtttcggttttatccctgtgacggaggtctatgaagaagatggtatcccacacattgggatggcacgcgaggtaattcaggcgtaatcaacaacccttgtctatagttagtgacaggttttacgcaaatggagaacgagaatgtctaatcagtttggtgatacacgtatcgatgacgacctgacgctgcttagtgaaacactggaagaggtgctccgctcctctggcgatcccgccgatcagaaatatgttgagctgaaagcgcgtgcagaaaaagcgctggatgatgtgaaaaaacgggttagccaggcttcagacagttattactatcgggcgaagcaggcagtttatcgtgctgatgactacgtccacgaaaaaccctggcaaggaattggtgtgggcgcggccgttgggctggtactaggactgttgctggcacgccgttaaaacctccctacaccggggtactgcatgttttttgtagtaccccgtataatgtgaggcttttaacagggagaggtccgcgtgcaatcacttactacggcgctggaaaatctactgcgccatttgtcgcaagagattccggcgacacccggcattcgggttatcgatattcctttccctctcaaagacgcttttgatgccttgagctggctggccagtcagcaaacgtacccgcaattctactggcaacaacgtaatggtgatgaagaagctgccgtcctgggcgcgattacccgttttacgtcgttggaccaggcacaacgttttcttcgccagcacccggaacacgccgacttacgcatttgggggctgaatgcttttgacccgtcgcagggcaatttacttttaccccgcctggaatggcgacgctgtggcggtaaagccacgctgcggctgacgctattcagcgaaagctcccttcagcacgatgcgattcaggcaaaagaatttatcgccacactggtgagtatcaagcccttgcctgggttacatttaaccaccacgcgagaacaacactggccggacaaaacgggctggacgcaattaatcgaactggcaacgaaaaccatcgccgaaggtgagctcgacaaagtggtgctcgctcgggcaactgacctgcatttcgcaagtccggtcaacgcggcggcgatgatggctgccagtcgtcgactgaatctgaattgctaccatttttacatggcctttgatggcgaaactgcttttcttggctcttcaccggaacggttatggcggcggcgtgacaacgcgctgcgtactgaagcgctggcgggaacggtagcaaatcatcctgatgataagcaggcgcagcagttaggtgagtggctgatggcggatgataaaaaccagcgcgagaacatgctggtggtggaagatatctgccaacgattacaggccgatacccagacgctggatgttttaccgccgcaggtactgcgtctgcgtaaagtgcagcatcttcgccgctgtatctggacttcactcaacaaagcggatgatgtgatctgtttacatcagttgcagccaacggcagcagttgctggcttaccgcgcgatctggcgcgacagtttatcgcccgtcacgaaccgttcacccgagaatggtacgccggttctgcgggctatctctcattacaacaaagcgaattctgcgtttccctgcgctcagcaaaaattagcggcaatgtcgtgcgattatatgctggcgcgggcattgtccgtggttccgaccccgagcaagagtggcaggaaatcgacaacaaagcggcagggctgcgtactttattacagatggaatagtaatgagtcgcatcattaccgattcatatcaataatctatttttgtagctccttatacttagccgcaatattgataccggacaaactcatgtcagtaagcgcatttaaccgacgctgggcggcggtcattctggaagcattaacgcgtcacggcgtcagacacatctgtatcgccccaggctcgcgttctacaccgttaacgttagcggcggcggagaattccgcattcattcaccacacccatttcgatgagcgtggactggggcatctggcgctggggctggcgaaagtcagcaagcagccggtggcggtgattgtgacctccggcacggcggtggcaaatctctatccggcactgattgaagccgggttaaccggagaaaaactgattctcttaaccgccgatcgcccgccggagctaattgactgcggcgcgaatcaggcaattcgccagccgggaatgttcgcctctcaccccacgcacagtatttcattgccgcgcccgacccaggatatccccgcatgttggctggtttctaccatcgaccacgctctcggtacgcttcatgcggggggagtccatatcaactgcccgtttgctgaaccgctgtatggcgaaatggacgataccgggcttagctggcaacagcgtctgggtgactggtggcaggacgacaaaccgtggctgcgtgaagcgcctcgtctggaaagtgaaaaacagcgcgactggttcttctggcgacaaaagcgcggcgtggtggttgccgggcgcatgagtgcggaagagggcaaaaaagttgccctgtgggcgcaaactcttggctggccgctgattggcgatgtgctgtcacaaaccgggcagccgctgccgtgtgccgatctttggttaggcaatgccaaagcgaccagcgagctgcagcaggcgcaaattgtggtgcaactgggaagcagcctgacggggaaacggctcctgcaatggcaggcaagctgtgaacccgaagagtactggattgttgatgacattgaagggcgacttgatccggcacaccatcgcggacgtcgcttaattgccaatattgccgactggctggagctgcatccggcagaaaaacgccagccctggtgcgttgaaatcccgcgcctggcggaacaggcaatgcaggcggttattgcccgccgtgatgcgtttggcgaagcgcaactggcgcatcgcatcagcgactatctgcctgaacaggggcaattgtttgttggtaacagcctggtggtacgtctgattgatgcgctttcgcaacttccggcaggttacccggtgtacagcaaccgaggggccagcggtatcgacggactgctttcgaccgccgcaggcgttcagcgggcaagcggcaaaccgacgctggcgattgtgggcgatctctccgcactttacgatctcaacgcgctggcgttattgcgtcaggtttctgcgccgctggtattaattgtggtgaacaacaacggcgggcaaattttctcgctgttgccaacgccgcaaagcgagcgtgagcgtttctatctgatgccgcaaaacgtccattttgagcacgccgccgcgatgttcgagctgaaatatcatcgtccgcaaaactggcaggaacttgaaacggcatttgccgacgcctggcgcacgccaaccaccacggtgattgaaatggtggttaacgacaccgatggtgcgcaaacgctccagcaacttctggcgcaggtaagccatttatgatcctgcacgcgcaggcaaaacacggaaaaccaggtttaccctggctggtgtttttgcacggtttttccggcgattgccacgaatggcaagaagtgggcgaggcgtttgccgactactcacggttgtatgttgatctcccaggtcatggtggttcggcggcgattagcgtcgatggatttgatgatgtcaccgacttactgcgtaaaaccttggttagttacaacatccttgacttctggctggtggggtactcgcttggcggacgggtggcgatgatggcggcttgccaggggctggcggggctttgtggggttattgtcgaaggcgggcatccggggctgcaaaatgctgaacaacgtgcggaacgtcagcgttccgatcgccaatgggcgcagcgttttcgcacagaaccgttaacggcggtatttgccgactggtatcaacagcctgtttttgcctcgctcaatgacgatcaacgccgggagctggtggcgctgcgcagcaacaataatggcgcaacccttgccgccatgctggaggcgacttctctcgccgtccagcctgatttacgtgctaaccttagcgcccgcacatttgcgttttattatttatgtggtgaacgtgacagcaaattccgcgccctggcggcggaactggctgccgactgccatgtcattcctcgcgccggacataacgcgcatcgggaaaatcccgctggcgttatcgcaagtctggcgcagatcttgcgtttctgactaaaggacacaatatgatttatcctgatgaagcaatgctttacgcaccggttgaatggcacgactgctccgaaggtttcgaggacattcgttatgaaaaatccaccgacggtatcgcaaaaatcaccattaatcgtccgcaggtgcgcaatgccttccgtcctctgacggtaaaagagatgatccaggcactggcagatgcgcgttatgacgacaatatcggcgtgatcattctgactggcgcaggcgataaagcgttctgctccggtggtgaccagaaagtgcgtggtgattacggcggctataaagatgattccggcgtacatcacttgaacgtgctggacttccagcgtcagatccgtacctgtccgaaaccggttgtcgcgatggtggctggctactccatcggcggtggtcacgttctgcacatgatgtgcgacctgactatcgcagcagataatgccatcttcggtcagactggcccgaaagtcggttccttcgacggcggctggggcgcttcctacatggctcgtatcgtcgggcagaaaaaagcgcgagaaatctggttcctgtgccgtcagtacgacgcaaaacaggcgctggatatgggccttgtcaacaccgtggtaccgctggcggatctggaaaaagaaaccgtccgttggtgccgcgaaatgctgcaaaacagcccgatggcgctgcgctgcctgaaagctgcgctgaacgccgactgtgacgggcaggcggggctgcaggagctggcgggcaacgccaccatgctgttctacatgacggaagaaggtcaggaaggtcgcaacgctttcaaccagaaacgtcagcctgatttcagcaaatttaaacggaatccgtaatgcgtagcgcgcaggtataccgctggcagatccccatggacgcgggggtggttctgcgcgacaggcggttaaaaacccgcgacgggctgtacgtttgcctgcgtgagggcgagcgcgaagggtggggggagatctccccactgccgggcttcagccaggaaacctgggaagaggcgcaaagcgtgctgcttgcctgggtaaataactggctggcaggcgattgcgagctaccgcagatgccttccgttgcctttggcgtaagctgtgcattggcggagctggcagatacgctcccgcaggcggccaattaccgtgcggcaccactgtgtaatggcgatcctgacgatctgatcctcaaacttgctgatatgccaggcgagaaagtggcgaaggtcaaagtgggattgtacgaagccgtgcgcgacggcatggtggttaatctgttgctggaggcaattccggatctgcatttgcgtcttgacgcaaatcgcgcctggacaccgctgaaaggccagcagtttgccaaatatgttaacccggattatcgccaccgcatcgcgtttctcgaagagccgtgcaaaacccgcgatgattcgcgagcgtttgcccgtgaaaccggcattgccattgcctgggatgaaagcctgcgcgagccggattttgcctttgtggctgaagagggcgtgcgcgcggtagttatcaaacccacgctcacgggcagtctggagaaagtacgcgagcaggtacaggcggcgcacgcgctggggctgacggcggtgatcagttcttccattgaatcgagcttaggcttaacgcaactggcgcggattgccgcctggttaacgccggacaccattccagggctggacacgctggatctgatgcaggcgcagcaggtacgtcgctggccgggtagcacgctgcctgtcgtggaagttgatgcactggagcggttgttatgatcttctctgactggccgtggcgtcactggcggcaagtgcggggagaagccatcgccttacgtcttaatgacgagcaacttaactggcgcgagctttgtgctcgcgtcgatgaattagcctcaggctttgcggcgcagggcgttgttgagggcagcggcgtgatgttgcgggcgtggaatacgccgcaaacgctgctcgcctggctggcgttactgcaatgtggggcgcgggtgttgcccgtgaaccctcagctgccgcaaccgttgcttgaagaattgctgcccaatctgacgctgcaatttgcgctggtgccggatggggaaaacacgtttccggcgttaacgtcgctgcacattcagcgggttgaaggcgcacatgccgctacgtggcagccgacgcgtctgtgctcaatgacgttgacctcgggttctaccgggttgccgaaagccgctgtccatacttatcaggcccatcttgccagtgccgaaggggtgttatcgttgattccgtttggcgatcacgatgactggttgctctctttaccgctgtttcacgtctccggtcagggaattatgtggcgctggttatacgctggtgcgcggatgacggtgcgtgataaacagccattggagcaaatgctggcaggctgtactcacgcttcactggtgccaacacaactctggcgtttgctggttaaccgcagttccgtttccctgaaagcggtgttacttggcggcgcggctatcccggtcgagttgacggaacaggcgcgcgagcaggggattcgttgcttttgcggctatggtctgaccgagtttgcctccacggtgtgtgcgaaagaagccgacggcctggcagacgttggttcgccgctgccgggtcgggaagtgaaaatcgttaataatgaagtgtggctgcgggctgccagtatggcagaaggttactggcgtaacgggcaactggtttcactggttaatgacgaaggctggtacgctacgcgcgatcgcggtgagatgcataatggcaagctgaccattgtcggacgtttagacaatctgttcttcagtggcggtgagggtattcagccggaagaagccgagcgtgttattgctgcacatcctgcggttttgcaggtgtttatcgttcccgttgccgacaaggagtttggtcatcggccggtagcggtggtggagtatgaccagcaaaccgttgatcttggcgaatgggtgaaagataagctggctcgttttcaacaaccggtgcgctggctgactttaccgccggagctgaaaaacggcggtattaaaatttcacgtcaggcgctaaaagagtgggtgcaacgtcagcaataattaaccctccgtttcacttctcatttctgccattccattgccgttgataaagagtttatctgttaatctgtaaattgatgtgaaaactcttagcaaacaggataatgcaatggaatggctggtcaaaaaatcgtgctgcaataaacaagataacagacatgtacttatgctctgcgatgctggcggcgcgataaaaatgatcgccgaagtgaagagtgacttcgccgtgaaagtgggggatttactctcgcctttgcagaatgcgctttattgtattaatcgtgaaaagctgcatacggtgaaagtcctctcggcaagcagttatagccccgatgagtgggaacggcagtgtacagcggcagggaaaactcagtaacgttgttttgtcgtgggcaggaaaatcagcatcaacccgctcataatacaggctactcccagtagtgctttcagcgaaaaagtcccttcccagccgggaagtaccattgaagcaatccataccagcacataactcatactgagcaaggcataggctttgcttagcgcaagtttatgtagcgttttataccaacaaaaaacggaaagcagataacccagcagcccgagtaacagtatccgggcatccaggccaaaagctaacagagccgcgataaaatcccataagtgcgtcatcggcggcagatgacttgccgcaaaacccaggcttaattgcgcaactgaggcaataatgacgctgaataatccccatatcaggcccattacaccgtactcccgaggatcacaatgccaccaataatgaacgccaccccacaccagtgacgcggcgataccggttcgtgccacagttttactgcagccagcgtcacccagacaaaattcagacttaacatcgggtaggcaatgcctaccggtacgttctgcaagaccagcagccagagcaccatggcaagaccaagacaagccagcgccagtcccagccacagcacgatatgtttgcgccgtttgtttatcgccacaaagcaggttgcctgtttctgacacaactgcccggcaacgctaagcaagctggcaaagactaatgttagccagatcatttgggacgatactgaatcagcaccagacgctcctgacgatcgatggcatctgcgggcggaatggcgagactgttgatatcttcatcgcggtcaaccgaaagcacgagagtaataatcccctcctgacgatgttgattaagccagtttgcgaactcatcaccgctgacaaatctccctttcgcatccggataattaaggccgtatttcaactcacctgtctggcgatacatgatgatgtcatcgcgttgcaggctccatgccagacctgcggcaacaccgacgctatcagtaagaatatagcggcttggctgaagtgattcttgtgtcatctcgacaaaaaattgcggatgttttccttccataactctgtcaggaattgaaaatcctaccagcaacgccagccccagcgggcaaagcgcggcaaaaggccaggtcttttcgacgtttgttaaggtgtaccagccgaaaaatgcccatagcgaaaaaatcgaccaggcacaaaagactttatagctctcgaaggtttgccacaccggcgtgttcattggtccccacggggagaccacaaatgtggcaataatgccagtgacgccaaaagcgatgttaatccagccattaatccgcagcgccagaggattattttttgctgccagcaaagcgtaatgcgccatcagcattgccagagatgcaaagcaggaaagaatataggtgggcaatttacctttagcgacggagaaaaacagcagcggcattatcgtccagctcaacaaatagacggttgcggaatgcttgcggtttttccagcctgtgtacagtgcaccggggagtaatcccagccacggcaggctaccggcaatgatgaccggcacgtagtaccagaacggagctctatgttgggcatcatccagtgcaaagcgttgaatatgctcaacccagaaaaaatagtgccagaagttaggctcccgctgcgctatcgccagtccccaagggagaaccgtcagtacgcaactgataaccgccagccagccgtaaataaagagatctttccagcgtttttgcgtcgctacccatggcagcacgcttaataccggcacggcaagggcgagaaaacctttggtcatcacccccatgccgcaggtgattcccagcagtaaaaatcctgcgcttttgcctttccacgtctgtgcctgcattgccagccagaagctgcacattcccgccaccagccagaatgcaataaacggatcgagcacggcataagtgccgatggcatagacaataaacaatgagagataaattactgtggcgagtagagccagacgtttatcgcgccataagcgcagagtaaaccaggtcaccagcgcggcagttaacagggtcgcaaagataacgcctgcccgcacaccaaagttattcgcgccaaatagccattgcccaatgctgttaatccagtatccggcaatgggtttttcgaaataacgtagccctaacagatggggcacaatccagtcgccggatgccagcatttcccgactgatttccgcataacgcgtttcatcgggttgccagagcagacgcgtgctgatcggtaacaggtaatagcaggcaataaacgcgaagaggccgataaggtaacgtaccgatttcatcagcgactacccgcaatttgttggcaacccagccagccttcacgtccggcaatatttccgcgaacaacttgtccgagcggcaacgtctctgataacagttcgcttaaagggcaaaatgtcacgccttcctgagctgcgcgtttgaggagatccacaaaattatgctgataagcgcagccttcaacttctgcatgaatggtataaaccggcgtgcctttatctcgcaggatgcggttgagtaaccaaccgttaaaatcttctgctttcacatcccgaccaatcacttcatcccaggtgggtaaggtcaccggaatttgcgcagtgccagggtttcctgattcgagcaatggacggaacggcatggccccacgacaatcgctgttgtagcgcaaatggaacgcttcttttgcttcgatcaccttctggtcggcacgccagcccgcagcggcagaacaggttaccggttgaccgataatctcttccagagtgcgaagaccgcgtgcaatatcgtcgatcattgtttgccgatcccagttaccgctacgggcttgccaggcatggtgatcccaggcgtgcaggccgacttcgtgatgtttagccgcttcacgaatgatatcggcattggcatgaccaatctctttacctggccaggccgtacctgccagtaaaatatcccagccataaagcgatgccgcgtttgagcgcagcatcttccacaaaaactgtggcttcaccagtcgccagagatggcggcccatattgtccgggccgacgctgaaaaaaatgctggcctgaatattatgcttactcaagatttccagcagacgcggcacgccttcacgggtgccacgaaaggtatcgacatcaatgcgtaagcctactttggtcatgatggtttatccgtaagatcaacggtgcgcaggaagaaatccagcgtttcgtcgatggtttcctgcatatcaattttcggctcccagtccaggcagcggtgggcattgcggatgctcggtttacgatgctctacgtcctgatatcctttgccgtagtagctgctactttcgacaacgcgaaagcccgcaaacggtgggaaatgatgacgcagcggatgtttttcgaagctcgccagcagcatctcgcccagttcctcaatgctcgcttcgttatcaggattgccaatgttgataatttcgccgtcgcagcgatttcccgcattttcgataatgcggtacaacgcctcgataccatcccggatatcagtaaagcagcgtttttgttttccgccatcaatcagcttaatcggtgaaccttctaccagattgagaatgagttgcgtaatcgcgcgggagctgccaattcgcgctgcattaaggttatccagtcgtggtcccatccagttaaacgggcggaagagggtgaactgtaaaccctctttttcgccataggcccagataacccgatcaagtaattgttttgacaccgaataaatccagcgtggtttattcaccgggccgacgattaaattagaatggtcctcatcgaagtatttatcgctacacatcccataaacttctgaagttgacgggaagatgattcgcttacggtacttcacgcagtagcggataatgcgcagattctcttcaaaatcgagttcaaatacgcgcagcgggttgcgggtatattcaatcggcgtggctatcgccaccagcggcaagacgacatcacattttttgacgtgatactcaatccattcggaatgaatactgatatcgccttcgacaaagtgaaaatgcggatgattcagaaaacggcttatcgcatcgctgccaatatccagaccgtaaacttcataatgatcttcgcgcagcaggcgttctgtcagatggttgccaataaagccatttaccccgaggatgagtacccgggtacggcgtcgggcggtgcaggcaggctggctattcaagcgtgaaccttgcaccaggcccagcgtctgcgctaattgcgagccctgcatagtaatgccgtcgcccgcctgtccggtgacgatttccagcgcgccatcgccacaggcaatcaacagcggtgcaatagaaatcacgctccccggctgtgctttgctggcatgaggatgaacacgcgacgaccagacggtaaatttctgattaccaacatagctgaaggcacctggccacggatcggcaacggcacgcaccatgttgtgcagcacggatgccggtttatgccattcgaggaaactgtcatctggcgttctgcgaccaaaacaggtggcttcgttttcgcgctgggcaatttccagaatattaccgtgtttaatggtgggtaatgtctgttccagcaactggcgcgcggcatggcacaatttatgatgcagcgtaatggcgatatcgtctggcgcaatggcaatgcgcagttgcgccacaatggccccggcatcggcacgtttcaccattcggtgcaatgtaacgccagtttccgtttcaccgttcaccagcacccagttcagcggcgcgcgaccacgatattttggtaacagcgaaccgtgcagattaaatgcacccgcgggagcgagctgcaaaatcgcgtcgcaaataagatggcgataataaaaagagaaaatcacctctggtgctaggtgggcaatgcgttccacccacagcggatgattaacgttatccggcgcataaaccggaatgcctctttccgccgccagacgagctaccgaaccataaaaggctttttcaccgggattatcagtatgagtaaaaatagcgctaatttcgtaaccggcagccagcagggcttcaataccgaggcatcccatatcgtggtaggcaaaaacgacggttttcattattcattttccttgctggatggacggataacttgctgaacaaaatagcgggggcgggcgcggacatcggtgtagatcctgccgatatattcaccgagtaatcccatgccgataaactgagcgccaataaaagtaaacagcacggcaaatagcataaagacgccttctgccgcccattgtggtccgaaggtcaggcgtaaaatcaccagcagcaccgcaatgctaaaacctccaatcgcaataatgctgccgagcagactcagcatacgtagcggcgttgtggtaaggcaggtcaccaggtcgtacatcaaattaatcaggcgcataaaactgtatttggattcaccaaactcacgctcggcatgatgtactggaatttcaattgcacggcgggcgaagatattcgccagaatcgggataaaggtgctgcgttcatggcagtgcaacatcgcatcgacaatatgacggcgataggcgcgcagcatacaaccgtagtcacccatcgctttgccagtggtgcgctgaataagccggttaatcatcttcgaagctgttttacgaaaccagctgtcctggcggttctggcgtacagtccctaccacgtcgtaaccttcatcggcttttgccaccaggcgggggatttcttctggcggattctggagatcggcatcaagggtaataattaagtcgccagtaacgtgactgaatcccgccataatcgctgaatgttgcccgtaattgcggttaagcaaaatagacacaatatggctgttctccgcttgtgaggcttcgaccagcatatgcgcggaattatcgctactgccgtcatcaatcagcaggatctcatactctttccccaacgattcacaggctgtggtggtgcgcctgattaattccggtaagctttcctgctcgttataaacgggaataaccaccgagactttcttaacagggtggatttcaaacatggcttattgtcctgcgagttgctgaagggctgtgatgacacggtcggcatcggcggtagtcatatccgggaacagcggcaaagaacagatgcgttcgctattccattcggtattcggtaacgacagcgtgggaaaacgctcgcgataatatttttgtgtgtgagcggcgcggaaatgtaacccggtaccaatgcctctttcttttaacgcttccatcaacgcatcgcgactgataccacaacgttgttcatcgacacgaataataaacagatgccaggcgtgaacgtgcggccaggcgggaaggcttaatggctgaaaggggagtgctgccagtgcttgctgatattgctgggcaatttcgcgccgacgggtgttgaggtgctctaatttgactaactgtgtcagggcaatcgcggcgttaatatcggtcagattgtacttatagcccggtgttaagacttcagcctgcggtgcacggccccaggtttgtctgtcataggcatcgacacccagaccgtgaaatttcagcatccgtagctggcgggcaaggttttcattatcagttacaatcaggccaccttcagcacaggtaatatttttaatggcatgaaatgaaaaaatagcggtaccttttgcgccaatatgtcgccctttgtaatacgtaccgacggcatgggcagcatcttcgataactgcgatgccgtaacgttcgccaatggcgcgaatggcgtcaatatctgctggcgcaccggcataatgcaccggaatgatggctttagtgcgtggcgtaatggctgactcgatagcttcaggcgtgaccatcagcgtatcgcggtcgacatccaccattaccggcgttgcacccaacaaggaaatcatattgagggttgaaacccaggtcagggaaggcgtaatcacttcatcgcccttgccaattttcaacgccattagcgtgatatgcattccggcggtggctgaactgaccgcgatggcatgctgatttcccgtcaactggcaaaaggcttgctcaagcgcctgattcttcggaccggttgtgatccaaccggattcgagaacctctttaactgcagcgagttcctccacgcccattgctggtcgcgaaaaaggcaaaaattctgacattgcttttccttccgccattgaatacctgtccacttatatttgctataaagagtgttgtgtatattttgccatttggagcgaaattttaaggatagaatattaacttaaccttaagaaactaatattagacgtaaatattgaaatttttatattttttcttatttaggctttgcatttggcaaaattttgaggcattttgccgacatcgtaggatttttaatattacaccaactgctaattatcgccagaaatgtcgctcaattttacggtaattgtctggttgcgcttgtctataggtggagtttacgtgttagctttttgccgctcatcattgaagtcaaaaaaatatttcatcattttactggcgctcgctgcaattgccggactgggtactcatgccgcctggagtagcaatggtttgccacgtatcgacaataaaacattggccagactggcacagcagcacccggttgtcgttttgtttcgccatgctgaacgttgcgatcgttcaaccaatcaatgcttgtcagataaaacaggtattacggttaaaggtacccaggatgcccgtgaactgggcaacgcttttagcgctgacatccctgatttcgatctttattccagtaataccgtccggaccattcagtcggcgacctggttttccgcgggtaaaaagctgacggtagataaacgacttcttcagtgcggtaatgagatttatagtgcaattaaggacttacaaagcaaagcgcctgataaaaatatcgttattttcacccataatcattgcctgacatatattgctaaaaataagcgtgatgcgacatttaaacctgattatctggatggtttagtcatgcatgtggaaaaaggcaaagtttatctggatggggaattcgttaaccactaaattttcaatctgacagccagtgatggctgtcatcattgttaaagaagacctttcaaacgtaacgtttttcgggtggcaacatttaaatcataatgcaccagatcttcaggttttacccacgcgtagtcctgaaactcttcgtttattttcacttctcggttggcagaaacgcagtcaaaaatcaggtaaatcatataaatttcttccttgcgaccatctgcatacgtcttggtgcgaatatcatcgctgaaggtccacggcgtgatttctgtcaaaagcagctgttctcccagttcttcgcgaatttcgcggcgtagtgcctcttcaattcgttcgccagactccacgccgccacccgaaagcgcccattgaccggggaaaacgccgcgatcgtcggccattttacacagcaaataagcaccatcattttgaatcaaagggcatacaatagtccgttgtcgcataggggtattccttataaataaaaagaaaccatgagaatacggtaactcagaaatatgtgaaagtgacagtaatctcttttgcaatgataactgcacttattattatttttgtgtgtatcggtaaagtgtgtttattttttcggcgtttaattatttaagaagtatttagttacaataagtgactagatcccttttttcgctcattgaatcctctgtgccaggcagtacaatcccgcagctttgggaattttgattaattgcttgtgggaaaggggataatgaaaaaaattgcgctagcaggtctggccggaatgctgttggtttctgcatcggtcaatgcaatgagcatcagcggccaggcgggtaaagaatacaccaatattggtgtcggttttgggactgaatcgacgggcctggctttaagcggtaactggacacataacgacgacgacggtgacgtcgcgggcgtggggctggggttgaatctgcctctcgggccgttaatggcgaccgttggcggaaaaggcgtttacaccaacccgaattacggcgatgaaggttatgccgcagcggtaggaggtggtttgcagtggaaaattggcaacagcttccgtttgtttggcgagtattactactctccggattcgctctccagcggtattcaaagttatgaggaagcgaatgctggcgcgcgttacaccattatgcgtccagtcagtattgaggcgggttatcgctacctgaatctgtcgggtaaagacggtaaccgcgacaacgccgtggctgacggcccgtatgttggggttaacgccagtttctgatcccttccggcgcggcattctgtcgcgccattcagtttcttactacgccttatctccctttgcgttatagtgattcgataacaaaagcaggagataaccatgttaaaagtggaaatgttatccaccggggatgaagtgttacacgggcaaatcgttgacactaacgctgcctggctggccgattttttctttcatcaggggctgccattatctcgccgcaatacggtgggggataaccttgatgacttagtcaccattcttcgcgaacgtagtcagcacgccgatgtgctgatcgttaacggcgggctgggaccgaccagcgatgatttaagcgcactcgccgctgcgacagcaaaaggtgaaggcctggtgctgcatgaagcctggctcaaagagatggaacgctatttccacgaacgtggacgagtaatggcaccgagcaaccgtaaacaagcggagctgcctgccagtgctgaatttatcaataacccggtaggcaccgcctgtggttttgccgtgcagcttaatcgttgcctgatgttctttactcccggcgtaccgtcagaatttaaggtgatggtcgagcacgaaatcctgccgcgtctgcgcgagcgtttttctttaccacagccgccggtttgtctgcgtttaactacctttggtcgatcggaaagcgatctggcacaaagcctggacactctacaactgccgccgggcgtaacaatgggctatcgctcttcaatgccgattatcgaactgaaactcaccggaccggcaagcgagcaacaggcgatggaaaaactgtggctggacgttaaacgtgttgccggacagagcgtgattttcgaaggcaccgaaggactgcccgcgcagatcagtcgcgaattgcaaaaccgccagttcagcctgacgttgagcgagcaattcaccggtggtttattggctttgcaactttctcgcgcaggtgctccattgctggcgtgtgaagtggttccttcacaggaagaaaccctggcgcaaactgcgcactggattacagaacggcgggccaaccattttgccgggctggcactggctgtttcgggtttcgagaacgaacatctcaactttgcgctagccacaccagacggcactttcgctctgcgtgtgcgtttcagcactacgcgctacagcctggctatccgtcaggaagtgtgcgcaatgatggcactgaatatgctgcgccgttggttaaacggccaggatatcgccagtgagcatggctggattgaggttgttgagtccatgaccttatctgtctgattccgccactctgtgccggtttactgcaccggcacattccccctccggcaaaacttgtccaaccctccctacggtgagcgtggtgttggggccagtgtggcacgggctgcgcgctggggacgcattgagaattacatggcgcaagttaacgattcactttgtctgttggtgcaggtggaaagtaaaacggcactggataacctggacgaaatcctcgacgtcgaagggattgatggcgtgtttattggacctgcggatctttctgcgtcgttgggctacccggataacgcagggcacccggaagtgcagcgaattattgaaaccagtattcggcggatccgtgctgcgggtaaagcggctggttttctggctgtggctcctgatatggcgcagcaatgcctggcgtggggagcgaactttgtcgctgttggcgttgacacgatgctctacagcgatgccctggatcaacgactggcgatgtttaaatcaggcaaaaatgggccacgcataaaaggtagttattgatatcaaaggcccatggggatcggttgtgggcctgtgttaattagtggttattcgctgccagatcggcttcgcttagctgggtggccgcgagcacctggtcacgatcaatgccctgttccagcatgcgcaaagcaattttaatggcttgttcatgcataccttcctgccagccaatttgatgcccttcctgccgtagccgttcagcaatagtcattaatctctccttttgtagtggtgaacgttcggcaatctcctcaataaaacgggtgaaacgggaggtatcgccgcattgcagcagataattaaacagtgtttgtagctggctgtcattagtgaagcctctaaccaaaagcgtggtgatcctgtcgaccatgccgattaaatcgcggtcgcgaatatgcttttgaatcagttccagcagagctatacgccgatgttgcatgatctcatcgtcaggtacgatggtgatatccaccaacggaaaagcttcggtgtacaactgccgggcaagttgcggatcgtcaaactcatccagccagttaagtgagtacgggtagggcgatgtttcgccatgataaaacagcaatggcaccaccagcggaactctgtcatagcctttatccaggtgacgctgcatggcggcagtggcatagcgcattagccgaaaagccatattcttttctgcagagctttgatgttcaatcacgcagtagatatagccgtcaccgtcgctggtttccacggaccacaaaacatccgagtagtaagcgcgtaaacttttttcaataaaactagtgggttccaggcgtaaggtttgcaggttgcaaagcttgcgcagtggttctggtaaatgtatttcgagaaaatcccgtgcggtttcgggtgtgaacataaaggttttaaacaccgcatcatgcggggaggatgttgttgattcggtcatggttgtccgtcacctgatatttatgatgacgcgacattacgtctatcccgggcctttgacatctgtcagtttcagcctttgcgagacattttcagaggaattttcaaagcgttgcaacgcatacatggtgcgtggaatcgcgctcgcaaaaatgcccgataagcaatgtgcttaccgggcatcaaaaggtcggttaagccagcgcctgggccagtagcgtaatcggatgttcgcagcgaaggctcgtggacatctcaatctgccatttgcaggtttcgcagtcggtgatgaccagatccgcgccgctctcttctatctggcggaacagtggcgcaccgatggcttgtgaggtggggtagttctcttttttgaaaccgtaagtacccgcaataccgcagcactgggaatccagcaccgttaactcaagccccgggattttacgcaacagctccagggtgtagagcgtccagcccattttttccatatggcacggagtgtgataaaccactttcagcggcagcggtttcagcggtaacgttttgccttcgtccagcttgcgccacagccagcgggttgccagttcgatatgatcgcgcaagcctttgttgtcgacattcagcacttccgggtattcgtcgcgcagggcaaatgtacaggttgaggaggtggcaatcaccggaatgccttttactcccacagcttcgcggatcgactctacattcgtaattgcctgtttgcgtgctttatcggtaaagccgttggcgattagcggtacgccgcagcatttttctttgctgagcagttgtacaccggtacccattgcgttgagcactttaattaaatctttacctaactgcggatggttgtagttaacgaagcagccgtgaaagaaagcgacctggtctttatattgtgcttgctgagccgctatgctgcgataccagcgacggaacgtgccgaaggagtatttcggtagcgtgcggcgatgatcgatttttaacgccgcatcaagcagctgccgcaccggtttcagcgaggtagcggtgttgacgattggtgcgaacggcgtggaaacgctacccatcaggtcggtatgactcaacacaaaattacgcagcgacgggcgcgtggtgtcatattttgcccgcgcgcgctggataatatcgccaatcttcacatcggacgggcaggcgacttcacaacgtttgcagttgatgcaatatttcagcgcctcgtcatacagtgcgccatctttcaaacgcagacgctcgccatccggcccggcttgttttggccctggataaccgggattcacccggctcaccgggcaggcggtggtgcagacggtgcacttaatgcagttttcgaagctggtgtcgttcattgttggcctcctgcgcgttgggcaatctgttgagcggcatgtaaagcactgacggcacaaacaccgccgccgcatccctgggcgatgggatcaaatccgcccagcaccgaaccgatggcaaacaggttctcaatggtttgccctgcctgcgacgggcgtagcgtctcatcagtggttacaccgaactgctgccacggttgcggcgcaaaaaaatcgcccttataccattcaccccgcgtggcggtttgtagcacatcaaggccgagaatcggctcgcgaatgccgttacgttccgctaccagtccgccactaaagaaactgccgctggcgagaaccgcgaaacgtggacgtagcggaatatcggcgtgattgcgggtccagatttcattcactacgccatttttacaggtcacttttttcacttcatcgcccggcatccacacgccaccctggcgcacaaactggcgctgtaactggttttgcagacgaatgcccagcacggaaggcggcagcgttggcaaaagcatcagtgaacaaggtagtttttcattcaaccaacgccacagtttgtcatcggccaggccgaagcaggcgggcatcaggatcatttcgcaggtattggcgacaggaataagcgcatcaagtaacagcggccagttttcttcattatcaaggaaacgggcgatattcaccgcgcgaaattcggtggcgttattgcgcaggacatccagttctggcagctctatttctgcggtttcaaccgaaagatccagttcgcgcaacgaagccgccgcaagatgcgcctggaaatccatcagcccgcttatccccactacacatatcttcttcgcgggtagcggccagacgggaacttctggcgaacttaaccaggttgcacgcaaagtgccgagcggggtaacgcgctgatgggccagttccacgctgccctgcaattgcgcaccgctttcagcgatcaatgcctgcgcctggcaagcgagatcgagcacgcgttgtggttcgagaagactgtaaggatgggctggtgcctgctgacgcaaagattccagtccactgtgaatgtctgtcaccggttgaccatcaggcagatggctcagcaaatccagcgaaccggatgagaaatgcagcgcgctttgaccacgcgtgacaatggcacagcgcaggccgtgtttttgcagttgcaggccacagagtaatccggcgaggccgccgcccataatgacagtatcaaagcgcatctttctgctccttctccagaccacacaatccctgataaacccagcgggtaaattcgctttcgcgcagtgcatctccccaggcgatgggttgcacgcctttccagcgttcgttaaggaaggtggaaagttgctcgatagattgcgcggacgtcgtgacgttaaaacgttgcagcagtccggcagcgcggcaggcgcagagttcgccctggcaggtacccatccccacacgggtacgacggcgtaaatccagcaggctattaacgtttaaattttctaccgcgtactgaacttcacccgcagttaccgcttcgcactcacataccaggctacgatgcagacggccttcgctcagccaggcaggcgtgcgatcgccatgacgataaaccgcagaaccgcgcagcggggcaggcagggagatgactttacgcaaggtaacttcagcgggttcttgtgaaccaggcagtgccagatcggcagtcgtacaggggcgcgtgttgcccagtttgcggcataccgcgtcggtagcccattcagccatcagccgataggtcatcagtttgccaccggtgatggtgataaatccgtccagaccatcgcgttcagcatggtcgagcagcacgatgccacggctgacgttacgtccgctcgggtcgtcatcgctggcaaccagcgggcgcacgccagaataggcccgcaaaatgcgcgttttcgccatcacgggggccagtttttccccttcacgcagcagaatatcaacctcttctgccgtcactcgattatcgtcaatctcgttgtaatcaatacgtaaagaggtggtaccaatcagcgaaatggtatcgccaggcaccagaatatcggcgtcggaaggtttacggcagcggttgatcacatgctggttaatgcggtgatccatgatcagcagcgatcctttcgccgggaacatgcgaatgcgcagatcggcatattcggcaatgtgttgcccccagatcccagcggcattaaccacgacaggtgcatgaagggcctgagtttcgccggtgagatggttacgtacacgaacaccgcacaccgtcgcgccttcacgaatcagccccgtgacttcatgagcggtaaggataacggcaccgtgttctttggcatccagcatgtttgctgcggtcagacgaaatggatcaacggtgccatccggaactttcaccgcgccaatcagtgccgggttaacggcaggttcgataatgcgcgcttgctgcgggtctatagcttctgcgctgatccctgcttcttcgcaggcgcgaataaaagtggcctggaaggagaggtcatcttccggcagggtgataaacaggccgttggttggttcaacgcagtgacgtgcaatgcgtttcaggatctggttttcactaatgcattcgcgggccgattccgcatcggttaccgcatagcgcgcaccgctgtgcagcaggccgtggttacgcccggtggcaccggttgcgatgtcgtggcgctcaaccaaaatcacgcgcagcccgcgcagggcacagtcgcgggcaatcccggctcccgttgcgccgccgccaatgataatcacgtcacttgattgcgagtcgcgagttttcattgttatccctctgaagttcgttttttaccatttagccatagtaaaaacatggattgtttgatttcgcgcatattcgctcataattcgaaagtgaaacgtgatttcatgcgtcattttgaacattttgtaaatcttatttaataatgtgtgcggcaattcacatttaatttatgaatgttttcttaacatcgcggcaactcaagaaacggcaggttctctcactgaatcaggctgttaatcataaataagaccacgggccacggaggctatcaatgttgagtatttttaaaccagcgccacacaaagcgcgcttacctgccgcggagatcgatccgacttatcgtcgattgcgctggcaaattttcctggggatattctttggctatgcggcttactatttggttcgtaagaactttgcgcttgctatgccttatctggttgagcagggattctcacgcggtgatttaggttttgccctttcggggatctcgattgcttatggattttcgaaattcatcatgggttcggtatcggatcgctcgaatccgcgcgttttcctgcccgcaggtttgattctggcggcggcagtgatgttgtttatgggctttgtgccatgggcgacgtcgagcattgcggtgatgtttgtactgttgttcctctgcggttggttccaggggatggggtggccgccgtgtggtcgtactatggtgcactggtggtcgcagaaagaacgtggcggcattgtgtcagtgtggaactgtgcgcacaacgtcggtggtggtattccgccgctgctgttcctgctggggatggcctggttcaatgactggcatgcggcgctctatatgcctgctttctgcgccattctggtggcattattcgcctttgcgatgatgcgcgataccccgcaatcttgtggtttgccgccgatcgaagagtacaaaaatgattacccggacgactataacgaaaaagcggaacaggaactgacggcgaagcagatcttcatgcagtacgtgttgccgaacaaattgctgtggtatatcgccatcgccaacgtgttcgtttatctgctgcgttacggcatcctcgactggtcaccgacttacctgaaagaggttaaacatttcgcgctggataaatcttcctgggcctacttcttctatgagtatgcgggtattccgggcaccctgctgtgcggctggatgtcggataaagtcttccgtggcaaccgtggggcaaccggcgttttctttatgacactggtgaccatcgcgactatcgtttactggatgaacccggcaggtaacccaaccgtcgatatgatttgtatgattgttatcggcttcctgatctacggtcctgtgatgctgatcggtctgcatgcgctggaactggcaccgaaaaaagcggcaggtacggcagcgggctttaccgggctgtttggttacctgggcggttcggtggcggcgagcgcgattgttggctacaccgtggacttcttcggctgggatggcggctttatggtaatgattggcggcagcattctggcggttatcttgttgattgttgtgatgattggcgaaaaacgtcgccatgaacaattactgcaaaaacgcaacggaggctaatggcatgaaattgaagctgaaaaaccttagcatggcgatcatgatgagcactatagtcatgggaagcagtgcaatggcggcggacagcaacgaaaaaatagtcatcgcccatcgcggtgccagtggatatttgccggagcatacgctgccagcaaaagcgatggcgtatgcgcagggagcggattatctggaacaggatttggtgatgaccaaagacgaccatctggttgttctgcatgaccattatctcgatcgtgttactgatgttgccgatcgtttcccggatcgggcgcgcaaagacggtcgttactacgcgatagatttcacgctggatgaaattaagtcgctgaaatttaccgaaggtttcgatattgaaaacggtaaaaaagtgcagacttatccggggcgtttcccaatgggtaagtccgacttccgggtgcacacctttgaagaagagattgaatttgttcaggggttaaatcactctaccgggaaaaatatcggtatttatcctgaaatcaaagcgccgtggttccatcatcaggaagggaaggatattgcggcaaaaacgctggaagtgctgaagaaatatggttacaccggtaaggacgacaaagtttatttgcaatgttttgatgctgatgagctgaagcgtattaagaatgagctggaacctaaaatgggcatggatctcaatctggtacagttgattgcctataccgactggaatgaaacgcagcagaaacagccggatggaagctgggttaattacaactacgactggatgtttaagccgggtgctatgaaacaggtggcggaatatgccgacggtatcgggccggattaccatatgttgattgaggaaacatcgcagccgggtaatatcaaactcactggcatggtgcaagatgctcagcagaataaactggtagtgcatccttataccgtgcggtcagataaactgcctgaatacactactgatgtgaatcagttatatgatgctctgtataacaaagcgggtgtaaatgggctgtttactgatttccctgataaggcagtaaaattccttaataaagagtaatgctactgcaggatggcgttcatgcgccatcctgtctcacatcaaatttttccattcaccacgagttgttccgtacacgtttgtagtaaaaacagtggactgccttctaccggcttttctttagccaacaacgaaatctgtcgatagaaggttggttcgtgaggaacggaacacaattcacctgcaatgcttttcagcgttaactctggttgtaaggcgatgcctaatccctgtcgaataaacttcatcgctgtatccgactgattaaattcacattttatctactgggcgcactattagtggtagtggctggtggaatctatgcgctgcaaatgaagggtaaaagcggtgtcacgctagtagtggcaaaagaaattcattaatacgacacgtttcattaagattttcctcaggtaaccacctatagtcattgtcgttaataaaatgacaggcgatagggtatggcagtttcagcaaagtacgacgaatttaatcactggtgggcaacagagggcgactgggttgaagagcctaactatcgccgtaatggtatgagcggggtgcaatgcgtcgagcgcaacggcaaaaagctgtatgtaaagcgcatgacgcatcatctgtttcattccgtacgttatccgttcggccgaccaacgattgtccgtgaggttgcggtaattaaagaactggaacgggccggtgtcatcgtgccgaagatcgtttttggtgaagcggtgaaaattgagggtgaatggcgagcgttgctggtgactgaagatatggcggggttcatcagcattgctgactggtatgcccagcatgcagtatcgccttattctgacgaagtacggcaagccatgttgaaagcagtggcgctggcgtttaagaaaatgcatagcattaatcgtcagcatggctgttgttatgttcgccatatctatgtgaaaacagaaggtaatgcagaagctggttttcttgacctggagaaaagtcgtcgccgcttgcgtcgcgataaagcgattaatcatgacttccgccagctggaaaaatatctggagccaatccccaaagcggactgggagcaggtgaaagcgtattactacgccatgtaatcgttgtaggccagataagacgcataagcgttgtatctggcactacaaccaattcacatctcgatttcaatatcgccttttgcccggcaacaacagggcaaaatttcccccggctgaataaaggctaacggttcggcaatccagtcaacctgacctgcaaccagacgggtgcgacaggagccgcagtaaccttcgcgacactgatactcaaccgccacattgtgggattccagcgccgccagaagggaagggtgttcatcctggcacagcagttgtgtgccagtgatgcgcagggtaacgcgggccatcagagttggaagttactcaaatcgtcggtgtccacttccgcgtcaatctgcccgaccagataagaactgacttccacttcctgcggagcaacctgcacgttatcagacaccagccaggtgttgatccatgggatcgggttggagcgcgtctggaacggcagatccaaaccgactgcctgcatacggatattggtgatgtattcaacgtactggcagagaatgtctttattcagaccaatcatcgaaccgtcgcggaacagataatccgcccagtctttctcctgttgagctgcctgaacaaacaggtcatagcactcctgcttacactcttcggcaatttccgccatctcaggatcgtccgcgccgctgcgcagcagattcagcatatgctgggtgccggtcaggtgcagggcttcgtcgcgggcaatcaggcgaataattttggcgttgccttccatcaattcgcgttctgcaaatgcgaaggaacaagcaaagctgacgtagaaacgaatcgcttccagcgcgttaacgctcatcaggcagagatacagttttttcttcagctcgcgcaggctaacggtcacagttttaccgttaacggtgtgggtaccttcgcccagcagatgccagtagctggtcatttcgatcagctcatcgtaatagctggagatcccttccgcacgtttctggatctgctcgttggtgacgatatcgtcaaacacaacagacggatcgttaacgatattacgaatgatatgagtataggaacgggaatgaatcgtttctgagaacgcccaggtttcgacccaggtctccagttccgggatcgagatcagcggcagcagtgccacgttcgggctacggccctgaatggaatccagcagcgtctgatatttcaggttgctgataaagatgtgtttttcgtgttcaggcagtgcctggtaatcgatacggtcgcgagaaacgtcaacttcttccggacgccagaagaaagagagctgcttttcgatcagcttttcgaagatgtcatatttttgctgatcgtagcgagccacgttgaccggctgaccaaagaacatcggttctttgagctgatcatttttcgtctgtgaaaaggtggtatatgccatgagtgtgtcctgttgggagtttaatgccggataaggcattttacgccgcatcctgtgcctgatgcgacgctgacgcgtcttatcaggcctacaaatccgagccgtaggccggataaggcgttcacgctgcatccggcatctcaatatcagatcttacatgcgccgctttcgcagccatcgtcctggattgacggtaccagatcgtcctgcgcgtcttcagcgccgtcacgggtgttctgataatacagcgttttgaccccgaatttgtaggcggtgagcaggtctttcagcaactgctgcatcggcacttttcctgacgggaaacgtgacggatcgtagttggtgttagcagagatcgactgatcgataaatttctgcatgatacctaccagttgcaggtagccatcgttacccggcatttcccacagcagctcataggcgtcgtgcaggtgctcgtagtccggcaccacctggcgcaaaataccgtctttcgacgctttgatgctgacgtaaccgcgcggcggttcaataccgttagtggcgttagagatctgtgaagaagtctctgacggcatcagggcagaaagcgtggagttacgcaggccgtgcgttttgattgattcacgcaatgcttcccagtcgtaatgcagcggctcattagcgatggtatccagatctttcttataggtatcgatcggcaggatccctttcgcgtaagtggtttcgttaaaccacgggcacgcgccttgctcttttgccagctcgttagacgctttcagcaggtaatactgaatcgcttcgaaggttttatgcgtcaggttgttggcgctgccgtcggagtaacgcacaccgtgcttcgccaggtagtaagcgaagttgatcacaccaatacccagcgtacgacgacccatcgctccacgtttggcggccgggatcgggtaatcctgataatccagcagcgcgtcaagtgcacgaaccgccagaattgctagctcttccagttcatccaggctattaattgcgcccaggttgaaagcagacagcgtacacagcgcgatttcaccgttctcgtcgttgacgtcgttcagcggtttggtcggcagggctatctccaggcacaggttagactgacgcactggcgcgatggccggatcaaacgggctatgggtattgcagtggtcaacgttctgaatatagatacgaccggtagacgcacgttcctgcatcatcagcgagaacagctcaacggctttcacacgctgcttgcggatgctgtcgtctttctcatatttggtatacaggcgttcaaactcttcctgatcggcgaagaatgcgtcgtacagccccggtacgtcggacgggctgaacagggtgatatcttcacctttcagcaggcgggtatacatcagtttgttgatctgtaccccgtagtccatatggcgcacgcggttgccttccacaccacggttgtttttcaacaccagcaggctttccacttccagatgccacatcgggtagaacagcgttgccgcaccgccgcgcacgccgccctgagagcaggatttcaccgctgtctggaaatgtttgtagaacggaatacagccggtatggaacgcttcaccaccgcgaatcgggctacccagcgcacgaatacgcccggcgttgatgccgatcccggcacgctgggaaacgtatttcacaatcgcgctggaggtagcgttgatggaatccagactgtcaccgcactcgatcagtacgcaggagctgaactgacgagtcggggtacgcacgccggacatgattggcgtcggcagcgaaattttaaatgtggaaaccgcgtcgtaaaaacgcttcacatattgcaggcgcgtttcacgcgggtagttcgagaacaggcacgcggcaaccagaatataaaggaactgggcgctttcgtagatttcgccggtcacgcggttctgtaccagatatttgccttccagctgcttaacggcagcataagagaaggtcatatcacggtcgtgatcgataaacgtgtccatctgcttgaactcttcttccgtgtagtcttccagcagatgattatcgtatttgcccatctcgaccattttcaccacgtggtcgtacagcgcaggcggctcaaactggccgtaggcttttttacgcaggtggaagatcgccaggcgcgcggcgagatactgataatccggcgcatcacgggagatcaggtctgcggccgccttgataatggtttcgtggatgtcagaggtcttgataccgtcataaaactgaatgtgggagcgcagctcgacctgggaaatcgaaacgttatgcagtccttctgccgcccaatccagaacgcgatggattttgtcgagattgatgcgctctgtgctaccgtcgcgctttgtcaccagcagattctgattcatgtatgtcgtacctgtttttggaattctttccgcaatagtttcatgcagactacctgtagtacgggaagctgcttagaacactatatatagggggtatgtttgggattcactgcaagatagtgtgaaaatggccctcttgcaagtgcataactttgtggataactcaggaaggaaaaagtggctttcgcgcaccttaggtcagacaaggtgtccgggaaagtcaatgggaagagaaaaatttgttaaaaataactgttcggcgatttcttgaacggcagaataggttggataaattgatatagatggtttattaatctttttgctaatgattgcaaaaattgatctaagcacgagtcatcacataatctgatgtatcagttgtggtcaatatataaacgaatgtaagcgattgttgatgtcgaaatggttgttttctattcggttattgttaaatgcgaagccattttgttaatttaccttatattataagaaaattattcattactttaatttagtttaaatataactggtatcccttaaggttattaacttgaattatgacgcactgatactattcatcaaataataacaaaatagccattgcatcgggttggacaatttacaaaagaaagataacccatattgtataatgcgtttaaatatgccgtcttatataaaatgatggttagatgaatatgcggattatctttctacgcaaggagtatttatctctactcccgtcaatgattgcatctcttttctctgctaacggtttcgcggcggccattgatttatgccagggatatgatatcaaagcgagttgtcacgccagcaggcaaagcctttcaggcattacgcaggactggagtgtcgccgatgggcaatggctggttttttcggatatgaccaataacgccagcggaggagccgtatttttgcaacaaggagcggaattttcactattaccagaaaatgaaactggaatgactctgtttgccaataacaccgttacaggagaatataataacggcggggccatatttgctaaagaaaactcaacgctgaatcttactgatgttattttttccggtaacgtcgcaggcggctatggtggcgcaatctattcttctggtactaatgatactggtgccgtcgatttacgtgtcactaacgccatgtttcgcaataacatcgctaatgatggcaaaggtggcgcaatttataccattaataatgacgtttatttaagtgatgttatttttgataacaaccaggtatatacatcaacaagttacagtgatggcgatggcggggcaatcgatgttaccgataataatagcgacagcaagcatccttcaggttatacgataataaataacaccgcctttacaaataacactgccgaaggttatggcggggcgatatataccaatagcgcgacggctccctatcttattgatatttctgttgatgacagctacagccagaacggcggcgtgttagtggatgagaacaacagcgcagcaggctatggagatggtccttccactgcggcgggtggctttatgtatctcggcttaagtgaagttacctttgatattgccgacggaaaaacgctggttattggcaatacagagaatgacggagctgttgactctattgctggtaccgggttgatcaccaaaacaggttccggcgatctggtacttaatgcagataacaatgactttactggtgagatgcagattgaaaacggtgaagttaccctgggtcgcagcaactcactgatgaatgtcggcgatacgcattgccaggacgatccgcaagactgctacggtctgacgatagggagtattgataagtaccagaatcaggcagagctaaacgttggctccacccaacaaacctttgtgcactcattgacgggctttcagaatggcactttaaatatcgatgctggtggcaatgttactgttaatcaaggtagttttgctggcaccatcgaaggtgctggtcagctcaccattgcgcaaaacggcagctacgtgctgtcgggggcgcagtcgatggcgctaaccggcgatatagtcgttgatgatggtgcggtgctttcgctggaaggcgacgcggcagatctcgccgctctccaggacgatccgcagtcgatcgtgttaaacggcggtgtgctcgatctctctgatttctccacctggcagagtggcacatcatacaacgatggccttgaagtcagcggcagcagcggaacggttatcggcagtcaggatgtggtagatcttgcaggtggaaacgatatgcatatcggcggtgacgggaaagatggcgtctacgtggtggtcgatgcgggcgacgggcaggtaagtctggcaaacaataatagttatttgggcacaacacaaatcgcctccggtatgctggaggtgagcgacaactcgcagcttggagatacccactataaccgccaggttatctttaccgataagcaacaagaaagcgtgatggagattactgccaatgtcgatactcgctctacgacgactgagcatgggcgtgatattgaaatgcgcgccgacggtgaagtggcagttgatgcgggggtagacacgcagtggggcgcactgatggctgacagcagcgggcagcatcaggatgagggtagcacatttactaaaacgggggcgggtacgctggagctgaccgccagcggtacaacgcagtcggcagtacgtgtcgaagaaggcaccctgaaaggcgatgttgcggatatctttccttatgcttcgtcactgtgggtcggtgatggggcgacgttcgttactggcgcggatcaggatattcagtctatcgatgctacttccagcggcactatcgatatcagcgatggtacggttttgcgtctgaccgggcaggatacttccgtcgcccttaatgcctcattgtttaacggcgatgggacgctggtgaatgctaccgatggcgtgacgttgacaggtgagcttaataccaaccttgaaactgacagcctgacctatcttgccgacgtgacggttaatggtgatctgaccaatacgtccggtgcggttagcctgcaaaatggcgtcgctggcgatacgctgacggtaaacggtgattataccggcggcggtacgctactgttcgacagcgaattaaacggcgatgactcggtaagcgatcaattggtgatgaacggtaatactgctggcaacacaactgtggtggttaactccattacagggattggtgagccgacatcgacaggcattaaagtggttgatttcgcagctgatcccacgcagtttcaaaacaatgcacagttcagtctggctggcagtggctacgtcaacatgggagcgtatgactacacgctagtggaagataacaacgactggtatctgcgatcgcaagaagtaacgccgccatcgccacctgatccagaccctgacccaacacccgatcctgacccaacacccgatccaatccccgcttaccagccggtgctgaatgccaaagttggcggttatctcaataatctgcgggcggcaaatcaggcgtttatgatggagcgacgcgatcatgcaggtggcaatggtcagacgctgaatttacgtgttatcggcggacgttatcattacacggcggcagggcaactggctcagcatgaagacacttctacggtgcagcttagcggtgacctgtttagcgggcgctggggcgatgatggcgagtggatgcttggggcggttggtggctacagtgataatcagggcgagagccgctcgaatatgaccggaactcgcgccgataaccagaaccacggttatgccgttgggctgacctcaagctggtatcagcacggtaatcagaagcagggggcctggctggatagctggctgcaatacgcgtggtttaacaatgatgtttccgaacaagacgatggcacagatcattaccactcgtcggggattatcgcctcgctggaagccgggtatcagtggttaccggggcgtggtgtggtgattgaaccgcaggcgcaggtgatttatcagggcgtgcagcaggatgattttaccgccgctaaccatgcgcgcgtgtcacaatcgcagggggatgatattcagacgcggctgggtttacacagcgaatggcgtaccgcggttggtgtcacaccaacattagatctgaattattatcacgatccccatgcgacggaaattgaagaagatggcagcactatcagtgacgatgcggtgaagcgacggggtgaaataaaagtgggagtcacgggcaatatcagtcagcgagtgtccctgcgcggcagcgtggcgtggcagaaagggagtgatgattttgcccagacggcagggtttttgtcgatgacggtgaaatggtaatcactgtctagtcggcacggttgccggatgcggcgtaaacgccttatccggcctacggggagcatttgtaggcctgataagacgcggcaagcgtcgcatcaggcattggctcggccaaacaacaacctcacttattctgcgtgtgcagcatatagttcacatccacgccggggccgagtttaaaagtattagtgatcgggttgtaatgtagcccggttatatgtcgctctttaaggcttgtctgatctacccagccaagcagttctgccggtttaataaacttcttcacatcatgcgtgcctttgggcaccatgcgcaaaatatattccgcgccaaccaccgccatcagccatgacttgccgttgcggttaagcgtcgagaaaaagacatcgccgcccggtttcaccagttgcgcacaggctctgaccactgactgcggatcggggacgtgctccagcatctccatgcaggtcaccacatcatactgcccggcatgttttgccgcgtgctcttccacggtttcctgcacataatccacctgaatgccgctttccagtgcgtgcagttttgctacctgcaatggctcaaagcccatatccagaccggtcaccgtcgcgccttcgcgcgccatactctcggccagaatgccgccgccacaaccgacatcgagcacctttttgccaaataaaccgccagcacgctcggcaatatagcccagacgcagcgggttaatgcggtgcagcggtttgaactcaccttccagatcccaccagcgggaggcgacggcttcaaatttagtgatctcttcgtggtctacgttatggtttaccggcgatttttcggcattcattagcacttctactccgtaattggcaagacaaacgagtatatcaggcattggatgtgaataaagcgtataggtttacctcaaactgcgcggctgtgttataatttgcgacctttgaatccgggatacagtagagggatagcggttagatgagcgaccttgcgagagaaattacaccggtcaacattgaggaagagctgaagagctcctatctggattatgcgatgtcggtcattgttggccgtgcgctgccagatgtccgagatggcctgaagccggtacaccgtcgcgtactttacgccatgaacgtactaggcaatgactggaacaaagcctataaaaaatctgcccgtgtcgttggtgacgtaatcggtaaataccatccccatggtgactcggcggtttatgacacgatcgtccgtatggcgcagccattctcgctgcgttacatgctggtagacggtcagggtaacttcggttccatcgacggcgactctgcggcggcaatgcgttatacggaaatccgtctggcgaaaattgcccatgaactgatggccgatctcgaaaaagagacggtcgatttcgttgataactatgacggcacggaaaaaattcccgacgtcatgccaaccaaaattcctaacctgctggtgaacggttcttccggtatcgccgtaggtatggcaaccaacatcccgccgcacaacctgacggaagtcatcaacggttgtctggcgtatatcgatgatgaagacatcagcattgaagggctgatggaacacatcccggggccggacttcccgacggcggcaatcattaacggtcgtcgcggtattgaagaagcttaccgtaccggtcgcggcaaggtgtatatccgcgctcgcgcagaagtggaagttgacgccaaaaccggtcgtgaaaccattatcgtccacgaaattccgtatcaggtaaacaaagcgcgcctgatcgagaagattgcggaactggtaaaagaaaaacgcgtggaaggcatcagcgcgctgcgtgacgagtctgacaaagacggtatgcgcatcgtgattgaagtgaaacgcgatgcggtcggtgaagttgtgctcaacaacctctactcccagacccagttgcaggtttctttcggtatcaacatggtggcattgcaccatggtcagccgaagatcatgaacctgaaagacatcatcgcggcgtttgttcgtcaccgccgtgaagtggtgacccgtcgtactattttcgaactgcgtaaagctcgcgatcgtgctcatatccttgaagcattagccgtggcgctggcgaacatcgacccgatcatcgaactgatccgtcatgcgccgacgcctgcagaagcgaaaactgcgctggttgctaatccgtggcagctgggcaacgttgccgcgatgctcgaacgtgctggcgacgatgctgcgcgtccggaatggctggagccagagttcggcgtgcgtgatggtctgtactacctgaccgaacagcaagctcaggcgattctggatctgcgtttgcagaaactgaccggccttgagcacgaaaaactgctcgacgaatacaaagagctgctggatcagatcgcggaactgttgcgtattcttggtagcgccgatcgtttgatggaagtgatccgtgaagagctggagctggttcgtgaacagttcggtgacaaacgtcgtactgaaatcaccgccaacagcgcagacatcaacctggaagatctgatcactcaggaagatgtggtagtgacgctctctcaccagggctacgttaagtatcagccgctttctgaatacgaagcgcagcgtcgtggcgggaaaggtaaatctgccgcacgtattaaagaagaagactttatcgaccgactgctggtggcgaacactcacgaccatattctgtgcttctccagccgtggtcgcgtctattcgatgaaagtttatcagttgccggaagccactcgtggcgcgcgcggtcgtccgatcgtcaacctgctgccgctggagcaggacgaacgtatcactgcgatcctgccagtgaccgagtttgaagaaggcgtgaaagtcttcatggcgaccgctaacggtaccgtgaagaaaactgtcctcaccgagttcaaccgtctgcgtaccgccggtaaagtggcgatcaaactggttgacggcgatgagctgatcggcgttgacctgaccagcggcgaagacgaagtaatgctgttctccgctgaaggtaaagtggtgcgctttaaagagtcttctgtccgtgcgatgggctgcaacaccaccggtgttcgcggtattcgcttaggtgaaggcgataaagtcgtctctctgatcgtgcctcgtggcgatggcgcaatcctcaccgcaacgcaaaacggttacggtaaacgtaccgcagtggcggaatacccaaccaagtcgcgtgcgacgaaaggggttatctccatcaaggttaccgaacgtaacggtttagttgttggcgcggtacaggtagatgactgcgaccagatcatgatgatcaccgatgccggtacgctggtacgtactcgcgtttcggaaatcagcatcgtaggccgtaacacccagggcgtgatcctcatccgtactgcggaagatgaaaacgtagtgggtctgcaacgtgttgctgaaccggttgacgaggaagatctggataccatcgatggcagtgccgcggaaggggacgatgaaatcgctccggaagtggacgttgacgacgagccagaagaagaataattttacttcttcatgccaaaagggagctatctcccttgtttgaattgaaaagtccaggctgcaaagtctgggcttttgtcgtattagggcacggtaaagtttggctgtgcccgtaaaaaatggctggctatacacaaggaatgtggcaatgagtggtgaaaaaaaggcgaaaggctggcggttctatggtcttgtaggttttggcgcaatagcactgctttccgctggcgtctgggcgttgcaatatgctggcagtgggccagaaaaaacgttgtcgccgctggtggtgcacaacaatctgcaaatcgatctcaatgagccggacctctttctcgacagcgactctctgagccagcttcccaaagatctcctcaccattccgtttctccacgatgttctgagcgaagatttcgttttctattatcagaatcatgccgatcgtctgggcattgaaggcagcattcgtcgtattgtctatgaacacgatctcacgctgaaagataagctcttttcgtcactcttagatcagcccgcgcaggcagcgctgtggcacgataaacaaggccatctttcacattatatggtgctgatccagcgcagtggtttaagcaaactgctggagccattgttgtttgccgctaccagcgacagccagttaagcaaaacggaaatcagtagcatcaagataaatagtgaaactattcctgtttatcagttgcgctataacggcaataacgccctgatgttcgcgacttatcaggacaagatgctggtgttttccagcacggatatgttgtttaaagatgatcagcaggataccgaagccacggcgatcgcaggtgatttgttgagcggcaaaaaacgctggcaagccagcttcggtctggaagagcgtactgccggaaaaacaccagtacgccagcgcatcgtggtcagcgccaggttgctgggttttggctaccagcgattaatgccttcttttgctggcgtacgcttcgaaatgggtaacgacggctggcacagttttgtggcgttaaatgatgaatccgccagcgtagataccagtttcgattttacgccggtctggaacagtatgcctgccggggccagcttctgtgtggtggtgccgtattcacacggtattgccgaagagatgctttcgcacatcagtcaggaaaacgacaagttgaatggggcgttagacggtgccgcggggctgtgctggtatgcagactcaaaattgcaaaccccgctgtttgtcggtcagtttgatggcactgccgaacaggcgcaattgccagggaaactgtttacgcaaaatattggtgcgcacgaaagcaaagcgccagaaggtgttttgccgataagccagactcagcagggcgaagcgcaaatctggcgtcgcgaagtgagttcccgatacggtcagtatccgaaagcgcaggcggcgcaacccgatcaattaatgtcggattattttttccgcgtgtcgctggcgatgcaaaacaaaacgctgcttttctccctcgatgacacgctggttaataacgccctgcaaacactgaataaaaaccgcccggcaatggtggatgtaatacccactgatggcatcgttccgctctatatcaatccacaaggcgtggcgaaactgctgcgtaacgaaacgttgaccagtctgccgaagaatctcgaaccggttttttataacgccgcacaaactttattaatgccgaagctggacgctttatctcaacaaccgcgttatgtcatgaagctggcccagatggaacccggtgccgcctggcagtggctacccataacctggcagccgctatgaggcacgggctgctggcgctgatttgctggctgtgttgtgttgttgcccatagcgaaatgctgaatgtcgaacaatccgggctgtttcgcgcctggtttgtacgcattgcacaagaacagctccgccaggggccaagtccacgctggtatcagcaggattgtgcgggcctggtgcgatttgcggcgaacgagacgctgaaagttcacgatagtaaatggctaaaaagtaacggtttctctagccagtatttgccgccagagatgacgctaacacctggacagcgtcaactggcgcaaaactggaatcaggggaacgggaaaaccggcccctacgtgaccgcgattaatttgattcagtacaacagccagtttattggccaggacataaaccaggcgctgcctggcgatatgatttttttcgatcagggcgatgcccagcacttaatggtctggatggggcgttacgtcatctaccacaccggaagcgccacgaaaactgacaacggaatgcgcgcagtcagtctgcaacaacttatgacatggaaggacacccgatggatacccaacgattccaatcccaatttcattggcatttatcgtttaaattttctggcgcgatagcagcgtgcttgtccctgtctcttgtgggaacagggcttgctaatgctgatgattcgcttccttccagtaactatgcgccgcccgccgggggaacattctttttgcttgctgacagcagttttagcagcagtgaagaggcgaaagtgcgactggaagcgcccgggcgtgattatcggcgctatcagatggaagagtacggcggcgtggacgttcgcctgtatcgtattcctgacccgatggcatttttgcgccagcagaaaaacctgcatcgcattgtggtgcaaccgcaatatcttggcgacgggctgaacaatacgctgacctggctgtgggataactggtacggcaaatctcgccgcgtaatgcagcgtactttctcttctcagtcacggcagaatgtgactcaggcattacccgaattacatctcggcaatgccattattaaaccttcccgttatgtacagaacaaccagttttccccgctgaaaaaatatcccttggtggaacagttccgttatccactatggcaggctaaaccggtcgagccgcagcaaggggtaaaactggaaggcgcatccagcaatttcatctcgccgcagccgggtaacatttatattcctctcggccaacaagagccgggactgtacctcgtcgaggcgatggttggtgggtatcgggcgacgacggtggtgtttgtttccgataccgtggcgcttagcaaagtgtcaggcaacgagcttctggtgtggaccgcgggtaaaaaacagggtgaagcgaagcccggctcagagatcttgtggactgacggtcttggcgtgatgacccgcggtgtgaccgatgacagcggtaccttgcagttacaacatatatcgccagaacgttcatacattctgggtaaggatgctgaaggcggtgtttttgtctccgagaacttcttctacgaaagcgaaatctacaacacccgcttgtatatttttaccgatcgcccgctatatcgcgcaggcgatcgtgtcgatgttaaagtgatgggccgcgagttccacgatccgttgcattcatcccccatcgtcagcgccccggcgaagctttcggtgctggacgctaacggcagtctgttgcaaaccgtcgatgtcacgctggatgcgcgcaatggcgggcagggaagtttccgcctgccagaaaatgccgttgccggaggttatgagttacgtcttgcttaccgcaatcaggtctatagcagcagttttcgcgtggcaaactacatcaagccacatttcgagattggtttagctctcgacaaaaaagagttcaaaactggcgaagcggtcagtggcaaactgcaactgctctacccggatggcgagccggtaaaaaatgcccgcgtgcagttaagtttgcgcgctcagcaattatcaatggtcggtaacgatttgcgttatgccggacgtttccccgtgtcgctggaaggcagcgaaacggtgtccgacgccagcggtcatgtggcgttaaatctccccgccgccgataaaccgagccgttatttgttaaccgtctccgccagtgacggcgcggcgtatcgtgtcaccaccaccaaagagatcctcattgaacgcggtctggcgcattactcattaagtactgccgcacaatacagtaatagcggcgagtcggttgtgttccgttatgccgcgctggaatcttcaaaacaggttcctgttacgtatgaatggttgcgtctcgaagaccgcacgagccatagcggagagctaccgtcaggcggcaaatcctttaccgtcaatttcgctaaacctggcaactacaatctgacattacgcgataaagacggcttaattctcgctgggttaagttatgccgtcagcggtaagggcagcacggcgcatacgggtacggtagatatcgtggcggataaaacgctgtaccagccaggcgaaaccgcgaagatgctgattacctttccggagccaattgatgaagcattattgacgctggaacgcgatcgcgtggaacagcagtcgctgctttcgcatccggcaaactggctaacgctacaacgtttaaacgatacccagtatgaagcccgggttccagtgagcaattcctttgcgcctaacatcactttttcggtgctgtatacccgtaatggtcagtacagttttcagaacgccgggatcaaagttgccgttcctcagcttgatatccgggtgaaaacggacaaaacccattaccagcctggtgaactggtcaatgtcgaattaacctcgtcgctgaaaggtaaacctgtttctgcgcagctaacggtaggcgtggtcgatgaaatgatctacgcgctgcaaccagaaatcgcgccgaatatcggcaaatttttctatccgctggggcgtaacaatgtgcgtaccagctccagtctgtcgtttatcagctacgaccaggcgctctccagcgagccggttgcgcctggcgcaactaaccgcagcgagcggcgagtaaaaatgcttgaacgtccacggcgtgaagaggtggataccgcggcatggatgccgtcactcacaaccgataaacaaggcaaagcgtatttcacgttcctgatgcctgattcgttaacccgctggcgtatcaccgcgcgtgggatgaacggcgacgggctggtcgggcaggggcgtgcttatctgcgttcggaaaaaaatctctacatgaagtggagtatgccaacggtgtatcgcgtgggcgacaaaccggcggcaggactgtttatcttcagtcagcaggataacgaaccggtggcgctggtgactaaatttgcaggcgctgagatgcgccagacgctgacgctgcacaaaggggcgaattatatttcgctggcgcagaacattcagcaatctggcttgttaagcgcagaactgcaacaaaatgggcaagtgcaggacagcattagcacaaaactgtcttttgtggataacagctggcccgttgaacagcagaaaaatgtcatgctcggcggtggcgagaacgcgctgatgttgcccgagcaggctagcaatatccggctacaaagtagcgaaacgccgcaggagattttccgcaacaatcttgatgcgttagtcgatggaccatggggtggcgtgatcaacaccggtagccgtctgatcccgctcagtctcgcctggcgttcgcttgccgatcatcaaagtgccgccgctaacgacattcgtcagatgattcaggataaccgtctgcggctgatgcaactggcggggcccggagcgcgctttacctggtggggtgaagatggcaatggtgacgccttccttacggcatgggcatggtacgccgactggcaggccagccaggcgctcggcgtaacgcaacaaccggaatactggcagcatatgctcgacagttatgccgagcaggcggataacatgccgttattgcatcgggcgctggtgctggcgtgggcacaggagatgaatctgccgtgcaaaacgttgttgaaagggttggatgaagctatcgcccggcgcggaactaaagatgaagatttctctgaggaagacatccgcgatatcaatgacagcctgatcctcgatacaccggaatctccactggcagatgcggtggcaaacgtcttaaccatgacgttgctgaaaaaagcgcagttgaagtccacggtgatgccacaggttcagcaatatgcgtgggataaagcggcaaacagcaatcagccgctggcgcacacggttgtgctgctcaatagcggtggtgacgctacccagacggccgctattttaagtggtttgaccgctgagcaatccactattgagcgcgcgctggccatgaactggctggcgaaatatatggcgacaatgcctccagttgttttgcctgcgcctgcgggcgcatgggctaaacataagttaactggagggggcgaagactggcgttgggttggtcagggtgtgccggacattctctcttttggtgacgaattatcgccgcaaaatgtgcaggtccgctggcgtgaaccggcaaaaacggctcaacaaagtaacattccggtgaccgttgaacgccagttgtatcggcttatccccggtgaagaagagatgagctttactctgcagccggtgaccagcaatgagattgacagcgatgcgctgtatctcgatgaaattacgcttaccagcgagcaggatgcagttctgcgctatggtcaggtggaagtaccgctcccgccgggagccgacgttgagcgcacaacatggggcatttcagtcaataaacccaacgccgcgaaacagcaggggcaattgctggaaaaagcgcgtaatgaaatgggcgaactggcctatatggtgccggtgaaagaactgacgggaacggtcactttccgccatttgctgcgcttctcgcaaaaagggcaattcgttctgcctcctgctcgttatgtgcgttcctatgcacctgcgcagcaaagtgttgcggcagggagtgaatggaccgggatgcaggtgaaataagtgaactggcgcagaatcgtctggctattggcgttggttactctgccaacgcttgcggaggagacgccgttacaactggtgctgcgcggtgcgcagcacgatcaactgtatcagctgtcgtcatcaggcgtgaccaaagtctcagcattacctgactcgctcaccacgccgttagggagtttgtggaaactgtatgtttacgcctggctggaggatacccatcaaccggagcagccctaccagtgtcgcggaaactccccggaagaggtttattgttgtcaggctggggagagcataacgcgcgataccgcgctggtacgttcctgtgggctctattttgcgccgcagcggttgcatattggcgcagatgtgtgggggcaatactggcaacagcgtcaggcacctgcgtggttagcgtctcttacaacgctgaagccagaaacctcggtaacggttaaatcgctgctcgattcattagcgacgttacctgcgcaaaacaaagctcaggaagtcttactggatgtggtgctggacgaggcgaaaatcggtgtcgcatccatgctcggtagtcgggtacgggtgaaaacctggagctggtttgccgatgataaacaggaaatccgccagggtggttttgctggctggttaaccgatggtacaccgctgtgggttactggcagtggcaccagcaaaacggtactaacccgttatgcgacggtgcttaatcgggttttgccagtgccgacgcaggttgccagtgggcaatgtgtagaggtggagctgtttgcccgctatccgctgaagaaaatcacagcggaaaagagtacgacggcagtaaaacccggcgtacttaatgggcgctatcgtgtgacgtttactaatggtaaccacattacgtttgtcagccacggtgagacgaccttactgagcgaaaagggcaaactgaaattgcagtcgcatctcgatcgtgaagagtacgttgccagagttctggatcgcgaggcgaaaagtacgccccctgaggcagcgaaagccatgaccgtggcgattcgcacttttttacagcaaaacgccaatcgggaaggcgattgcctgaccatccccgacagcagcgccacgcagcgtgtttctgcttcgccagcgaccacgggggcgcgaacgatgaccgcctggacgcaggatctcatctatgcaggcgatccggttcattatcatggcagtcgagctaccgaagggacactttcctggcggcaagccacggcccaggcggggcagggagagcgttacgaccagatactcgcgtttgcttatcccgacaacagccttagccgctggggagcgccacgctcaacctgccagttattacccaaagcgaaagcctggctggcgaaaaaaatgccgcagtggcggcgtatattacaaggcgagacggggtacaacgaaccagacgtgtttgcggtctgtcgtttagtctcaggtttcccctataccgatcggcagcagaaacggctgtttattcgtaacttctttacgcttcaggatcggctggatttaacccatgagtatctgcacctggcctttgatggttatcccaccgggcttgatgagaactatatcgaaacgctgacccgacaattattaatggactaatgctatgcgaaagatttttcttccgttgttactggtggcactttcgcctgtcgctcacagtgaaggtgtgcaggaagtcgagattgacgcaccgctctctggctggcatccggcagagggcgaagatgccagtttttcacaatcgatcaattacccggcgtcgtccgtcaacatggcagatgatcaaaatatctcagcgcagatccgcggcaaaataaagaattatgctgcggcaggtaaagttcagcagggccggctggtggtcaacggtgccagtatgccgcagagaattgaatccgatggttcatttgcacgcccttatattttcactgaaggcagcaacagcgtgcaggtcatcagcccggatgggcaaagccggcaaaaaatgcagttttactcaacgccgggtacaggaacgattcgtgcacgtttacggctggttctctcgtgggatacggacaattccgatctcgatctccatgttgtcacgcccgatggcgaacacgcctggtacggtaacaccgtgctgaaaaacagtggtgcactggatatggatgtcacgacggggtacggacccgagattttcgccatgccagcaccagttcacgggcgctatcaggtgtatatcaactactatggtgggcgcagcgaaacggaattgacgaccgcccaactgacgctgatcaccgatgaaggatcggtcaatgagaaacaggaaacatttattgtaccgatgcgtaatgctggcgagctgacgctggtgaaaagttttgactggtgatccatcccttcacacaacctggctctctcttttttcagataagactgctgggcgatctgccgacgccaggatataaccattaacaagcgtcggcagattggtcatttcttatttttcgtactgagaactgtccatctactccggctttcctggttaaggcaatggtttctaagcgatacgcattattgcaatggtgacagaacattgcggtaacacgcttttaccgctaccttaaccacactccatcggtcacctgaggcggagcttcgcccctttgaaataccttgcttcttttcgtacaaccctgaaagcctcgcgctacatgttcagagcattggcgttagtgctctggctgttgattgctttttcatccgttttttacatcgttaatgcgttacatcagcgagaatcggaaattcgtcaggaatttaatctgagttccgatcaggctcagcgctttattcaacgcacctctgatgtgatgaaagagctgaagtacatcgccgaaaatcgcttatcggcagaaaacggtgtgctttccccgcgtggacgagaaacgcaggcggatgtgcctgcgtttgaaccgctgtttgccgactccgattgttccgcaatgagtaacacctggcgaggttctctggagtcattggcgtggtttatgcgctactggcgcgataatttttctgcggcttacgatctcaaccgggtatttttaatcggcagtgataacctctgcatggccaatttcggtctgcgtgatatgccagtggaacgcgataccgcgttgaaagctttgcatgaacgcatcaataaatatcgaaatgcaccacaagatgatagcggcagtaacctctactggatcagcgaaggtccgcgccctggcgtcgggtatttttacgcgttgacgccagtttatctggcgaaccggttgcaggcgcttttgggtgtcgagcagaccatccggatggagaactttttcttaccgggtacgttgccgatgggggttaccattcttgatgaaaatggtcataccctgatttcgcttaccggaccagaaagtaaaattaagggcgatcctcgctggatgcaggaacgctcctggtttggctatacggaagggttccgggagctggtgctgaagaaaaatctgccaccctcatcgctaagcatcgtgtattcggtgccggttgataaggtgctggaacgcattcgcatgttgatccttaacgcaattttgctgaatgtgcttgccggagctgcattgtttactctcgcgcggatgtacgagcgacgtattttcattccggcggaaagcgacgccctgcgactggaagaacatgagcagttcaatcgcaagattgtcgcctccgcgccagtgggtatctgtattttgcgtaccgctgatggcgtcaatattttaagtaacgaactggcgcatacctatctcaatatgcttacgcatgaggaccgccaacgactgacgcaaattatctgtgggcagcaggtcaattttgttgatgtcctgaccagcaacaataccaatctgcaaatcagcttcgtccattcgcgctatcgtaatgaaaacgtggccatttgtgtgctggtggatgtttcttcgcgcgtgaagatggaagagtcgttgcaggagatggcacaagcagcggaacaggcgagccagtcaaaatcgatgttccttgccaccgtcagtcatgagctgcgaacgccgctgtatggcattatcggtaacctggatctgttgcaaaccaaagagttaccgaaaggcgtcgatcggctggtgacggcaatgaacaactcttccagcctgttgttgaaaattatcagcgatattctcgatttctcgaagattgaatcggaacagttgaagatcgaaccgcgtgagttttcaccgcgtgaagtgatgaaccacatcaccgccaactatttaccgctggtggtacgcaagcagttaggcttgtactgctttattgaaccggatgtgccagtggccttaaatggcgacccgatgcgtttacagcaggtcatctccaacctgttgagtaacgccataaaattcaccgataccggctgtatagttttgcatgtccgcgctgatggcgattatctctctatccgtgttcgcgataccggcgtggggattccggcgaaagaagtggtgcgcttgtttgatcccttcttccaggtcggaacgggcgtacagcgaaacttccaggggaccggtctgggtctggcgatttgtgaaaaactgatcagcatgatggacggcgatatctcggtagattcagaaccgggaatgggcagccagtttaccgtgcgtattccgttgtacggcgctcagtacccgcagaaaaaaggcgtggaagggttgagtggtaaacgctgctggctggcggtccgcaatgcgtcgctctgtcagttcctggaaaccagtttgcagcgcagcggcatcgtcgttacaacatacgaagggcaggaaccgactcccgaagatgtgttaattactgacgaggtagtgagtaaaaaatggcagggtagagcggtagtgaccttctgtcgtcgccatattggtattccgctggagaaagcgccaggggagtgggtacacagtgtggctgccccgcatgagctaccggcattgttggcgcgtatttatttgatcgagatggagagcgacgatcctgctaacgctctgccgtcgacggacaaagcggtcagcgataatgacgatatgatgattctggtcgtggatgatcatccgattaaccgacgtctgctggcagatcagttgggatcgttgggctatcaatgtaaaaccgcgaatgatggtgtcgatgcgcttaatgtacttagcaagaatcatattgatatcgtgcttagcgacgtcaacatgccaaatatggatggttaccgcttgacgcaacgcattcgtcagttgggactgacgttgccggtaatcggagtaactgctaatgcgttggctgaagagaagcagcggtgtctggagtccggtatggacagctgcctgtcgaagccggtaacgctggatgtgataaaacagacgctgacggtatatgccgagagggtcaggaaatcgcgggaatcgtaggacggataaggtgtttatgccgcatctggcattcagtgcaaatgccagatgcgacgctgacgcgtcttatctggcctactttaatgtaatctgttgaaataatgggaatcgtaggccggataaggcgtttacgctgcatccggcaatcggtgcaaatgccagataagacactaacgcgtcttatctggcctacagatgattagtctttatctgccggacttaaggtcacagaagagagataattcagcagggcgatatcgttctcgacacccagcttcatcatcgcagatttcttctggctactgatggttttaatactgcggttcagctttttagcgatctcggtcaccaggaagccttccgcaaacaggcgcagaacttcactctcttttggcgagagacgcttgtcaccgtaaccaccagcactgattttttccaacaggcgagaaacgctttccggggtaaatttcttccctttctgcagcgcggcgagagctttcggcagatcggtcggtgcaccttgtttcagcacgatcccttcgatatccagatccaataccgcactaagaatcgccgggttgttgttcatggtcagaacaatgatcgacaggcttgggaaatggcgcttgatgtacttgattaaggtaatgccatcgccgtacttatcgccaggcatggagagatcggtaatcaacacatgcgcatccagtttcggcaggttgttgatcagtgctgtagagtcttcaaattcgccgacaacattcacccactcaatttgctcaagtgatttgcgaataccgaacaagactatcggatggtcatcggcaataattacgttcatattgttcatgtaataggctaccttgctacagcaagctcttgacataactgtcaatgtcgctgatgtatttttctattcctggaacatccttctcacgaatcagatgttccagcgtttcacataactgcttgccgggtaccagatttagcatggcaaatacgcctttaagacgatgagccgtttgggctaacgcagcaaagtcactggttgctgcttcagtatacagcctcttaacatcatccggtactgtgtctacaaagagcgcataatagccgctggcatggagttgcgcattttcatctccgcccagaggcgattctgtcacctcttcctgcgccagttgcacttcaattaattgtaagaccgcttcctgcatagcgttgctcatattgaagttgacgcacaattgaccaggcccaatttcccgtacgccagactcatcatcgcttaaaagcaagccagaggcagtaagattagacggattatccgttaaaaagatatcataatcttgactaattaatctttcatcgggtgtgatacaggttgcaccccaattttctaactggcgagtgacaatattccgaatttctgccgaagtaacatccaccattacgcagacatcatccagtaaacgctcttcttcctcttcaacttccgggtcagcggcgagcattttgatatgcacagagtagcgtgtaccaagcccatcccgcgttttgatgtttaaatgaccgcccagtttacgcgccagttgatcgctcagccagaatgccagcgggtccgccttgccatagcgatcgttttgggtctggttgataaacgggaagtgcaaattatccatttcatgaatacttacgccttctccggtgtccagaatgcggaatgtcaggcggtcttcagaggactcatcctgatcaacctcaagggtgatttttcccaattgcgttgaggtcacggcatattgcatcagtagcagcaaaatacgtcgtaaggcatcgcgatcgccgcggcgcatatcgtgtgctttcagatgattgttaatcagcagttgcagacctttacgcttgatggcaggcaacactgaaggcacaacttcatcaattaaatcctgcacggagaacagcaccgtctcacttttccagctatcatccgcaagcatgttcgctaactgtatttcatcaaccagccgcaccagcacatctgcctgattcgccagttgtttgctttccggggcgttgagtttagccgcgctctccgccagggactgtgcaggttctttcagcgcatcgccaatgtttttcataaaggtcatccggccctgctggtttttctcatacagacgctgcgcctgcttgagtttcttgtttaccagcacttcgcgatcctgatcgcgaataatgaaaatttgtgtgcgcggcgcgacctggctgcggaacatgcggatctcatacagctcgttattgatcgtcgcctgaataatcccctgatgctgttccgccatggtggtgatgttttgcagattcaaatgcggcagcaaatgatcggcaattttgttacttatgacagtgcggttcgattcctgatcgtgaaccagcaggccgagcggcagcagtgagactatctcttcattaattgcccgtaaaatgcgcaattcgttattgaccgccgtgctgggtagactttctgtactgcggctggagaaatggcggaatgtggtatagccaaataacgccagcgccagcaaaccgatgttcagcagcagtggcagcagaatgttttgcaacgtatccagcaataaggtgccataaggaacctgccagaccaggcgcatatcggtagagttgagtgccgaggagatttcaatcttcgtactgttaaagtggatactgacgctatccgtcccttctttctcattatcattgtttcccgttgccgtcgcgtctggctcaaggcggaaactgtccagcggcatacccggtgggatcaaatcattaatcggcagatcaaaagccacgaccgttgccagatgtcctggctggttaaaggtagtacgcaaggtaaagtaatgaccgttctgccaggccaggcggcgcatgttagaaaagctttcgcgttcatcgagggcgttggcctgttgcaacatctctgcacgacgtgaatcaacaatgtcgctgacggtcgattctttaaatccggaggtgagatctttaaggggtagggttgagatcagcaccagactgttatcctgaccattcaggtaatacatcgaccacggtacattttctgcgccccacaatgtatccagataagtggacatccgctgagtcatctcaagcgttgagttgtcgtgagagccaaagattaacgcttccgttttgcggcgtggtttctccagatagtagacatcctgtttcaggcgcgtctcttgtaaaccttcgccggaggagggggaggtcgtcgcggcaatgttgtcgtagatctgccaggtcacgtaacgccagttatcgacgcgcttttggatagcatgggtaatgtcgacaatctggtaacttttatctttcagccaggcgttaacggcgctttgtaccattacacccatcgtcaccagtaacacaatgatcaacagtaaaaagaagcgggtaatgctccccggtaggagtgaaaagcgggtcgtggccgttgtctctttctgacgcattcgtgtttatgacctgttaaaacttcgcgaagtgatagggcagtataaagggtacagtgtgaaattccagactcttacctgattgatgattctctattctcccgtgatatttatcatcctgcattgggggaaatagatgtacaagcgccattttgctgtacaaataacctacaaaaagcccaacaaaaataattgcaaataaacaaagattgctggaaattatgcggatgttaattatttgtgaaatagttaacaagcgttatagtttttctgtggtagcacagaataatgaaaagtgtgtaaagaagggtaaaaaaaccgaatgcgaggcatccggttgaaataggggtaaacagacattcagaaatgaatgacggtaataaataaagttaatgatgatagcgggagttattctagttgcgagtgaaggttttgttttgacattcagtgctgtcaaatacttaagaataagttattgattttaaccttgaattattattgcttgatgttaggtgcttatttcgccattccgcaataatcttaaaaagttcccttgcatttacattttgaaacatctatagcgataaatgaaacatcttaaaagttttagtatcatattcgtgttggattattctgcatttttggggagaatggacttgccgactgattaatgagggttaatcagtatgcagtggcataaaaaagcaaataaaggcatataacagagggttaataacatgaaagttaaagtactgtccctcctggtcccagctctgctggtagcaggcgcagcaaacgctgctgaagtttacaacaaagacggcaacaaattagatctgtacggtaaagtagacggcctgcactatttctctgacaacaaagatgtagatggcgaccagacctacatgcgtcttggcttcaaaggtgaaactcaggttactgaccagctgaccggttacggccagtgggaatatcagatccagggcaacagcgctgaaaacgaaaacaactcctggacccgtgtggcattcgcaggtctgaaattccaggatgtaggttctttcgactacggtcgtaactacggcgttgtttacgacgtaacttcctggaccgacgtactgccagaattcggtggcgacacttacggttctgacaacttcatgcagcagcgtggtaacggtttcgcgacctaccgtaacactgacttcttcggtctggttgacggcctgaactttgctgttcagtaccagggcaaaaacggtagcgtaagcggcgaaggcatgactaacaacggtcgtgaagcactgcgtcagaacggcgacggcgttggcggatctatcacttatgattacgaaggcttcggtatcggtgctgcagtttccagctccaaacgtactgatgatcagaacagcccgctgtacatcggtaacggcgaccgtgctgaaacctacactggtggtctgaaatacgacgctaacaacatctacctggctgctcagtacacccagacctacaacgcaactcgcgtaggttccctgggttgggcgaacaaagcacagaacttcgaagctgttgctcagtaccagttcgactttggtctgcgtccgtccctggcttacctgcagtctaaaggtaaaaacctgggtcgtggctacgacgacgaagatatcctgaaatatgttgatgttggtgcgacctactacttcaacaaaaacatgtccacctatgttgactacaaaatcaacctgctggacgacaaccagttcactcgtgacgctggcatcaacactgataacatcgtagctctgggtctggtttaccagttctaatctcgattgatatcgaacaaagggcctgcgggcccttttttcattgttttcagcgtacaaacacagttttttggtgtactcttgcgaccgttcgcatgaggataatcacgtatggaaataagctttacccgcgtggcactgctggctgccgcgctcttctttgttggttgcgatcaaaaaccacaaaccgccaaaacccacgctactgaagttaccgttcttgaaggcaaaactatgggtaccttctggcgtgccagcatcccgggcattgacgccaaacgcagtgccgaacttaaagaaaagattcagacccagctggacgccgacgatcagctgctttcgacctataaaaaagattccgcgctgatgcgctttaacgattcgcaaagtttatcgccgtggccggtaagtgaagcgatggccgatatcgtcaccacctcgctgcgcattggcgcaaggaccgatggtgcgatggatataaccgtcgggccgctggtgaatctgtggggctttggcccggaacaacagccggttcaaattccgagccaggaacagatcgatgcgatgaaagccaaaaccggcttacagcacctgacggtcattaatcagtcgcatcagcaatatctgcaaaaagacctaccggatttatatgtcgatctctccaccgtcggtgaaggttatgcggcggatcacctggcacgcttgatggagcaggaagggatttcccgctatctggtgtcggtgggcggcgcgctgaacagccgtggtatgaacggtgaaggcctgccgtggcgggtagcgattcaaaaaccaaccgataaagaaaacgcggttcaggctgtggtggatatcaacggtcatggtattagcacctctggcagttaccgtaactattacgaactggacggcaaacgtctttctcatgttatcgatccgcaaaccgggcgtcccatcgaacacaatctggtatccgtgacggtgattgctccgacggcgctggaagccgatgcctgggatactggcttgatggtactcgggccggagaaagccaaagaggttgttcgccgggaagggctggcggtttatatgatcaccaaagaaggcgatagctttaaaacctggatgtcaccacagtttaaaagcttccttgtcagcgaaaaaaattaaagcgcaagattgctggtttttgcgtgatggtgaccgggcagactaaaggctatccttaaccagggagctgattatgaaaaacgccacatgcttaactgacgatcaacgctggcaatctgtcttagcccgcgacccgaatgccgacagcgaattcgttttcgccgtgcgcaccacaggcatcttttgccgtccgtcttgccgcgccagacatgccttgcgggaaaatgtctccttctacgcaaatgcctgcgaggcactcgccgccggatttcgcccctgcaaacgctgccaacctgataaagccaatgcccagcaacatcggttggataaaatcacccacgcgtgtcgactgctggaacaggaaacgcctgtaacgctggaagccttagccgaccatgtggcgatgagtccatttcatctgcatcggttgtttaaagcgactaccggaatgacgcctaaagcctggcaacaggcctggcgcgctcgccgtttgcgcgaatcgctggcgaaaggggagagcgtgacgacgtctattcttaacgccggattccccgacagcagcagttactaccgcaaagccgacgaaacgctgggcatgacggctaaacaattccgtcacggtggcgaaaatctggcggtgcgttacgcgctggctgattgtgagctgggtcgttgcctggtggcagaaagcgagcgggggatttgcgcgatattgctgggcgatgatgacgcgacactaatcagcgagttgcagcagatgtttcccgctgccgacaacgcgcctgccgatctgatgtttcagcaacatgtgcgtgaagtgatcgccagcctcaatcaacgcgatacgccgctgacgttaccgctggacattcgcggcactgcttttcagcaacaagtctggcaggcactgcgcacgataccttgcggtgaaaccgtcagttatcagcaactggctaacgccatcggcaaaccgaaagcggtacgggccgttgccagcgcctgtgccgccaacaagctggctatcataataccctgtcatcgggtggtccgtggtgatggcacactttccggttaccgctggggcgtgtcgcgtaaagcgcaactgctgcgccgcgaagctgaaaatgaggagaggtaatgttggatctgtttgccgatgctgaaccgtggcaagagccactggcggctggtgcggtaattttacggcgttttgcttttaatgctgcggagcaactaatccgcgatattaatgacgttgccagccagtcgccgtttcgccagatggtcacccccgggggatataccatgtcggtggcgatgaccaactgtgggcatctgggctggacgacccatcggcaaggttatctctattcgcccattgatccgcaaacaaataaaccgtggcccgccatgccacaaagctttcatgatttatgtcaacgtgcgactacggcggcgggctatccagatttccagccagatgcttgtcttatcaaccgctacgctgctggcgcgaaactgtcgctgcatcaggataaagacgaaccggatctgcgcgcgccgattgtttctgtttctctgggcttacctgcgatttttcaatttggtggcctgaaacgtaatgatccgctcaaacgtttgttgttggaacatggcgatgtggtggtgtggggcggtgagtcgcggctgttttatcacggtattcaaccgttgaaagcggggtttcatccactcaccaccgactgccgctacaacctgacattccgtcaggcaggtaaaaaagaataaaaataagaattattattgctgtgcgcgcgaagatgtttaaactgcgggctgtaattcattgtccgggttttctgcatggaacttcttgtacttgtctggcggcagtatcgctggccatttatcagtgtgatggcgctaagcctcgccagtgcggcattaggcattggcttaattgcttttatcaatcagcgccttatcgaaacggcggataccagtctgctggtgttgccggagtttctgggattattgctgctgttgatggcagtcactctcggatcgcaactggcgctcaccactttggggcatcacttcgtttaccgactgcgtagtgaatttatcaagcggattctggatacccacgtcgagcgcattgaacaactcggtagcgcctcgttgctggcgggattaaccagcgatgtgcgcaatatcaccattgcttttgtgcgtcttccggaactggtgcaggggatcattctcactatcggttccgcggcgtatctgtggatgctgtcgggcaaaatgttgctggtaacggctatctggatggcgatcaccatctggggtggttttgtactggtggcgcgggtgtacaaacatatggcgaccctgcgtgaaaccgaagacaagctgtacacggattttcaaaccgtactcgaagggcgcaaagagctgactctgaaccgggaacgcgccgagtatgtgtttaacaacctctacatccccgatgcgcaagagtatcgccatcatattattcgcgcagacaccttccatcttagcgccgtgaactggtcaaacatcatgatgctgggcgctatcggcctggtgttctggatggcgaacagtctcggttgggctgataccaacgttgctgcgacctattcgttgacgctgttattcctgcgtacgccgctgctttcggcggttggcgcattgccgacgctgctgacggcgcaggtggcgtttaacaagctgaacaaattcgcgctcgcgcctttcaaagctgagtttccgcgcccgcaggcttttcccaactggcaaacgctggagctgcgtaacgtgacgtttgcttatcaggataacgcgttttccgttggtccgattaatctcaccatcaaacgtggcgagctgctgtttctgattggcggcaacggtagcggaaaatcgacgctggcgatgttgttgacgggcttgtatcagccacaaagcggcgaaatcttgctggatggcaaacctgtcagcggcgaacaaccggaagattatcgcaaactgttttcggcagtgtttaccgatgtctggctgtttgatcaactgctggggccggagggtaaacccgctaacccgcaactggttgagaagtggctggcgcagctgaaaatggctcataagcttgagttaagcaacgggcgtattgttaacctgaagttatcaaaagggcagaaaaaacgcgtggcgctgttgctggcgctggcagaagaacgcgatattatcctgctggatgaatgggcggcggatcaggatccacacttccgtcgtgagttttatcaggtgttgctgccgctgatgcaggagatgggtaaaactattttcgctatcagtcatgatgatcattactttatccacgccgaccgcctgctggaaatgcgcaatgggcaacttagcgagctgacgggcgaagagcgcgatgccgcttcgcgtgatgccgttgcccggacggcataatattacgacgctgacctggcggactgctgccgtcaggtcaatatgctaaaaatcccttcatttctaataaccctataattaatcaacgaaattataatgtttctaaaattagaatataatttataaacattatttaaatgttgttacttaagtgttaccgttgatgccgcgcaaatctcacctgcaataaagcgactaaaagtaaggcattaacaagatgaaaaaagtgactgccatgctcttctcgatggccgtggggcttaatgccgtttcgatggcggcaaaagcgaaagcgtccgaggagcaggaaactgatgtactgttgattggcggcggcattatgagcgccacgttggggacctatttacgcgagctggagcctgaatggtcgatgaccatggtggagcgcctggagggtgtcgcgcaggagagttcgaacggctggaataacgccggaaccgggcattctgcactgatggaactgaactacaccccgcaaaacgccgatggcagcatcagtattgaaaaagcagtcgccattaacgaagcatttcagatttcccgccagttctgggcgcaccaggttgagcgcggcgtgctgcgtactccgcgttcatttatcaataccgttccgcatatgagctttgtctggggcgaggataacgttaatttcctgcgcgcccgttacgccgcgttgcaacaaagctcgctgtttcgcggtatgcgttactctgaagatcacgcgcagatcaaagagtgggcaccgttagtgatggaagggcgcgatccacaacagaaagtagcggcaacacgcacagaaattggcactgatgtgaactatggcgagatcacccgccagttaattgcttccttacagaagaaatctaacttctcgctgcaactcagcagcgaagtccgcgccctaaagcgtaatgacgataacacctggaccgttaccgttgccgatctgaaaaacggcactgcacagaacatccgcgccaaatttgtctttatcggcgcgggcggtgcggcgctgaagctattacaggaatcggggattccggaagcgaaagactacgccggtttcccggtgggcggacagttccttgtttcggaaaacccggacgtggttaatcaccatctggcgaaggtttacggtaaagcatccgttggcgcaccaccgatgtcggttccgcatatcgatacccgcgttctggacggtaaacgcgtagtgctgtttgggccatttgccaccttctcaaccaaattcctcaaaaacggttcattgtgggatctgatgagttccaccaccacctctaacgtgatgccgatgatgcacgtcgggctggataatttcgatctggtgaaatatctggtgagtcaggtgatgttgagtgaagaggatcgttttgaagcgttgaaagagtactatccgcaggcaaaaaaagaggactggcgtttgtggcaagcggggcagcgcgtgcagattatcaagcgtgatgccgagaaaggtggcgtactgcgtctgggtactgaagtggtcagtgaccagcaagggaccattgccgcgctgctgggggcatcgccaggggcgtcaaccgccgcgccgattatgttggatctgctggaaaaagtatttggcgatcgcgtttccagcccgcaatggcaggctacgttgaaagcgatcgttccgtcttatggacgcaagctgaacggtgatgtagcggcaacagaacgcgagttgcagtacaccagcgaagtgctggggctgaaatacgacaagccgcaggcagcagatagtacgccaaaaccgcagttgaaaccgcaacccgttcaaaaagaagtggcggatattgcgttgtaatgatgtgccacatccggcatggtatgccggatgtggcgtatgctgataagacgcgccagcgtcgcatcaggcaccggctcgggcgttagatgtcggatgcggcgtgaccgccttattcggcctacggggtgcctcacttcacagcattttagcgaactaccgcgttgtcaattttctcttccgccttccagacgcggtacttcacatctacattgtctggcgtatacaccacgatcggcagcttgctgttgtaacgcagcattccagcatcgcccagatacgcggtgacaaatttcttctctttcttgccatccgggcaggccatcatcgtggaaaccggcgagctaactttatcaaagacataataatcatagccccagccttccagcgttttgctttccagcttcccgccgagacgatgcaaattgcaatcgacttccagcgtctgaccgattaacagttctactttcagggtagattcatcttcttgcggggttaactgaatcacctgacgcttcatccctttttcagcttgtggataaggcgcgattttttccagtggctggacgctttctgccgcccaggcggaagtggtagcgaaagcggcaaacaatactgcaggtagaatggtcttcatttttttgctttccttcttcatttataggttttcaccgatgatgtcgctgaaggttaacatattcatcagatttattaatttgctttatgaataacttaaagaacattcagacaattttacctgctcttttagtgttaaattctgatgagggagcaaaccagcagaaatatctctggtgaattaatcgctatataaatatgtttataaccatttgaaatgtgagcaaaagcccgtttttgccacgcttcccgccactcttttgatcctgctacaggttttaccccgatcggggtatgcatctttgacacatcctttaatatcttagcggctataaaaatggcttattaattatgcggtttatttggtcgctctcaattttcagagcgcgttaatgatggaaggtcaatgtgaagattgatgcatcccgtcggggcatactcactggtcgctggcgcaaagccagtaacggtatccgtccaccctggtccggtgatgaatctcattttctgacccattgcacccgttgcgacgcctgtattaatgcttgtgaaaacaacattctgcaacgcggcgcgggcggctatccgagcgttaatttcaaaaataacgagtgcagcttctgttacgcctgcgcgcaggcttgccccgaatcgctattttctccgcgccacaccagggcctgggatttgcagttcaccattggggacgcgtgcctggcgtatcagtcagttgaatgccgccgctgtcaggatagctgtgagccaatggcaattatctttcgcccgacgctctccggaatctaccagccgcaacttaatagccaactttgcaacggatgtggagcatgtgcagccagctgtccggtatcagccataactgcggagtatctccatgcacactaactggcaagtttgcagcctggtcgtgcaggccaaaagcgaacgaatttcagacatcagcacccaactgaacgcctttcccggctgtgaagttgctgtcagcgacgcgccgagcggtcagttgattgtggtggtggaagcagaagacagcgaaacgctgatccaaaccattgagtcagtacgcaacgtagagggcgtgctggcggtgtcgctggtttatcaccagcaggaagagcaaggtgaggaaacaccatgaaactcagtcgtcgtagctttatgaaagctaacgccgttgcggccgctgcggcggctgccggtctcagcgtgccgggcgttgcccgcgccgttgttggtcagcaggaagccattaaatgggataaagcgccgtgccgtttctgcggtactggttgcggcgttctggtcggaacgcagcaggggcgtgtggtggcctgtcagggcgacccggacgcaccggttaaccgtggcctgaactgcattaagggctatttcctgcccaagatcatgtacggtaaagaccgtttgacgcagccgctgctgcgtatgaaaaacggtaaatatgacaaagaaggcgaatttaccccaatcacctgggatcaggccttcgatgtgatggaagagaaattcaaaaccgccctgaaagaaaaaggaccggaatcgatcggtatgttcggttctggtcagtggactatctgggaaggttatgccgcgtccaagctgttcaaagcgggcttccgttcgaacaacatcgacccgaacgcacgtcactgtatggcgtcggcagtagttggctttatgcgtacctttggtatggatgagccgatgggctgctatgacgacatcgagcaggctgacgcgtttgtgctgtggggcgctaacatggcggagatgcacccgatcctctggtcacgcatcactaaccgtcgtctctctaaccagaacgtcaccgtggcggtgctttctacctaccagcatcgtagcttcgagctggcggataacggcatcatctttacgccgcaatctgacctggtgatcctgaactacatcgccaactatatcattcaaaacaatgcgataaatcaggacttcttcagcaagcacgttaacctgcgcaaaggggcgacggacatcggctacggtttacgtccgacccatccgctggaaaaagcagcgaagaatccaggttctgacgcctccgaaccgatgagctttgaagattacaaagccttcgttgccgagtatacgctggaaaaaactgccgaaatgaccggcgtgccgaaagaccagttagaacaactggcgcagctgtatgccgatccgaacaagaaagtcatctcctactggacgatgggcttcaaccagcatactcgtggcgtgtgggccaacaacctggtctacaacctgcacctgctgaccggcaaaatttcccagccgggttgcggtccgttctccctgaccgggcagccttccgcgtgtggtactgcgcgtgaagtgggcacctttgctcaccgtctgcctgcggacatgctggtgactaacgagaaacaccgtgatatttgcgagaagaagtggaatatcccgagcggcaccattccggcgaaaatcggtctgcacgcggtggcacaagaccgtgcactgaaagacggcaagctgaatgtttactggaccatgtgtaccaacaacatgcaggccgggccgaacattaatgaagagcgtatgccgggctggcgcgatccgcgcaacttcatcatcgtctccgatccgtatccgacagtcagtgcgctggcagccgacttgatcctgccgaccgcaatgtgggtagagaaagagggcgcttacggtaacgccgaacgccgtactcagttctggcgtcagcaggtacaggcgccaggcgaagcgaaatcggatctctggcagttagtccagttctcccgccgcttcaaaactgaagaagtatggccggaagagctgctggcgaagaaaccggaactgcgtggcaaaacgctgtacgaagttctgtatgccacccccgaagtgagcaaattcccggtatccgaactggcggaagatcagctgaacgatgaatcccgcgagctgggcttctatctgcaaaaagggctgttcgaagagtacgcatggtttggtcgcggtcacggtcacgatctcgcgccgttcgatgactaccacaaagcgcgcggtctgcgctggccggtggtgaacggtaaagaaacacagtggcgttacagcgaaggtaacgacccgtacgtgaaagcgggcgaaggctataagttctacggtaaaccggatggcaaagcggtgatcttcgcactgccgttcgaaccggcggcggaagcaccggatgaagagtacgacctgtggctctctaccggacgcgttctggagcactggcacaccggcagtatgactcgccgtgtgccggaactgcaccgcgccttcccggaagcggtcttgtttattcacccgctggatgcgaaagcgcgcgatctgcgccgtggcgacaaagtgaaagtggtttctcgccgtggcgaagtgatctcgattgttgaaacgcgcggtcgtaaccgtccgccacagggcctggtgtacatgccgttcttcgacgccgcacagctggttaacaaactgacgctggatgcgaccgatccgctctcgaaagagacggacttcaagaagtgcgcagtcaaactggagaaggtgtaagccattatgtcccggtcagcgaaacctcaaaatggtcgccgccgctttctgcgcgatgtcgttcgcacagcaggcgggctggctgccgtgggtgtggcgctggggttacaacagcaaaccgcacgcgcatctggcgtgcggttgcgcccgcccggagccataaacgagaacgcctttgccagtgcctgtgtgcgttgcggtcagtgtgttcaggcttgcccttacgacaccttaaaactggcgacgctggcctctggtctgtcggcgggcacgccatattttgtcgcacgggatattccttgcgaaatgtgtgaggacattccgtgcgccaaagtgtgcccaagcggtgcgctggatcgtgagattgaatcgatcgacgacgcgcggatggggctggcggtactggtggaccaggaaaactgtctcaactttcaggggctgcgctgcgatgtttgttatcgcgaatgcccgaaaattgatgaggccatcaccctggagctggagcgcaacacgcgtaccggtaagcacgcccgctttctgccgacggttcacagcgacgcctgtaccggttgcggtaagtgcgaaaaagtatgcgtgctggaacaaccggcaatcaaggtgttaccgctgtcactggcgaaaggggagttaggtcaccattaccgcttcggttggctggaggggaacaatggcaaatcgtaaacgtgacgccgggcgcgaggcgctggagaaaaaaggctggtggcgcagtcaccgttggctggtgttacgtcgcctttgtcagttcttcgtgctggggatgtttttgagcggtccatggtttggtgtgtggatcttgcacggcaactacagcagtagcctgttattcgacaccgttccgctgaccgatccgctgatgacgctgcaaagttttgccagtggtcatctgcctgccacggtggcgttgaccggtgcggtgattatcaccgtgctctacgccctggcgggaaagcgattattttgcagctgggtctgcccgctgaacccgattaccgacttagcgaactggttacgcaggcgctttgacctcaatcagtctgcgacgatccctcgccacattcgctacgtgctgttggtggtcattctgctgggatcggccttaactggcacgctcatctgggaatggatcaaccccgtatctctgatggggcgcagcctggtaatgggcttcggcagcggcgcgctgcttattctcgcgctgtttttatttgatctactggtcgttgaacacggctggtgcgggcacatttgtccggttggcgcgctgtatggcgtgctgggtagcaaaggtgtgattaccgttgcggccaccgatcggcagaaatgtaaccgctgtatggattgttttcatgtttgcccggaaccgcatgtgctacgtgccccggtgctggatgaacaaagcccggtgcaggtcaccagccgcgattgcatgacgtgcggtcgctgcgtggatgtctgttctgaggatgtatttacaataactacacgatggagttcgggagcgaaatcatgaaaagccatgacctgaagaaagcgctgtgtcaatggacggcgatgctggccctggtggtaagcggcgcggtttgggcggctaatggcgtcgattttagccagtcgccggaagtatccgggacacaggaaggggccattcggatgccaaaagagcaggaacggatgccgctgaactatgtgaatcagccgccaatgatcccgcatagcgttgaaggttatcaggtaacgaccaataccaaccgctgcttgcagtgccacggtgtcgaaagttatcgcaccactggcgcgccgcgtatcagtcctactcactttatggacagcgacggcaaagtgggcgcggaagtggctccgcgtcgttatttctgtctgcaatgtcacgtaccgcaggccgataccgcgccaatcgtggggaatacctttaccccatcaaaaggttacgggaaataagaggttattatgggaaattctgaccgtaagcctggtctgattaagcgcctgtggaaatggtggcgtacccccagccgtctggcgctggggacgctgctgttgatcggttttgttggcggcatcgtcttctggggtggctttaacaccgggatggaaaaagccaataccgaagagttctgcattagctgccacgaaatgcgcaacacggtgtatcaggaatacatggattccgtgcactacaacaaccgtagcggcgtccgtgcgacctgtccggattgtcacgttccgcacgagtttgtgccgaagatgatacgcaagctcaaagcaagtaaagagctgtatggtaaaatttttggcgttattgacacgccgcagaaatttgaagctcatcgtctgacgatggcacagaatgagtggcggcgcatgaaggacaataactcgcaggagtgccgtaactgtcacaacttcgagtatatggatacaaccgcccagaaatcggttgccgcgaagatgcatgaccaggcggtgaaagatgggcaaacctgtattgattgccataaagggatagcgcacaagctgcccgatatgcgtgaagtcgagccaggtttttaacagggttattgcgtgggtatgcttgaagccagagagttactttgtgagcgggatgaacgaaccttatttagtggcttgtcatttacgctgaacgcaggagagtgggtacaaatcaccggtagcaacggcgcggggaagacaacgcttctccgtttgctgacggggttgtctcgccctgacgcaggcgaggttctctggcaagggcagcccttgcatcaggtacgcgacagctaccatcaaaacctgttatggataggccatcagccggggatcaaaacccggctgacggcgttagaaaatctgcacttttatcatcgcgatggcgataccgcacaatgtctggaagccctggcgcaggccgggcttgccggattcgaagatattcctgtaaatcagctctcggccgggcaacaacgccgcgtcgctttagcgcgtctgtggctgacccgtgccacgttatggatcctcgacgagccttttaccgcgattgacgttaacggcgtcgatcgtctgacccagcgtatggcgcagcatacggagcagggggggattgtgattctgactacccaccagccgctcaacgttgctgaaagtaaaattcgccgcatttcactgacgcaaacgagggccgcatgatgttctggcgcattttccgtcttgagctgcgtgtagcgtttcgccatagcgccgaaatcgccaacccgctgtggttcttcctgattgtaattaccctttttccgctcagtatcggtccggagccgcaactgctggcgcgtattgcaccgggcattatctgggttgctgcgctgctttcatccttgctggcgctggaacgactgttccgtgacgatttgcaggacggcagtcttgaacaattgatgttgttgccgttacccttgcccgccgttgtgctggcgaaggtgatggcgcactggatggtaaccggtctgccgttactcatcctttcgccactggtagcaatgctactgggaatggatgtttatggctggcaagtgatggcgctgacgcttctgctgggaacgcctacgcttggctttctcggtgcaccgggtgtggcgttgacagtgggacttaagcgcggtggtgtgctgctcagcatactggtgttaccgctgactatcccattactcatctttgccaccgccgcgatggacgcggcttccatgcatttgcccgttgacgggtatctggcaattttaggcgcgttgctggcaggcaccgcgacattaagcccttttgcgacggcggcagcgttacgaatcagcattcaataacgctggattactgatttttgttcgagtctggtatcgaaactatgtggaaaacactgcatcaactggcgatccctccacggctgtatcaaatctgtggctggtttataccgtggctggcaattgccagtgtggtcgtgcttaccgtcggctggatctggggattcggctttgctccggctgattatcagcagggaaatagctaccgcattatctacttgcatgtgcctgcggcgatctggtcgatgggcatttatgcatcaatggcggtggcggcttttattggccttgtctggcagatgaaaatggccaacctggcggtggcggcgatggcccccattggtgccgtgtttacctttattgccctggttaccggctctgcatggggaaaaccgatgtggggcacctggtgggtatgggatgcacgtctgacttctgaactggtgctgctgtttttgtatgtgggtgtgattgccctgtggcacgccttcgacgaccgccgtctggcgggccgtgcggcaggtatcctggtgctgattggcgtggtgaatctgccgattattcattactccgtggagtggtggaacaccctgcatcagggatcaacgcggatgcagcaaagtatcgatccggcgatgcgttcgccgctgcgctggtcgatttttggcttcctgctgctgtctgccacgctgacgctgatgcggatgcgtaatttgattttgctgatggaaaaacgccgtccgtgggtgagtgaactgatactgaaaagaggccgtaaatgacccctgcatttgcttcctggaatgaatttttcgcaatgggcggttacgccttttttgtctggctggcggtggtgatgaccgttattccgctggtggttttggtcgtgcactcggtgatgcagcatcgcgcaattctgcgtggtgtggcgcaacagcgggcgcgtgaggcgcgtttacgtgctgcgcaacagcaggaggctgcatgaatattcgccgtaaaaaccgcttgtggattgcctgtgccgtgttggcagggctggcgctgactatcggtctggtgctatatgcgctgcgctcgaatatcgatctcttttatacgccgggggaaattctctacggcaagcgtgaaactcagcaaatgccggaagtcgggcagcgtctgcgcgtcggcgggatggtgatgccgggtagcgtgcagcgcgatcccaattcgctaaaagtaactttcaccatttacgacgctgaaggttcagtagatgtctcttacgaaggcattttgccggatctgttccgtgaagggcagggcgttgtggtgcagggcgaactggaaaaaggcaatcatatcctcgcaaaagaagtgctggcgaaacacgacgaaaactacacgccgccagaagttgagaaagcgatggaagccaatcaccgtcgcccggcgagtgtttataaggacccagcatcatgatgccggaaattggtaacgggctgctgtgtctggcgctaggaattgcgctgctgctgtccgtgtatccgctatggggcgtagcgcgcggagatgcgcgcatgatggcgtcttcccgcttgtttgcctggctgctgtttatgtctgtggctggcgcatttctggtactggtcaatgccttcgtggtcaacgacttcaccgtcacctatgttgccagcaactccaatacccagcttccggtgtggtatcgcgtggcggctacctggggcgcgcatgaaggctcgctcctgctgtgggtgctgctgatgagcggctggacctttgcggtagcgatttttagtcagcgtattccgctggatattgtggcccgcgtactggcgataatggggatggtcagcgtcggctttttgctgttcattctctttacctctaacccgttctcacgcacgttgccgaacttcccgattgaagggcgcgatcttaacccgctgttacaggatccggggctgatcttccatccgcctctgctctatatggggtacgtggggttctcggtggcgtttgcttttgccattgcttctttgttgagcgggcgtctggacagcacttatgcgcgttttactcgtccgtggacgctggcggcgtggatcttcttgacgctcggcattgtgctcggttccgcatgggcctattacgaactcggctggggcggctggtggttctgggatccggtagaaaacgcctcgtttatgccgtggctggtggggactgcgctgatgcactcactggcggtcactgaacaacgcgccagcttcaaagcgtggacattactgctggcaatcagtgccttctcgttgtgtctgctggggactttcctggtgcgttccggcgtgctggtatcggtacacgcgtttgcctctgatccggcacgcggtatgtttatcctcgcctttatggtactggtgattggtggttcgctgctgctgtttgccgcgcgtggacacaaagttcgctcacgcgtaaacaatgcgctgtggtcgcgggaatctctgctgttagcgaacaacgttttgctggtcgccgcgatgctggtggtattactggggacgctgctgccgctggtgcacaagcaactgggactgggcagtatttcgattggcgaaccgttcttcaacaccatgtttacctggctgatggtgccgtttgcgctgctgcttggtgtcggtcctctggtgcgctgggggcgcgatcgcccacgtaaaatccgcaatttattgattatcgccttcatctcaacgctggtgctgtcgctgctgctgccgtggctgttcgaaagcaaagttgtggcgatgacggtgctcggcctggcaatggcctgctggattgctgtgctggcaattgcggaagctgcgctgcgtatttcacgtggcacgaaaaccaccttcagttattggggaatggtggcggctcacctggggctggcagtgacaattgttggtattgcctttagccagaactatagcgttgagcgtgatgtgcgcatgaagtccggcgatagcgtcgatattcatgaatatcgcttcaccttccgtgatgtcaaagaggtgactggcccgaactggcgtggcggtgtggcgactatcggcgtaacgcgcgatggcaagccggaaacggtgctgtatgcggaaaaacgttattacaacactgccgggtcgatgatgaccgaagcggcaattgacggcggcatcacgcgtgacctgtacgccgcgctcggtgaagagctggaaaacggcgcgtgggccgtgcgtctttactacaaaccatttgttcgctggatttgggcgggcgggctgatgatggcgttgggcggactgctgtgtctgtttgatcctcgctatcgtaagcgcgtgagtccgcaaaaaactgcgccggaggccgtatgaagcgcaaagtattgttaattccgttgattatcttcctggcgattgccgcggcgctgctgtggcagctggcgcgtaatgccgaaggggatgatccgaccaatctggaatcggcgctcattggcaagcctgtgccgaagtttcgtctcgaatcactggacaatccggggcagttttatcaggcggatgtgctgactcagggcaaaccagtgctgcttaacgtctgggcgacctggtgtccgacctgccgtgcggaacatcaatatctgaatcagctttctgcgcagggcatccgagtggtcggcatgaactataaagacgatcgccagaaggcaatcagctggctgaaagagctgggcaatccttacgcgctaagcctgtttgatggcgacggcatgttagggctggatctcggtgtctatggcgcgccagaaaccttccttattgacggcaacggcatcattcgctatcgccatgcgggcgatctcaatcctcgcgtctgggaagaagagatcaagccgctgtgggagaaatacagtaaggaggccgcacaatgaggtttttattgggcgtgctgatgttgatgatctccggctcagcgctggcgaccatcgacgtgttgcagtttaaagatgaagcacaggaacaacagttccgtcagctcactgaagaactgcgctgcccgaaatgccagaataacagcattgccgattccaactcgatgattgccaccgacctgcgccagaaagtgtatgaactgatgcaggaaggtaaaagtaagaaagagattgtcgattatatggtggcgcgttacggcaacttcgtcacttacgatccgccgttaacgccgctgaccgtgctgctgtgggtgctgccagtagtggctattggcattggcggttgggtcatttacgcccgctcgcggcgtcgggtacgcgtggtgccggaagcgtttcctgaacaaagcgtgccggaaggtaagcgtgccggatatgtcgcttatttgccgggcattgtggtggcgttaattgtggctggcgtcagctactaccagactggcaattatcagcaggtgaaaatctggcagcaggccacggcacaggctccggcgttgctggacagggcgctggatccgaaagccgatccgctcaacgaagaagagatgtcgcgtcttgcgctggggatgcgtactcaactgcaaaaaaatccgggagatatagaaggctggattatgttgggccgcgttggcatggcgctgggtaacgctagtatcgccaccgatgcatacgctactgcgtatcgcctcgatccgaaaaacagcgatgccgcactgggttatgctgaagcgttgacacgttcatctgatcccaacgacaaccgcctcggcggcgaactgctgcgccagttggtgagaagcgaccacagcaatatccgtgtgttaagcatgtatgcgtttaatgcctttgagcagcagcgatttggcgaagccgttgccgcgtgggagatgatgttgaaactcttacctgccaacgatactcgccgtgcggtgattgaacgtagtatcgcgcaggcgatgcaacatttgtcgccgcaggagagtaaataaaaagaggcccgatggtgatgccatcgggctatttttattgtgccccgcgttgttgcaggaacagaatggtggctgccacgcgtgagcggacattgagtttgcgcagcagattgcgaatatgtacttttactgtctgctctgaaatattcaacaccgaggcaatctgtttatttgacagcccctgtgccagctcgtgcagaacatccagctcgcgctccgtcagcacgctgaagggatcttcttccgcgccaaacatttcacgttcacgtaagtactgattgacgcgttcgctaaagactttgctgcctttcgctccagcacgaattgcttccagcaatacttccgggtcgctgtctttcaacagataaccgtctgcgcctgcgtctatcagtgcaaagacatcgctggaggcatctgatacggtcaggataataatttgcgcggtaacgccatccctgcgcaaggcattgagggtatccaggccactcatacctttcatattgagatccagcaagatcacgtcgatatccagtctattcgccagatcgatcgcgctcgcgccgtcgcccgcttcggcgaccacttcaaagccaggatcaagctccagtaactgacgaacaccgcgtcgcataagtggatgatcatccacaatcatcacctgaaaaggcgttgcttcaggcatagtagtctcctgaggttttattagaatcattatgtttgagcgtagcgttggtaacgctaccaggcgcgtgaatgttaccccattttatgtatggacatgtagtgaaaactacaaccttgtcgttcgctttggcatcattttcattataaagacggaattttgcatcagcttctcatcaagaaaaacaactaaaaaatcaatcacaatacttgtgcatttctttaaacagtttttaaaaactgactccgggtatggagctatgggtattttccgtacccaatgcttttaacagcaattaatttcataggatgaaagctcaattcatcaatctggttctgtttctctttgtcgttccgcaatatctgttctggtggctacagcgttatattcacccatagcattggcatcaacagttgagtatggtgagacagttgatggtgttgtcctggaaaaagatatccagctggtttatgggaccgccaataatacgaaaatcaatcctggcggagaacagcatataaaagaatttggtgtaagtagtaatactgaaattaacggagggtatcagtacattgaaatgaatggtaccgcagaatactcagtattaaatgacggttatcaaattgttcaaatgggtggcgcggcaaaccagactaccctcaataatggtgtgctacaggtttatggcgcagcgaatgatcccacgattaaaggcgggcgcttaatcgttgaaaaagatgggattaccgtccttgccgctatcgaaaagggaggattactggaggttaaagaggggggattagcgattgcggtagatcagaaagcaggcggtgctattaaagcaagcacgcgggtcatggaggcattcggaacaaaccgtctcggtcagttcgaaatcaagaatggtattgttaacaatatgctgttggaaaacggcggaagtttgcgagttgaagaaaatgacttcgcttataatactactgtagatagtggcggcttactggaggttatggatggcgggactgtaactggcgttgataaaaaagcaggcggaaaattaattgtctcaacgaatgcgctggaagtgagtggtacaaacagtaaaggccaatttagtataaaagatggtgtgtcaaaaaattatgaactggatgatggttccgggctcattgttatggaggacacgcaggccattgatactatccttgatgagcatgccactatgcaatcgctgggaaaggatactggtacgaaagtgcaggcaaatgcggtatatgatctcggtcgatcagatcagaatggaagtatcacgtattcctcaaaagccatttctgaaaatatggttatcaacaatggccgcgctaacgtctgggctggcacaatggttaacgtttcagtcagagggaatgatggcattcttgaggtcatgaagccgcaaataaattatgcacccgcaatgttggtgggtaaggtagtggtttctgagggcgcttcttttagaacgcatggtgccgtggataccagcaaagcggacgtttcgctcgaaaatagcgtatggaccatcattgccgatatcactacgacgaaccaaaacaccctcctcaacttagccaaccttgcgatgtctgacgcaaatgtgattatgatggatgagccagtgactcgttcatcagtgacggcaagtgcggaaaatttcattacgttgaccaccaataccctgtcgggaaacggcaatttttatatgcgtaccgatatggctaatcatcagagcgatcagctcaacgtcaccggtcaggcaacaggtgatttcaaaatattcgtgacggacaccggtgccagcccggcagcaggagatagccttacactggtaacaacgggcggcggtgatgctgcatttacgttgggcaatgccggaggcgttgttgatatcggtacgtatgaatataccttgctggataatggcaaccatagctggagtttggcagagaatcgcgcgcaaattaccccttcaaccactgatgtgctgaatatggcggcagcacaaccgctggtatttgatgcagaactggacaccgtgcgtgagcgtcttggtagcgtaaaaggcgttaattacgatacggcgatgtggagttcggcaattaacacccgcaacaacgtgaccactgatgcgggcgctggctttgagcaaacattgaccgggctgacgctcggtatcgatagccgtttctcccgtgaagaaaccagcacaattcgcggcttgttctttggttactctcattctgatattggttttgatcgcggcggcaaaggcaatgtcgatagctataccctgggggcttatgccggttgggagcatcagaacggtgcctatgttgatggagtggtgaaagttgaccgttttgccaacaccatccattgcaagatgagtaatggggcaacagcgtttggcgattacaatagtaacggcgcgggtgctcatgtcgagagcgggttccgttgggttgacggattgtggagtgttagaccctatctggcctttaccggctttaccacagatggtcaggactacacgttatcaaacggcatgcgcgcggatgtgggaaatacccggatattacgcgctgaagcgggaacggcggtaagctatcacatggacctgcaaaacggtacgacgctggaaccctgactgaaagccgccgtgcgtcaggaatacgccgattctaaccaggtgaaagttaatgacgatggcaaatttaataatgatgtggctggaacccgtggcgtttatcaggctgggataaggtcatcgtttaccccgacgttaagcggtcatttgtcagtcagctatggcaatggcgcaggggtagaatcgccgtggaatactcaggcgggtgtggtctggacgttctgataacaaaaaataaacaggctgtgatgtgtcacggtctgtttatcgaattaattgcagatataaaaaaaaccaaccgtaaaggttggttttttcttgggatttttggtcggcacgagaggatttgaacctccgacccccgacaccccatgacggtgcgctaccaggctgcgctacgtgccgactcgtggctgctaatactaccgttttccacaccgattgcaagtaagatattttgctaactgatttataattaatcagttagcgataaaacgcttctcgtctgtcagcacttgcaataacaaacttaactgtggtttttcatctttcactctttcaccacgtaagttgtaagtgcggtatttaccgttattgttcagcaccagcgtctttttcggggtggtaattgccagcgtatcgttatccgctgcagtaacccagtaatgacggcgttgagggttgaacaaatcctgaccttgcgaatattcgctggcaggtgtgctgacatgtagcaggcgttgcatcagcgtcgtcatcagatcggtatgatcagtcagagcattaatacgctgcgccggcgtgcctggccagtgaatcactaatggcacctgcagatgaccgtgggaccagtcaaaggtttcttcgtcttcgctcagcggaataccccgaccggcagtgataatcaccaccgtattgtccagtttgccagaatcacgcagtgcattgagcacgcggttgatctggtcatcgacattgcctgccgcccggctatatttccgtgcaaatgcctgctgattgctgtcgtcaatgttagtgccattgaaagagacccacgagaaccagcggttatcttcttgtgcgtagcggcccagccagttgatccactgcgtggcggtctgctcgtcggattgggtgcgtacgctcggcatcgagaaatctgacaacaatgcctggcgatacagcgggctggtaaagccatctgatgagaataatcccagctgatagccttgctgattaagcgcagtaattaacgccgcaggggtacgggtcgacagaatgccgtccatatagctcggcgagatgccatagaacaggccaaagatgccgttgtctgtagtgttgccggagctcatatggcgcgtgaacgaaatattttgctcagcaaaacctgccagcgcaggcatctgcttctcgaagcgtgagtagttcaggccatcgacagtaatcaacagcacattctgcccggtgcccatatcgcgatagcgcagttcgcttaacggatactgaacggaaacggcgtctggattaccttgctcaataagacggcgttgatactcctgcgcatcaagcagaccatgcttctcaagaaaacgtcgcgccgtcatcgggtacgaaagcggcaggttagcgcgctgcatggtgatcgggcgatagaagttggcatcggcccagatatacaccacatgcgaggcgataaaggcgataaataagaatgcggccagcgggcgcgcgaagcgccgacgacgcgtcaggctgcgcagcttttgccagctccacgtcgcaaacaccagttcaagcaataaaataaccggcacgctgatgaacatcagctgccagtcgcgcgccatctcattttcgtctgggttgataaccagttgccagacgatgggattaagatggagatggaaacgagtaaagacttcgctatcgatcagtaatagcgtcattcccgccgttgccagaatgacggacaaaaacctcatcagcctctgggagccgacgataaaggtcagcgggaagaggatcagcaagtaggtggcgaacaccaggaagctgaaatggccgataatgcttacgtaggaataaatgcgaccagcaagcgttgtcggccagtcggcgataaacaggtaacggctgccaatgacgagcgaaagcagaatattgaacagtgcaaaccagtgcccccaactgaccatctgggagactttttcacggtagcgctgacgatgagttaccataacctgttatctgtttcccttagtgcgctttgtcttcgttgatagaggactgtaaggcgcgggcaaaagagttggcaattgcctggcgttgggccggggcaatgctggtattgataaggttagtgaccatgttgcctaacaccatcagggaaaggtcggtcggagccttatgtttttccagtacgttgagcagctctgcgagcaattgttcaacctgttcatcactgtagcgggaaatttgtggcataaatcgaaatcagttagttgatgaaagggcaacatattaccgtagcaacggttttttttctgcttttttatgcgttaaatcattctcgttacgctgccttctgtaaaatgaccgccatcttttattgcgtcgcttaaccggcggtggttgaataccgcccggtcttaaaggagagtttatcatgagtctggatatcaaccagattgctctgcaccagcttatcaagcgtgatgagcagaaccttgagctggtgttgcgcgattcattgctggaaccgacagaaaccgtcgttgagatggtggcagaactgcatcgggtctatagcgccaaaaataaagcttacggcttgtttagcgaagagagtgaactggcgcagacgctgcgcttacagcgtcagggcgaagaggactttctggcatttagccgcgcggcaaccgggcgcctgcgtgacgaattagcgaaatatccttttgctgacggtggattcgtgctgttttgccactaccgttatctggcggtggagtatctgctggtggcagttctgagcaacctgagcagtatgcgcgttaacgaaaatctcgacatcaatccaacccattatcttgatatcaatcatgcggatattgttgcgcgtatcgatttaaccgaatgggaaaccaatccagagtccacccgctatctcactttcctgaaagggcgagtagggcgcaaagtggcggatttctttatggatttcctcggggccagcgaagggttaaacgcgaaagcgcaaaaccgtgggctgttgcaagcggttgatgatttcactgccgaagcacaactggataaagcagagcgacagaacgtgcgccagcaggtttatagctactgtaatgagcagctgcaggcaggcgaagagatcgaactggagtcgctgtcgaaagagctggcaggcgtcagcgaagtgagtttcacggagtttgcggctgaaaaaggctacgaactggaagagagcttcccggcagaccgtagcacactgcgtcagttgacgaagtttgccggtagcggcggtggcttgactattaactttgatgcgatgctgttaggtgaacgcatcttctgggatccggcaaccgataccctgaccattaaaggcacgccgccgaatttgcgtgaccaattgcagcgccggacgtctggcggcaattaatcggttttgtgttctgaatgccagatgcggcgtgaacgccttatctggcctgcaaaaaatagcaataccgtaatcaggcataatctgcagatacaaaaaaccccgccggagcggggttttttacaacttattcagcaattaagcgcgaacgaagtcgatgtgctgcagcttcggtttgtacgggtgacgctgtacgtcctgagctttaactttgatttctttaccgtcaacaacgatggtcagaacttcgctgtagaattcagctttagcttgcatgttcatgactttgtcgtgatccagctcgatagccagcggcgcttctttgccaccgtagatgattgccgggaacttgttagcggcacgcaggcggcggctcgcacccttaccctgctctttacgtacttctgcgttgatagtaaacatttctttctctcttaaattaatcctgctacaggcgacccagcaacaggtaagtgatctgctttgcgtatgcaaaagcgggcgagattctatactcaatcgctttatacatcaatcaaaactaccattaaccgcgtaattcgtgcgcccgacgaaaacgaccttcgtaatcgaacactttttcacgcacttgccagtactgacctttcatgcgggcaacgacaaaatccgggtgtcgcaataaggcttgctgggcgaggatatcggcggcggtgatccagcgcagagggatgcccggtgtgcgcgtatgcgggcggataaaaagctgctcgaaggcagttcgctgggcgggcgtttgcagacggaaacgctcactcacatccgcgccgtcttcatcgtaataggtgattttcaaccattcgcctttctcgtcgtgctcatgctgcaaagacatgccgctacagcgtaataccagcgcatctttcagtcgtagcgctgcttttaacatatcatccggatcaaccagtaccgtgtcacattcgcggcagcggcgagcggcaatatcattttctgcgttacattgcgggcaatttttaaaacggaaacggaagtcacactgttcgcgatgaccgtcgtcatcttcaaaccatccctgacagcggcgaccaaagtgttcaatcaatgtcccgtcggcggtcgttttcccccaaaaggtgttggcaaaaccgcaggcagggcagaaaacctgtaccggaacgttgtcacttttgcctttcggtgtaccaacttccggcgcgtagagatcgtgaggattacccgcataatcaagaattaaacaatcagtcttgcccggagcgagacgcagaccgcgcccgacaatttgttggtaaagactcactgattcggtagggcgcagaatggcgataagatcgacgtgcggggcgtcaaatccggtggtcagtactgcgacgttgaccagatagcgaaaacgctgggctttaaaatcttcaattaacacatcgcgctcagcgccgggggtgtcgccagtaatcagtgcagcatcttcggcaggcagtaatcccacaatctcttttgcgtgttcaacggtggcggcgaaaatcattacccctttgcgcttttcggcgaactccatgatctggctgatgatatgtggcgtaatgcgttgctgttttttcagctcacggttgagatcagcttcgctgaacagcccgttactctgtgcctgcaagcggctgaaatcgtattgcactactggcatatccagtcgttctggcggcgtcagatagccgtgtttaatcatataacgcagcggcagctcataaatgcagtcacggaaaagggctttctcatcgccgcgtaccatgccgtgataatggaactggtagatccagcctttgcccaatcgaaaaggcgtggcagtcagccccagcaggcgtaagtggggattcactttagtcaggtgagtgaggatttgctgatactggctctcttcatcgtcaccaatacggtggcattcatcgacaatcaacagcgaaaattcaccctgaaaggcatcaagattacgagcgaccgactgcacgctgccaaataccactttaccgtggctctctttgcgctttaacccagcggcaaaaatatcggcttccagccccagcgcctgatactttgcatggttttgcgccaccagttctttgacgtgtgccagcaccagaacacgaccacgcgccagccgtgccagttcggcaatcaccaggcttttacctgcgccggtgggcagcacgataacggcaggggttttatgacgacgaaaatggttgagcgtggcatccacggcttcttgctgatatgggcggagtgtaaaaatcatggtctcgcgtaggtagattattctgctaatagtatgccatggatctttttcccttgagggatgttattagaccgctatactgggcagacaacagttcagattttcgggtcaatgcccgacctccgtttttacaggcaaaatcacacacatgcgacttgataaatttatcgcacagcaactcggcgttagccgtgctattgccgggcgtgaaatccgcggcaatcgtgtcaccgtcgatggcgaaattgttcgtaatgcagcgttcaaactgcttcctgaacatgatgtcgcttacgatggcaacccgctggcgcagcaacatggtccacgttacttcatgctcaataagcctcagggctatgtttgctccacggacgaccctgatcacccaacggtgctctattttctggatgaaccggtagcctggaaactgcacgccgcaggacgtctggatatcgataccaccggtctggtgctgatgactgatgatggtcagtggtcgcaccgcattacttctccgcgccatcattgcgagaagacctatctggtgacgctggaatcacccgtagctgacgatacggcagagcaatttgccaaaggcgtacagctgcataacgaaaaagatctcactaagccagcggtgctggaagtgattacccctacgcaggtccgtctgaccatcagcgaagggcgttatcatcaggtgaaacgcatgttcgccgctgtgggtaaccatgtggttgagctgcatcgtgaacgtattggcggtattacgctggatgctgatttagcccccggtgaatatcgtccgttaactgaagaagaaattgccagcgtcgtctaacttttccatgactttcaggagcccgttgtgaccacccgacagcattcgtcgtttgctattgtttttatccttggcctgctggccatgttgatgccgctgtcgattgatatgtatctgcccgcgctaccggtaatttcagcgcagtttggcgtacctgcgggcagtacgcagatgaccctcagtacttatattctgggctttgcgttggggcagttaatctacgggccgatggcagacagctttgggcgtaagccggtggttcttggcggtacgctggtgtttgccgccgccgcggtggcgtgtgcgttggcacaaaccatcgatcagctgattgtgatgcgtttcttccacgggctggcggcggctgcggccagcgtggttatcaacgctttgatgcgtgatatctacccgaaagaagagttctcgcggatgatgtcgtttgtcatgctggtgacgaccattgcaccgctgatggcaccgatagttggcggctgggtgctgatgtggctgagctggcattacatcttctggatcctcgccgtggcggcgattctggcttcggcaatgatcttctttctgatcaaagaaaccttaccaccggagcgtcgccagccttttcacattcgtaccactattggtaactttgcggcgctgttccgtcataagcgtgtcctgagttatatgcttgccagtggtttcagctttgccgggatgttctcgttcttaagcgccggaccgtttgtctacattgaaattaaccacgtcgcgccggaaaactttggttattactttgcactaaacattgttttcctgttcgtgatgaccatttttaacagccgcttcgtccgccgtattggcgcgttaaatatgttccgctcggggttgtggatacagtttattatggcggcgtggatggtcatcagtgcgctgctggggctgggattctggtcgctggtggttggcgttgcggcgtttgtgggctgcgtgtcgatggtgtcatccaatgcgatggcggtcattcttgatgagtttccccatatggcgggaacggcatcttcgctggcaggaaccttccgttttggcataggggcaattgttggcgcattgctttctcttgcgacctttaactctgcatggccgatgatttggtcaattgcattctgcgcaagcagctccattctcttctgtctgtacgccagtcgaccgaaaaaacggtgatctattgcacaacgaggaagctaaaaggcttcctttgttgatgcatgtcaaccacaaatctatcattcccccgatatatgtttattttatgtaaaatcaatttatgtaaaaagtcacatcattgtagttaaaaaggttgagttagatcgcagaaacgggtacatatagccccgcaaacgtgaccacgcccgcagatattacttaaatcagagccatagaggccactcaggcgaggcatcaatctttacgatctgtataaagacggattgttgatgatgtgttaaaattgatgtaaacaaattgtgaagtaaatgtacttccggggaaaataagtgacttcattacaactctcaatcgtccatcgtctaccgcagaactatcgctggtctgctggtttcgcaggttcgaaggttgaaccgattccgcaaaatggaccgtgcggtgacaacagcctggtggcgcttaaattgcttagcccggatggtgataatgcatggtcggtgatgtataaactaagccaggcgttaagcgacatcgaagttccatgttcggtgctggagtgtgaaggtgagccgtgcctgtttgtaaatcgccaggacgagtttgctgcaacatgccgattgaaaaattttggtgtggcaattgccgaacccttttcaaactacaatcctttttaagcgtcagctcaacgccagtagctgacgcgtatactcctgctgcggtgtggcaaacacgcgcgcgcacggtccttgttccactacttccccttgtcgcagtacgataacctgatgacataacgcgcggacaacgtgcaaatcgtggctgataaacaaataggccagttgatgcttttgttgcaatgatttcaatagcgtcaatatttgcgcctgtaccgttttgtcgagtgatgatgtcggttcatcaagtatgatcagcgagggcttaagaattaatgccctggcaatcgcaatacgttgtcgctgaccaccagagaactccgccggataacggtggcgtgtttcaggatctaatcccacttcatgcatcacggctatcacttgttgttcgcgttgtgcggcagaaagcgtcggctggtgaacccgtaagccttcctcaataatctgcaaaacgttgagtcgtgggttgagcgaggagtttggatcctgaaataccacctgaatgcgatgacgaataggtaacagctggcggcgatttaaattttgcagtggctgaccgtcaaagatgatgctgccctgagaattaatcagtcgcagcagcgccagtcccgtcgtacttttcccggaaccggactcgcccactaaacccagtgtttcacccgctcgtagcgtaaaactgatgtttttcaccaccacattatgatccacaatgcgcttcaaaatccctttgcgaatggggaaggcaacctgaagctgttcaacatccagcaacgttgaggcaggttctggcaacggcaccgggtcgcctgacggttcactgttgagtagcttttgtgtgtaaggatgagtgggtgaggcaaatagtgtagcggcgttattttgctcgacacagcgaccgttttgcattaccgccacgcggtgggccagttttctgacaatgctgaggttatgagtaataaacagcatgcccatattcagctcgccttgcagttcgcgcaacagctgtaaaatctgcgcctggacagagacgtccagtgcggtggtcggttcatcggcaattaataattccggtcgcgttaacagcgccatcgcaatcatcacccgctggcgttcgccgccggagagctgatgcggataatctgtcagccgttttgccgcctggcggataccaacgcgatcaaggcagttaagaatttcgcctcgagccgcttcccgacgcatcccgcggtggagtgaaagcacttcataaagctgtttttccagggtatgcaatggatttaacgacaccatcggctcttgaaaaatcatggcgatcttattaccgcgtacaccgcgcaacgtttgatcgctggcatgaagcagcgattcgccacgaaaacgaatatcgccggagagatattcaaccggcggggaagggagcaggcgtaaaattgacagcgcggtaacgcttttgcctgaacctgactcacccaccagcgccagcgtttcgccagcctcaatctgtagtgaaacatcattgactactgtacgtacggtttgctgatggcgaaaacccaccgacaaatcttcaatcgctaacagagtttgcgtcatgctacaccgccttattaggatcaaatgcgtcgcggacggcttcaccaataaagatcagcaaagacaataatatcgccaccgacaaggaggcggtgatcccaagccacggagcctgaaggttatttttcccttgtaacagcagttcaccgagtgacggtgaaccgagcggcagaccgaagccgaggaaatcgagtgaggtcagggtggttatcgaactacataaaataaacggtaaaaaggtgagggtcgcgaccatggcattaggcaacatatgacgcaggatgatactgcgatcgctgacgccaagcgcctgcgccgcacgaatgtagtcgaaattacgggtgcgtaaaaactccgcccgcaccacgccgaccagactcatccagccaaacaagacagtaattgccagcagccaccagaagttaggctgtacgacgctggaaagtaaaataatcaaaaacagcgtcggcatccccgaccatacttcaataaagcgttgtccccagagatcgactttaccgccgtaatagccttgtagcgcccccgccagcacgcccatcacgctggaacagagagtcagcatcaggccaaacagaaccgagatccgcgtgccatagagaatgcgtgccagcacatcgccgccgttggcatccgttcccagccagttttgccgggagggtggagaagggaagggcttatcggtagcaaagttgatactggtagcaccaaagcgaatcggtgcccacagtacccagccgttattttccagccgttgtttcagccacgggtcctgataatcagcctgacttgccagcgggccgccaaaatcgctttcgctgtagtttttcaacaacgggaaataccaactgccgtcataacgtaccagcaacggtttatcgttggcgataagttcagaacacaaactcaaaccaaacaaaacgaggaaaatccataacgaccagtagccgcgacggttatggcgaaaacgcgcccaacgggcctgattgacggggctgagtcgcgacattaacgtccctcaaaatctatacgcggatcgaccagcgtatagctgatatcactgacaatattcagcagcaggccaatcagggtgaaaatatacaaggtaccaaacattacaggataatcgcgcgagacggtcgcttcgtagcccagtaagccaaggccattgagtgaaaacatcacttcaatcagcagcgagccggtaaaaaacatgctgataaacgtcgccggaaaaccggcaatcaccagcagcatggcgttgcggaacacatgtttccagagaatatttttttcacttacccctttcgcacgcgcggtcaccacgtattgcttgcgcacttcatcaaggaatgagtttttggtcagcatggtcagcgccgcaaagccaccaatcactgtcgccagcaccggcagcgtgatatgccacagataatcggtgattttctgataccacggcagcgaatcaaagttagcggaaaccaggccgcgtagagggaacaggtcgaaatagctgccgcccgcgaagaagacaatcagcaggatggcaaacaaaaaggccggaatggcgtagccgatgatgataaatgcgctactccagacgtcaaagcggctcccattataaacagctttgcgaatgcctaacggaatcgacaccagatagataatcagcgtgctccacaatccgagggtgatggaaaccggcagactgtctttaatcagcgtcagcaccgaggcgctgcgaaaaaggctatcaccaaaatcaaagcggatgtagtcccagagcattttgaagtaacgttcgtggatcggcttatcgaaaccgtagcgatgagtgatctcggcgatcacttctggatctaatccgcgtccgccacggtaattactgtcgctgatattgccgacgcccgtttgcgcatggctggcgcgaataccttcaccgcctgcgccgggtaatactccggcattaccaaactcaatggcggcgatggcctggtcgaccggaccgccaggcgcaatttgcacgatgaaaaagttgatggtgataatcgcccataatgttgggatcaccagcaacagacggcgaatcaggtaagcgcccatctactctccctgttgtctggctgacggcagtttggccgctttattaacgtcataccaccaggtatcgatacccaggctgtaaacagggcgtacagtgggttgggagaatttatcccaccaggcgagacggtcttccgccatgtaccacattggcagcatgtaataattccacgttaatacgcgatccaatgctcgccccaacggcagtaatttttctttatttccctgcgcggcaataatttggttgatcagcgagtcgataaccgggctttgcacgccgggggcattataagtggaattgatatattccgatgaccaggaaatctgtaaatcggaactgggccacggcatcgcccgccataggcgcggcatcatgtcatagtcgcgactgcgcatgcggttagtgatttgcgagttatccaccttgcgaatgtccatgttgatacccagccgttgcaggctgtgctggaacggcaatacccactgactattgctgcttgcgggaagcaataattcaaagctgagtggctgacccgttgtggcattaacgcgttgctgacccttcagcacccagcccgcttcgttgagaagtttgtcggcttttaacaggttgtcacgatcgtagccatcgtctttagataccggcggctggtagatttgtgtgaagacttctgacggtagatcttttttcattggtgccagaagcaccagctccgcggcgtcggggtaatttctggccgcgtattcggtattctgaaaataactgttcgtgcgactccaggcattgtaaaacaacgccttgttcatccattcaaagtcaaaggcgagagtgatagcttcccgcacccggcgatcgctgaataccggacgttggatattaaacgccagccagcgcgtatcctgggctgattcgttcttttgctcatctttgatgatgtattttttatcgaaatttttaccggtataacgcgtggcccagtttttagcgtcgttttccatacgcaaatcaaaggcaccggctttaaacgcttcaaaggcgacattatcatcgaggtaataatcgtagcgaatggtgtcgaaattccagcgtccacggtttaccggtaagtttgctgcccagtaatctttcacgcgggaatagacaatattttgccccattttccaggacgtaattcggtacggaccactggcaagcggaggcgtggcgagcggatcgctaagtttgtgatccttccagtacttttctggaaataccggcagcgaaaacagactcaacatatcttctttgccgggtttagctaactcaatgcgcacggttaacggcgcaatggctttgacggtggtgcctttgtagaccagacgaaattgcggcacgccttcggtcataaatttttgaaaagtaaactctacatcgcgggcagtaatgggagaaccatcatgaaaacgggcgcgcggattaatagcgacctccacccaggaataatcgtcagcatagcgtgcgctttcagcaatcagcgggtaataactgcctggttcgtcatcggaagtcgtaaatagcgtgtcgtacagctgctcggtgcgtgcgcccgggttgccgcgcagtgcatagcggttgaaattatcgaaggtaccgagggctgacaacgttatctgcccaccttttggcgcggcggggttcacataatcaaaatggttgaaattaaacgcgtaccggggttcgcccagcacggcaaaggcatagctttccttgatagcctgcgcctgcgcaccaaaggtgaacagagcgataaacagcagcagtatgcgcacaatcatctgcaacggatttccttttactcatcattagccgcaatccggcatgctttcactatgaataataagggacgtaagcacaccttaccactgcggcgtatacggtttcttcagccagcgaacaaaatcgtccagcggtaacgggcgactaatccagtagccttgcatgaaattaacgccgcgttcgcttagccatcgcgcttgttccggcgtttcgaccccttcagcaaccgtcagcatattgaggcgtttcgccagcgtcagcaccgcgtcaagtacgggtgaagtgatcgtttccgtaccgatggcgttgataaatccacggtcaattttcagataatcgagcgtaaaacgctcaagatagataagcgcgctgtgcccggtgcagaagtcatcaatagcaatttctacgcctaccgagtgcagccaggcgaagagttgtgtggcttcttgctctttcagcatatcgcgctcggtaatttccagcacaatctggaaatggtgtgcgggtagggaagtgagcagtttctggatatctgctttaaagctttcgctgtgcagatggtccggcgcaatgttaatgccaaatttgacgcctaccggcagcactttttctaattctgcggcatcgcgggcaattaactcaaacagatgctgagtcagcggcacaatcatcttttgcgattcggcaaagttaatgaaggcatccgggggaatttctcccgcgacaggatgccgccagcgtagcagtacttccaggcccgttactcgcaaagcttgtgtatccaccaccggttgatacgccacgtaaaattgttcgcgcttgatggcggtcatgatttctctgccggggcgcatacgtacgctcatcaggtaatagcagagcaggccaacgacagttccactcatgccgcccagtaaaaatgcgtaccacacatcgttccatgtccagtcatctgcataaagccgaacggtcagaggaatgcccgcaattttagtttcacggactggcatgtcggttaattcgttaacgttcatcaaacgtgaagaaaaggtagatagcgcagtattgccaataatgagggcgacgccatcgtaatcttcctgccgtgaactataaaagagtgaaggcgtcaggttgagattcagagcggcaaagacgccgctatttttcagcaaagggttgcgataccagatgacgattgcgggtttgttcggcaccatcggcgtgccgggtaagatcgccatatcgacgtttttattaatgtcgagcgccggaatcaattcattgagtggaatgtccatctcaccagtcgcagatgaacagaatgtttttttatctttcaccagcacaaacgtacggacattcatgctaaacgccgcgcgagcggtcagttcggggttagcctgctggcaggtatctaaggtcagcggctgaagccggtcagtagtggatttcaggtcggcaaaataggtatcgagatacttttgtacgtcgataatcagtgtgtcgtatttgacttcgtgcttatgccaggccactaaaaattgaaggcaactcaccagtatcgcaatcatcacgcctgcaacaatgcaggtaagcaggagcttacgtccagaattgggagcgcgtatgaacatgattccgttaatttcctgaaattacgacaacatttaaaagataacaatgaccggactatagcctggatcaagacgcggaaacatcattttctctgatgaatgaaaacaaaaaagcactgcctaagcagtgctttcagttaactcgtcaggatagccaagggattgcatccaaacggtttattagctgcggctgagaacccggcgtgcttcgttgtaacgcttcttccagtacggttcattcatgctggaaataataacaccactgctggtggaagcatggacaaactgattgttgccgatataaataccgacatggcgtcccgttgaaccggcacggaacagaactaaatcacccgtacgcaaattactgcgggaaacagatttacccatttcctgctgttcgtaagtcgaacgtggaagttctaagccaaattgctcacggaatgtacgctgtacgaaaccagaacaatcgataccttttttagtgctgccgcccagacgataacgtacgcctttccagtcagcatactgatccataattcgcgattttacgtcgacattacgaaccaggttttcaaattcatcctgagaagcttgcagtgatgatgtttcactacccactgcacgtgtctcaggatgcatattctttgcggtgttatttgcactacatgcagaaagcagaaccgctactgcaatcgcggggatcccgcgcaagatatatctcaaaatcggttgagatttgaccatgttgtttgttttcccttgaagtccttaacgacaaatatcgttataaaaaaatgccaagcgacacgagactaattacctgggcatgttgaaacaattccttaaggccaaatctgtggactaacgcacaaaattatatgctgtgaggataatctaccgccgaggcaaaacgagttcgagattacccgattggtgcggtcttggcgagcggttttacatgattttttataagaaaaagtgatacagaaagttaataagcgggattggtcaattaaagtacgattgagtgaaacgcatgcaatccattcatttacttagagaatgatttttgcgcgcgatggatgaaagcacggtgcgcatcatcaggattatcctcactataaaaataagcctgatgatgttaattactgtgagttatttgttttggaaatgtttgttttttcccggtagtgatttgtcaaaaaagtgattaatcgatcacttaatggcgtcagcaacacccagggcaaaccgatcaatatcacggtcatcgaaccgacaatgatgtcagtaaaccagtgtgcgccaatcattactctgggaaatgcaaaaaccacaaaaataataagggcgataaggcctgcaactttgccgaaataacgccacatgaatgccgaaaaaataagcagcatcatgccgtgatcgccgggaaagctatctcgtgaggcatctttcgtgggaacagagagcagttcgctgacgcggttaatatcggtaaaagtcaatgttgggctggcccgttttacaggaattaatgcctgacccagctggtttaataccactgcagttaatagcatgaccagacccataatcacgatacgtcgtctgccaggggcgttttctttcagccagaaactcagcatcaacattcccatcgccagcagagaacaaccgtcgaaagcgcgattgttggtcaatgcaaccagccacaaaaaggccttactttcgaccagtttctgattaaagaaataaaaaatatccgcatcaatcggcaaccagaatccatgattaacgggaatataccaggaaagaaacagcgcgaggccgacaatattcaacaacactatttgcggcaaatttttaatcatattttctctaattatcttactgaaaaacgcaggcaaccttacgcggtagtcgctaaacgaagcttcaacagcgcgctctgcaaagcattccagtcagcttcgctgctggaaatcagctcaatacggctgtccggtggcgcaacgttttgcgtttcaatgtgcaggtcatcgccctgacggttgattcgtaccagcccttcgggaatacgcagcacgcctttgacgcgttccaccggtgcaagtcgcgcccattccagaatgccaatggtgtcgaataccgtatcagcgtcgaatatccagccgcaggcctgatatccttgcccgctgttcagactgcgacgccagcgttgatgctctggcaggcttaacgctgctaacccttttttcacgacatgctgatgagaatgcgcggcgctggcgggcaactcggctaaattgcgacgcggcaaatccagaagatgaccgtcaactttcccatgctcactgtgaattaattgtcgatcgccaccattttgctgccaccaacgctgtagcgcttgctcactttcgggcgtcgcacggtcggatttattggcgacaatgatgtctgcggcagccagctggtcacggaagttttcattgctggcgcttttttcgtccagcagcaagcgcggatcgagaatgcacaaggtggcgcgcagatctatccacggttcatagactggtgcggttaacagatcgaggatctgtttcggatggcccagcccggtcggctctatcaacaagcggtctggttttccctgacgcagtaaggtattcaaccctacctgcatgggtaaaccattaacgcagcacatgcagccgccggggatctctttcagcaatgcgccgctatcggcgagcaaagcaccatcaattccgacttccccaaattcattaaccagtaccgcccatttttcgttgggatctttatgggctaacagatgaagaatcgacgtggttttcccgctgccgagaaaaccggtgatgaggttggtcctggtcacaacggctccgcaatactctggtaagttaactgagcgttaatcctggctaaaaaaggcagaaaagagaaggggagagcggacgaaggtgagcttcatccgctttaaccgcagaaatcgttaaattttgagggtgtttaatagcgcctgatgtgcgccgaattgtacgatttgttgccaggcttgttcgatggcctgcacaaaatgcgggttatctggcagatcatcaccgaaaacttcacgcagggaaagcagggcggttacgcgttgttcactgctgctgcccgcaacaagttcgcgaattttatcgctaagcggatcgcgaacatcaatggcatttccggcatcatcaacgccgctgacgtaacgcatccagccagcaacgcctaatgccagcaacgaccagtccgtttcgcaccccagatgtatgcgaatacctgccagcatacgttgcggtaatttctggctaccatccattgcgatttgccaggtcttatgtttcagcgccggattagcaaaacgtgcaattaacttgtccgcatattgtgttaaatcgacatctttaatttgtagtgtcggcgcttgctcattcagcattaatgttctggcggcatggcgaaatgcgcgatcctgcatgcaatcactgatatgggcgaatcctgaaaggtaacccagataagcgagaaaagagtggctgccattaagcatacgcagtttcatctcttcccatggcaggacatcattcaccatttgtacacctgcgacttcccaggcaggacgcccagcgacgaagttatcttccaccacccactggataaacggttcgcagctaatcgcgcagggatcatttacccccagatgctggctgatttctgccagtgattcgtcggttgcagccggaacaatgcggtcgaccatggttcccggaaaactgacgtgttcttttatccacccggcgagttctggcgaacgtttttctgccattcccagcaccgcgtttttcaccacatggccattgtcgggaatattgtcgcaggagagcacggtaaacggtgtaaggccgcgctcacggcggcgtttcagtgcttcgacgagaatacccggtgcggagtgaggttcttcaggggtttgtagatcgtgaataatccgcggattactggtgtcgagtgcaccggtggccgggtcaatacaatagcctttttcggtaatcgtcagggaaacaattgccacctgtggctcgcaaaatttctcaataattgccgctaaggaatccagttttgcattaaggcattcgtgaacggcaccgacaattatcacctgattgccgtccgcacctttttccagcacggtatataaatggttctgtgcgcggagctggctcatcagttgatcaccgctgaacaagctgatttcacagatcccccagtcgccgccctgggcattcagcacacgatcggtcagtaacgcctgatgagcgcggtgaaaggcgccaaagccaaaatgaacgatacgtgattgcaactgctggcgatcgtagcgtggagcgtgtacatgatgcgggagcgtaacggaggcaattgtcttcataggagtcacgtcttagtaacgataaattaacaatgacagtgtaaagttatatgacagcaattgaaattggtctggattgttaatgcgatgaagtgtgagggcgatcaatcaacgagtgaaaattgagggcgtaaggtgttcaggaagcgcaaaatagaagattggtataataaattaaaaaagggacagcctgagctataatgccgatcagttaaggatcagttgaccgatccagtggctgtgtaagaatccggaaacgctcactcgtttccggatttttttatgcacattggacaggcccttgatttggtatcccgttacgatt

SEQ ID NO: 22 - DNA, 160490 bp, Escherichia coli
  source 1..160490: mol_type = genomic DNA
ccatggagaacactttatcagccgggaaataatgcgggcaacggtgtttaattatatcgaatgtgattacaatcggtggcggcggcacagttggtgtggcggcctcagtccggaacaatttgaaaaccagaacctcgcttaggcctgtgtccatattacgtgggtaggatcagaactccatccagtcgtttggggttgctaatgacgtcctgcatccgcttaatctggtcgggcgtagacatataatcccacagggtgagcagaaccttttttgcggctacactatttccctgatctgatactaatgccatatagccccataaactatccctcagccagacagcatcatagtgggtttctgccgctgttttgtcatcttcgaaagtagaagcaagaataaatgttccccagggtttctccgtcaacgttaactttcgtgtgttttctgttaatgttaacaacccttgaatttcgtctttggtatagtggctctttatttcattttttaatttggctgagtgaatcagaagacgataattagggtacttatctggatttaacgataaataacttttatctgttgctgcccccgtggaattaagaatgttaaatacagattcactcgtcacttctgcccctgtcgcctggcatgtgccgcacgaaaatataccagcgagcagaagagttaatgcagatttccctttcataaaataatccatcaatcgtttgttaaaagcgtagataaccacttattcaacaacttgaaaataaggtattttacctgggttgttacaaaaggattgcattgcgtaaacgctttttatttacaaaaaaatggggaagtgttacagcgattgcgaaaagcctgaagcggttgaattaagataatatagaaaatcagatacagcaaaaatggcagattgatcaggtgaagataaattggagcgggcgaagggaatcgaaaaggcttgctctaagcaccggaaaagataaaccaaacagacgtttacgtaaatccacggtaactagtagcggtagcttactaggttaagaccatgacgatcaagggcaaaggaacaaattatctttacgtaaacagtgacgggatttatatcatccagcttcatattcccgtttacatgcgccacctctggaacggtcgcaagatgcttaaaaaatcaacaggtactcgcgatcttgtgttggctcgtaggtttcgtgatcagtacctgatggagttcagaaggctacaggcgcaattcaacccaaatgcttatctcctcaagattcagtcagccattaccgatctacgtttcgttggtgctgcatctactaatctcgttccagattttcagacagccaccaaagggaaaccttcaacgccaaagttaaaagacctttgcgacgaatacatgaaggtgtattcagacaggcggagctactccactttgcaaaagtctgcccgtgctgtcgaggcgtttacgaaatccataaaaagaccagcgattacaattggcagtattggtcgccgtatggtgacggagttcctggaggctaaccaaggcaagttttcacctcaaacgttgcagaactggctaacctctttggggagtctgtacgaattcgccaaacgtcgatatgacgcaatcccggacagtaacccgtttcacggtcacaacctcgaagcacggcgcaccattgaaagttatcaaccgtttgaagccaatcaactggatacccttatcagagaagcggatgacgttctacgcgatgtcatattaattgggctgtattcaggaatgcgacttgatgagatcgccagcattaaacgggatgagattgtaatgttggagggtgtcagatgtttctttgtcagcaagtccaagactgtagccggggtgcggtatgttccgatccactcgctactgatggggattgttgataagcatctgacacagaacagtggtgaatatcttctggcacagtctaataacatcattcggaaggatggcaagcgaggtccgtggtacagccaaaagttcacccggctgcgtgatagcgttttgccaacagctacagatcggcagtgcttccactctttgagagggatgttcatcacctgcctggaccgggcaggagttcccgaacaacggatcggagccattacggggcacacagagcagaaagcgaaaactgaagcattcagaacctacagcaaaggcgcggggatgaaggaactatcagagtatgtggagttggtgaattactgaaaaatagggggcgagccccctaaagtgttatttaggccattgttctttaataaaattagcaacctctgccgacaagttgaaccaacttgcaacattgttgcttgcatcaacaacgattaatttatcgtctgcatccatagattttcgcacaatttccgcagcttgcgaggcggtataagttgagttcacataccagttcgattctgtgacttttgcccaagctcctaatgattggatggctttatgtactgccgggtagtctttggtcttgatcaggtcgtaagttacaaagaggttatttgccatttcgcttctccatgaacgccataacaccgaatttttaactacgttagcgttatagcgacttctagcgacttccgtaaacggtcagttatcaaacaattgacactggtcataaaaccagtaaaaacttttttccgagcttgctaactttgccgcttcgcttctatcataaccactacatattgtgtttattgatataataaatacaatatatccaaacatccatcccgtgaataggtgttgaaatggcgaacaatgataagcaatcctcgaaagatgtagcacatctggcagcagagactctaaacaacccaaacgcctctgcgattcagaaaagtttagcgggttcggtgctatcacaagcaggaacaaaaaatcagactggcgcaaacatggaagccaaagcatccgcagcattgaaaaacccacgctcaagcgaggttactaaaaccttagctggttcggttgtttcccaatcgaataaaaagcgctaaaaaaaagccgggattaacccggctctcatgttttcagctttcgttgtcgctgttcgctcaagtagtacctgatagcgctgtcgaatccatgcgtatggatgcggtcaagaaggctggaacgactacactcaagcctgcgtgctaacgctgacatgttgatgatcgcatcatcgcctttaccgtccagaatccactgcatcagcggcatgttgccagtaccgatcaaagctaatttcatatatatctcctttcctttgcctccagcaccgaaggtgtctcgcaatagcgagagtgcttcgcaccgttagcctcgccagcagcgggggcaatgcgcccccaaaatccgctgtcttacgccgcgtcatccatcgtaattttcaaaacgaagtccggacgcattgggatctgaatttgtgatagctcgctgaccacctcataattcatgaacttatcacgcagaacgtaatggtaagacggataaaccggaccattagcaacttctgcgtggcgtgaggctggcgtgcagtaggtcatataaggtgaaaggtcgccttcaacaacattggagaacgtcgccagcatgtagccttcaccatctgcaatgccatatagcggatcgtcaacctgcaccactgttacacgcccgatgttatatcgatcatatgcacccaaagtgtcagggaaaatgatgtcacgggacgtagcaccaaacagagccgcctgatatgcggttgggttgccttgaatggcggtgaaaagactcggactcgccagcagataaacctgcttgatgctggaagaccagccacccagatttttcttcagcagcgtgacagcgttctgcatctcagtaatgacgttggcactgatgccagttttcaccacagcagacggctggttaataccccagaaggtttgccagttcagatcaggaccttcacgtaggtgtgtcgcctctacagtattgtgaagcaggctctgcgccatggcatattcaacatcacggcgggtttgcaggtagtgcttcagggtatgattagcaactacatcttcagcggtcatctggcgatttgttcccggctgacgtttcccctgccaatcctggctggtgatggttgagctgtagacatgcagtggagcctgaacggtcacgttagccgctttagggaagtttagacccgacatttcagaaccataacgggcaactgatttagtcacttcacgctgcacatcttcaagtgtgtcgagtgcgatgatttgcgtatcacttggacggctggtaaagatccccaggctggacagaaggaacccctcgccgcttggcttcacgaattgaccagaaagattagtaaaatcacttaatttcatattgttatctctccttgattagattgcggtgtttgcgtcagcaatacggttgccttgcttaacaagggcagcgtaagcagcatcttttgcagcagccgctacaaccagacctgatggattgaacacgcattgggtatcactgataacaaggctacgggcatcaccagcgacttgattttgcagagctacagcacagttatcagcatctgctgcaacgtatgccgcgccagtggtcgggttaatcacatcaccacaagtcacatcagcagccagatcaaggatcacggtgcgcttatgaaagatcggtgaatcggtataaaccaatacatcctgtggggttttgctttcgtattcgaatgccatattttgtatctccatacagtttttataatccggcgaatatgccgggttgagttgaaaaaataccgtccatcggacggcattcttctattcgtgttccaacagaaaaagaccaaggcgagaatatcccgcccggtgtaggtcagtagttttctgatggagagatttggaaagcatgagtgtgttcacgcttcaggaataaggaggcggcaacgctccaaagaatgggtaaggagacccaaaaacgttgccacctgatgccgttagtgtccggctgacagccttccgaggatgaaagggctttggcaaatctccgatccaaggtcggagaaaattcttctacacccgtttacgggttagcaacatatgttgctaatcgctctacgatacttttctaatacagccagcggcaatggcctaaccttcccgtgagagagtgcggattattggctgtatgagaaaaggcccgcacggtgttcacacaggcactttaagtaaggagaaggaatgacaacggctgttgtacgcacatacaatttaaatcatcaccctatgcaattattttaacacgaatgattatcatttgcaacaacaaaaacaataacatggcgaatttaacggccctctctcgtgtgggccaatttactacgtcatttttgacggaacgatgattttagtccgcaatcccaaggatgaggttattctgcgcctggttgttttcccttatcttggtatcaatcagaccgttaatcgcaccatcattaacattcacctcaagaggcgcaaacttgatctcagcttcgccagtgaccgcaacaggaatcggctgtcgttgaactatgctatcaattgtcggaaccgtgaacgttggttgctggggtgtcagatagttcaggccaggaacattcaacgctagtgctggatcgttatacgccatgcctgagccgatattgctcggagcggaactatccagccacgggtaaatctgcttaagcgtctgaccgatgctacgtggatcaaagccggtcttttccttaatccaatcggcagcaccatttgaggagtcatctaccacgctcgtataaaccgcatccggcaatgttgcgcctttcttgagttcttcaccgactcgaccagcgaaggaaagaatgttggtggttagctcaccaagagcaacgccgagggcatcggaaattgggatcagtccagtcatattctgacgtagagtgtcagtattggcagcgtactgccccaggccttcaacaaacgaggctgagaagtgatccgcaagacttgtttgtactcggttgtactcagcacccaaagctgccagcttatcaaggttggcctgctgtgcatcagatagggtccatccttcagaagcgagttgatgcatacgggcaataacttcatcaccttccccactgatacccgccatcaagaccgatccgtcattgatcgcttccaaaaaatgacgcatggaattctctgtccagccgaattgtttacccaactgccgcacataggtaacgaaggtccccatgtccaatttctgaagctcgccaatcactttttgtgctgttcgctggttggttttgctaagaactgcattcaccagatcggcaagttcaccacctccgctgaatgttgttaccccttgcttgttagttttaaaggaaccggtattcagtagctcacctgctttctcgaagtaatccttattcatggacgcatacttatctacggtcaggtcgtaccctgtacgcttctgtacaacgtcatggatagcattaaattcaagctggctaatatcatactgccttaattgctgcgcctctctggagcgttcaagactcccctggagggtctgaccaacacgagcaactcccattgaaccaatcagggctccccctgcaattacaccagtggcagcgaggccaccataaccacgttcgctacgttcacgtctcaaacgttgagcattaacgcgccctgctcgctctactttagcccgatccttaaccatctggcggttaatacgtgcctgccgcctggtttccagagtcgctttagcaagttcatggcgcatttctgcgatggtataacgctgctcggagtatcccttggtagcctctttgattgcctgcaccgctttcattttgtcagccaggctggcaccttcgatatggctgatcgttaaactggcgcggcgtagggtgtcgtatgcagtgctctggcgcttgaggctggcttctttctcacgctggcgcttctcttccagggccatcgcctttttggtggctgcgatgtcagcagcaacagcgccgtgaccacggttcattgcgtcagtctgacgggaaacaagaccaggatcgtaatgttgaccgcccatgttagggttgtaggtcatcgctcgtgatctggctgcggcctgcacttttgcggatatattggctaaacgggcgttttgtctccggatctgttcactatctgccaattgttgagcctgccctctggcgttaagagcctgcattttccgggcgtgagcctcttcctgttttgcgatctttgcctgggcttgggcctggcgttgttgctctagcgaaagcttttgagccattttgaggcgctgtgtttgagcgcgggctgcttcaagggctgctttaccctcactctgggcggttcgcttctgagcttgctccagcgctttagcaggtttggtagttaattgctgaagtgacagaattttcttcttcgctgcttcgtaactagagcgggaaatttcccagcttacgatattgacggtgctcgtcactatcttgttggttgttccactactcattgccccccccctgctgcttgatgatattgccgtaacgatcaggatcagattttgcgagtgcagcagccgctgctttagctttcgccagcatttcaggatcgatatggtcagcggtatgtgagacaaccggacggctatcagcacccaacgattttttaatccgttgttcagcaccaaaggtgtctcgcattggtgagagggcttcgccctttttacccgtgggtgtgtcagccggggctgatttgagcaactccggatgttgatccagaaagttatcggtgacgctcttcagattgtcccgcgctttttgaagttcgtattcctccggtgtcatgccatgcatggcggcgaaaatccggtcttttattgtggtcatttttatagtatctccagagaaggatgctcccgccgatcaggacgtgacgaagcgccacccagccccaaggcaggaaaaagatgtaatcaaggttcattggcccccgatgtggggttgggtcagtgcatcgcaaggcgattaacagcaattgctgttaaccctttcagggtgttagtagtgcaggcgtggtgaacgtcgctgcgggttcttctgttttctggcgactgtttcacgataggccacaaacaacggatcagtatgatccggcattcgagatgccatttctttttcagtgattccttcacgcttaagcagcgtcaccacggtgaatagaggcagttgaaggtcagcacagatttttgccagcattgcgccggattcgtagtacattcgggccattcgcttagtggcatactgactggtattgcttatcttacgacagcgaggattccacgagttatcgtaaaggccttttaccaggtcatacggcaagcgtaggagcagcgccgttttgcctggggtgtaaccatgcacgagcatttttttagcagtctcgatcagcgaagaatcacgagagcgggatttgtaaaaacgtgacaaatcgggggtttcagcaccggaggtgtttacctctggtaaactgcttcgcaccgtaagggattcagccgtcaggccgttggctgtctggctgatgccagttactttctcacacaatattcctccagtatcaaaaagggatctcaggatcatcttcatcgtagtgatatacatccggcccgttaacttgttgctttactggcgctggttctgttgcgggtatatcgtcaggccgcatctgttctcctggctcacccatattggttttgcctttcagtttccatacaagtttgatctcatcctgccaggttgtagcaccatgggattgcgcccagcgtcgcgcctctggaaccaaatccccacgagaggtaaacgagttggcgagccatggtatcccgacaacattttccccagctgactcactcagtgatggatcatcactattggataaatcaacatcgacaggaatatccacagcaggtacgccgtctggttttccagtaacaggcgcggcagatgccaccacgaaagattccacaacaggtttttgctcattcttaccgctctcctcggtttccacttttctattactcgcctgcgcggaattatgatcgtcaagaaaaaccatcagcgatggatcgagttcgaccggagaaattttgtgtgtactccccttcacttcctcaaaagtgatcattccagcttcacgaagcttgttcctgaaattgcgaacggcttcgggcttgcagccgcaacgtttaccaatcgtgccaacagattcgtaataagttctgcctgttttgtcatagctgtaaaccagagataacaaaattttcatgttgccattaatggtcaggccgttgtactcggtaaggtcgagaacgctgtattcaagttttacaaaatccttactgtcccggttctgtttgctcattctgttctccgtaaagtgtcgccttgctggctaatgctggtttgatgtctggtgtgttgtcgaaaatgttcgcggcagtctccaagatttcattacagagccgtgccaggggcttgtcctgccttttggcctcagccagtagagcctgataaacgtgctgttgaaatttgatgttcattcaagttgtcctcctcgttctaggtacaaaagacctcccgccagtggtcgcccagaaggcgaaccggctcaggttttgttcagtgttgttaggctgcggttgctgtcgggaattcgccagccagtggataaccgtaggcttcaagttcttctgcaccgctgacagccacaagcagcataatgatctgctcatgagtcagagaaagacctagcttatccagataaagctgtcgatggccttccaggattggacgaagtatatcggtcaactccattccagcagcgcgttgattactcagcggcttaaggatggttttaaacgctcgcgcctgcttcgcctttttgcgctcctgcttcagaatatgcaggcagacggcaatctgaggaagtcgggcatgtacagcgtctgccccgccgtttctactaatgaaggcccacaaggctgatttggtgtatttgccgttcaggatgagatcagcgatctgctcgcctgtcatagtggtcaggtcgagacgttgggattttggtttattcattgggttctccgttctgttaaaagaattattcgcggaggttctatttgtaacccattttgtattgccgtgaggttgacaaggaatgtcgtgatgacggcagaattattcgaggattcataggtaaatcattaccctactagaatctattgtatcagatttgtctgtaaatagcaatcattatcatgtaggattttataatgcataataatcaccataacactacaagtttacaaaatctttgtcaatagtgccaagccgttctataacgcgttctgcgggtacttgtcaccataggagtacatacgtatcaccaccaccgtttaaacgccatagagaggctttaaggaggtctgttagttaacccgcgccgccccggagtgaaccggacagatgcaaagcagtcctctacgccgtgctccgctccacatatggcgaacaagttcgcagcttccacacagagtaagagcgtagctctatggcgtagcctgccgggttacccgagtcacagagcggagcgatgtgttaacgagggttagaaggtcacgagatggcgtggctgtttcacgtcagcgaaggtgagcttcttaccacaaacatatctgaagtggctgaccagccattgcagagcggagcgatgcagaagcatcactattaaaactaacagaatgaccaaccgtcattccgtgctctcgacctggaggtacttttcttatcagttcttttatggggattgttatttattattattgtgctcgaaaatcgactaccccctactcgaaaatcgtgcaggtaggtgctcgaaaatcgagggggtgggtacacgaaaatcatgcaggtatcaccgggtgagaattttccaagtcatccacgcgaccaacgcaccgatgaaaacttccggtttgatatgtccgcgtcatgcttcaatggcacaatcaacggcaacacctgaggcggtccaaacacctgatccgctccgagaattgatcatctccctcccctgctttcatctgaaagtaccgaccattctccgcgctggctgaagattggcaaccctatactgattttctgtcaaaatttggtggatgatctttaccattggctatcttgtaaacaaaatagattaaatgcacctcaaatagcccataatccgtagttaatcatgctaaagtggtcactatgcgtacaaatcagaagtctgaacctatgggcgttatggtgtgatgtacataacgaagccttgccagcactggaagcgtgaaatttggtggctggtatctggatcaagcaacactcaatttctgaaccttcgcttcaaaaaaataataaaacaacacacaaaaccaaaacagatgccctctggtggctgctgtatcgcgctgtgggatgctgtggattatcggtatgtcagttcacgtttgtgtagagataacgccgctacgggtttctggttgagcgtaggagggattggtgggttggctgtttacattgttgtgggaaatggtacgaaacagtggcggcctggctcggtgaatatcaccaggtgatggcagaccttcagcccgttgtggtaacgtcgccgtagtagccctatgtctgctgcgaatagaaaaatgtgcttttatggcatttgatgcactggcaacttcaaaggcctgaaacctgaaattgtgtggtgaccagccaaactcatccaaaatccttgaacaagagaactcacctcaaatcctcctgaatgctttccttctgttggtgaaatcgctgttgtgtaccacgcttcgcatcaacgctccgaaaagcaatacctgactattccagtcaagtacatgtaagatacaatatgttaaatgactgtacaattagtgaacacaggcacttcaaaacatcaagttatctcccttgcctcagcccaaagcagcattgtgtaactgcactgcttgttgcagtgaggcgtgtcgctgaaggcatcacgtagcgatatttggcgaagaaaagcgcttttcaccgagggcctgggctgacggtctagcagatcaccaacagagctggggatattttcaacaggagaatgtaaacttggaggataaagagccgggacacttacggggcaggttgtggaaatgaagaaaattttactatttgttgtggtactgctgccgctggcggctcatgcaggaaaaatcaccataagcaaccccgacgaacaagaattacagggcgggaaaaggctttgcacttacgaaaacagcatttatctgtttacgctggtgactcgctcgcaatcctgccctttctcaaaaacgttcgatacaaatgataatgaaaagtgaaacggaatgtctgctaatggggtgctttgccgatcatctccttaagatctttgaagcgttctttgattattcttccattctcggctaaacgattcgcttcaaacgcagtgaattgagcaatattttctatttcttcgcggctgatgctcataaaattctcatcaagcttagagagcatatttgtgacaccttgtctactttgtgtaaagaaaccaaggttatctctgacacccttaagaagttctttcttaccataagggttcatatttgtactcgtttctatagacttgataagctcttccgtgtcactacatattccacggtaaaccagttcgacctcacgaagctctttcactgtatcaattttcattttccttaatgaatcatgctcagcattttttcttgatcgataggtgttatacagagcagttatactgacaacaagtgcaatgaaagagaatagagcgctaaaaaaaggcagcaattcttttgacattttcactccaaatttattagtctagaagttaacttctaaatttttgaaaacaacgtcgatcaatctcttgtgccaatctagtccgcatctctccatagcttaatctttccatatctgaggctattttccaaccacaacctttgaaattacatttaataataggaaatgggacatagttatagagatcaacgctggagtgttggctaagaaggcctccacatttagggcatctcatgtgaagatttattaaagagtacccactatcacctaatgctttagtccattcccaagaaactatcatttcataaatattatccgaagtataatgcaaaaaactgccctcttgtcctgtagctttcgctgcaatacgacggcgcattacaaatccaacagtaggtaaaattgccaataataaaatcgataaaatgaggagcatccataagggcattgtgactgggaaggtaaggatgtccattaaccaatggaagaactgcttaatgtaattccatagccacacaacgacggcgatcccacttcctccagtgacaagtgcaacgataacgcccgatatgctgtctttgctaaggtctttcaaccatgccatagaaattcttcttattaagctattctttatgctcaattttacagcgaaccagattttaggcaataggagccataaagcgccgtgatgggtacatccatcgatcagcgccttcaggcgtgtcatcagattttcagcggtaacgatcagtgagtcaggtgtgcattttcgtatacacgaaacggggtagagcctgccgctttcccggacaggttagtaatcccatcatatcgcctgtttatcccgcgctaaggtcgtcgtaagcgccgctgtttcaggaatggtttatagccatagtgaaaggctttgttttcttgttggactatcgcggtaagacactggaacgaccgccagcgttttgataagcttcctgatcactactcaccaaatcgcggtagttaccaaggtagaacgtcgagagggttctcaacagcgcttacagagcgcctccctctaagcaccggaaacataaagattttttagctgattttaagcgtaaaaaatcgctggagcgggcgaagggaatcgaggaaacccataataacctgctgtaaaataaagattttgtgatcaatcataggtaactgattacgtgataatagaggatcattatcgtgtcgatcaagagccaagcatacttatttaaaagaaaagatgggatctggatgtttcagatttttgttcctaaatacttacgtcatctttacccttataagttgtggagaaaaagcacatctacacgagatctgaatgaggcgagaagattcagaaaccatctattattagaatgggaggaactaaagcggaaacataatcctgataaccccgaaaggaggttacaaaaagctattgaatccttacattcagaggcaagggccaataaaaacacgcaaagagccgtaaaacgcggttatgcatcgccttccctatgcttaatacgtgacgaatacgccgaatgctacagagagcgtcgttcatactcaacattacagaaatcagcaagggccgttgagctatttttacaaagcattcagaaagatgatattcatattgagaaaataggcagacggcttgtaacagtattcttagatgaccataagcaacgaggagcagccgatcaatctcgtcaaaactggcttacatgcttaggatcgctttatgaatttgctaaacgccgttatgacggaataccagacagtaacccttttcacggtcataacctcgaagcacgtcgcacaatcgagagttatcaaccgtttacacctgaacaaatgcaaaagctacttgatgcagcggagccggagatcagaaatattatcttaatgggcttgttttcaggggccagattagacgaactggcaagcctgaaaaagtcagagattgtaactgtggaaggaatacgctgtttttatatcagcaagagtaagactaaagcagggatcaggcacgttccgatacattcgagactatcgattattgtcgatgaatatttaaatcataattatggtgaatatttgttccctcactcgaacaaagtaaaaagaatcgacggtaagaaaggcccgttctattctcaagcgttctcacgtttacgtcgtagcgtcttgccaatcgctacaaatagacaatgctttcacagcttgcgcgggatgtttatcacttgtcttgatcgtgcaggagtgcctgaacagcggatcggagccattaccggacatacagagcagatagctaaaacagaagcctttcgcacctactcacaaggggcaagcattcaagaattagctgaatatgtagaattagtaagatatgaattaaatattgattttaaggcttaaaacaacgccataggcgcaataaagaggcttccttgtaatgggagcctcttatatgcttaattccttataagagtgttttagattgtgattaaacattctctttatcattaacttggtgcttgcccagacagagccgccaacgtgaaactacgttcaaaatcttgttggatacttcccactttgtaatcgaggtatgatccaagctgactaccatcaggagcgatattcacatcaaccttactttctggcacgtttacgacaatgcttggcgcatacgtcatagatggggtactgttcagatcacggctaacgttctgtttcaggtattgcacgttatcggacaggcttgcatagttctgaattgcagttccgccagtagttggcttgtcatctgtgccaggaataggcgataagcctaaagcactacgaccccaatcaaccatgccgcctacaaacgaatccttataatacataccggacgaatcaaggttttcatgcttgttgtctggatttatattttgatatgcagctgtgagccacgatacagcaccagcaaaggcgctcatcatttcagccgttgagcttccaagttctttaaacagaggattgagatctttcagcatttgcgcccactcttcaccagcttgagcgtcgaactcttcaccgaatcccgtcatgatagctttcttactaccttcccaggccatattcatattggcttgcactgcctggagacgttcagcagcttcaagatccgcctgtgtgtaggtggcattggccttttgcatcttaacgatggttttgtttagctcttctccgttacggctaaaagcaccacggaaatattgcaaatcatttcccaggtcctccaaaatgtggcccagttcttgatcagagagtccacggcgttcgccttctttcactacagcgcccaggaaacctaatggatcagtctggaaacctttaacctgttcaggactccaaccatatttattaaggatgttatcgacggcaccgttaccgccagcccagcgaccctttttagaatcccacttagtattacctaccgtttcgcctaaacgctcctgaacgtctttaaggttatcctggcgttggtctatggaactatcaacaccgtgttctaagccgtactgattgagtgctaacagggcgttagtgttgacgttaacagcctttgccttgcggttagtgtctgtgatcttgcttgcctgatcggttacggtattgaatatcgcagcaccgccgagagtagcagcagtgagagcagcaccacctaccattgcacctacaccaccgcccatatgaccgcctttaagctgtttagccatatgtggatatttaccgccatcagccgccacctggcgagctttaacagcagccgcacggcgttctaatgtgatcctgtcttttatcaggtgattcatcttggcctgactgatagcgccgcgctcataagctgccgtttgttgtttgatgtattgtaatgctttgtagtgctgggcggagtccataccgtcgcctaagcgccctttcttaatcccttcaagctgtctaaaagcctgttgacgtttaatctctgctttctctgctatcgtggctttagcacggatctgtttatcggcagctacggcgactttagccttcgctttagcttctgcctttgccaccttatcagcgttcttcttgtctgtttgagcttgtttatctgacgctttaacatcagctttagcctgtgcagctttacgggccttaaccagatcattggcctcgtctatagctcgtttagccttcttcccttttagtgttggattggtcaggttttccatttctttctgaaatttcttccctgcatcacgggctttctgtaatgatgcaaagtcgaccttaaatacaaccttattcaccaaggatgagatgttcaactccataatattttcctttatctcttatttattctgttttgctacgtagtattgcactgcttccatagcggaacagccagtagcaaaaattctttgacgtacagcggtattgctgatccctaaaaacttacatacttgtgagatattcagaatatcttccggcaaggtggaaacagctttcaggatttctacgggattattattttgtgtgttcatggtttttctctcacaatattcgatagatggggaaaacaaaaagggcaaagagatccgttactgtatttgctttacaggttagttaatcccttcgcccttattgccagcattattttttaacgcgctggaacgttaataatcttactgtgcttcagagaagataatcgctttagcaacaactttctgaatgaatggcaggtaagccgtttcagtgcacactgacgggaacataaattcatcctgtgtcagatactggtgatgagtctctgaatctttaccgtgttcagcgtggcgaactgctacgccagtgtgaagcacataagccccaacatcagcagggaacagcgggatcactaccagaccattttcaccgatttctgcaacgatagaagggaaatcagatacatcaataaccgtaaccgatgccagttggaaagcatcataagctgggttatcagatacgatcttagtcactgccgcgcttgcctgtgcattgctggagtagactacctgatctttcaacatttcgttataacgcagaccatcggcagcagcgccagcagccagcaccagaacaccggaacgtttagcagcaagggattcgcccaagatgttagactgttgacgaacaatcttagccaatgcacggtaagggtttacggtagtgctggtgaagtcgatcgcaggggcggtagttttagcatcaccttccagcaaatcaatattaccctgacctgcaaactgtgattccactttcagcgtgaggattgcacgcattagatcctgttctaccttattttcatgtgagcggtaatgctgattagcgaagtcattgatcgccagaagcatagaatcagcggtagaaagattcttacggctgtattgttcaagatcacgactggtgacgctgttgatagttgccaaatgcttcatttcatacatcacatttgagaacgtgccgcgcttgcttgagtcccactcgctttgtgcgtatggtgctttttcctgtgcaatctgcataaaactttcgatcgcagtggtcagaagaatactattagtgctgtgagactgtttatcaaagatacccagagaagtgaacagttggtttaagccttgctcatattcgaatggagaaactacgcttgcctgacgtccaaataattcttgaatattcattatttatatttccttatattaagtagtagggatcgcagcttcggaataaccagcgataacgaaaccaatagattgcagtttggtaattacgctttcttctgccatgccgttaaattcgatgccagcacgcgccagaataacaaattgtgcattagctactactacgctttcctgacctgcaaacgaaggttctacagcgacgtaagcgatatcagcggcggcggttgctttgctaccatcagctttcagcagatcaccgacaataacatcctctgccagtggtgccgccagtgtgattaaacggtcttggagcagtggatcagcagcgtaagctactactttacaacgcacaaggtcattgtttgcgttgacaggggcgaatttaacgccgtatgggttagccatattattttcctttcttcagttgtttgattcgatttaaaatagcttgtgcgggtgtttccgcatcagccgatttaaagatttgggatacgcttttacgtaattcggtaggtgtaatacctaacagctttgcaactgctataatattttcttccgttacggttagtgtttccccatcttttgaaatgatgatatttttcattatcactttacctttttctaacattcttgtttagtgctgataaaataaaaccggaaggggaaaagtcttccggctttatggatacaacatttgaaggatgttatagagtgttactaaatcgcagttatatgtacttaaagaggataggacatataagaataagatcgcttattgttatatacccttgaggggtgaataccaggcttacagggagtaggcgcttaggaggtcgccccctttggagaggaatctataaacctggtattcgtgcgatcggctaatcgctgtcgtcatggtgtggatgcaccgatcagactttcaggaactactattaacaattagacctgtggaatctcatttttaataggaggcggtgccgagatgattttcggggatcatccacgctttcgcgttctaagattggcaccttaataaaacaccaaaaaacaaacaaaaacatcagctattagcttaatagaacactgttgttaaaaacagtatatacatcggtatttgtgttaaaggggttttatagacactgtataacagtgtttttagaaagtgtttcatgcttcacattgggttaaaaagatgaggggccaagtccatagcccctgcattcttaagacacaattttgataaagcaataaggaaaataaaatgaaactattaacgagggaaaacaatttctaaaaatcactgttaaggtgaaagcgggataggttagatatagggcgcgacccccttgaggtctaccccgctttcgtgtatgcttagaatcgagagaaggattaacgccagctaacacccatttcgattccatacactccattattattataacatatttgttagcagaagtcaagacttgaaacgataaaaaatgaatttatttttcgttcgttaactgccattcaccaaatacacaattcccatctaaaacgatagtctgatcattgccgttgtcgtctgttacgtgcataaggcgggtgtaagtgtcgagcttaccagtgtagatcttgcctactgtgaaacaatggcacgatatgccttcttctgtaagtgccagtaaacgggcacgtttggtttttactgtcattggttaaccttatcgattagttctgctatgagtggttgaagatcagctaccgcttgttgcatgatttcagtggtgtcattgatcacgataatcaggttactcagatcatcagcttcaacctgtgcaccttcggattgttcgcacgctgcaataagtagttgcaatgcttcccgcgtcgattccagattaataaccgcctgtgtgatggtcagttcgcttggatattccatcgctgcgttaactgctttctgcaagtcaataacaaggtccatcatttggatagttacgttgtgtacttcgctcattatgccgcttcctctaattgttgttgtgcttcacgagctttagtcaatgcaatctgtagcggtattctgtaagttgcaatgctgtctacaacgtcatccagagttgccagatcgttctcttcctttgcacgttcaataatatttataaaacattctgaaagaagcttaagatcatgaaaagtggttgtctctaaaattactttgttaatcattttattttccttttgttaagggttatattcagccaacgctgttaatcgtctatttttattctttcaagcataagtaactctgtctctcttgcgcctgcatactgcaaactattaagagccatgtagccacgaaaatgattcatatcctggaagcctaaacactgccaccttttaagaaggctgctatcaatgattgttgttttgcgtgggcgtggattgaagtaaacaccatccatactttgaatgattgataattcttcgtctgtcaattctgggcttggttcttcaagtataaagatcaattcctcgcctggttgtgcatcatgctcataattatatttgcgaggattgtttaacgcatactgatcacatgcttcgccaatagccattattacgtttttcttgcttttttgcttgctcattgcttccccttcgttttggttttcttgttgcagtgttaaaaaaggaagcgatcatgaatactaagaaaaatattaagctttccattgtttcacccttcaagatgtttgatagttgtttgttgtttgttttaagctacagagtcgattctgaatgctttcatatgagtttttgtatactgcaataatccttgtttacttaggttatcgagaagagcatataaaattgctcacctaccacaccggaaaactcagaatcaaacagaatcattcccgttctttcccgtaaatattgcagaaagatttcttgtgaaaattcgccatcgaatatgatcacagtgtcacccacaattcaaacgggcttatctcaagcagtctgaacgtttgattattcacagcttcatactgaattgccccaaaatggcttaggtgatttagccaatgctgcgtgtgttctttactgtgcggtaactcctgaaagctgataatcacgggtagctcataattgctatcagcaagctgttttgccagtgtgtagccgctttctgtaatttcgaatgttcgtttgtttaatgtcaggttgtatttcattttttattctccttaaaatggtattgagtcatagatttcactttcttttctcagggctatcatcagtgcattaaaagcatcatcttcaagaattatcctcttcgaggtcagtgcacgttttataaaattttctgtttcttcttgcataggcttttggctgtctatggaaataagccatgtaaaaagatcagattgttccgtgatttctgcctgtgtttcctgctcaatagagtgtgtcgcttctaacggttcctgtgtttcaggtgcaggctgttctacgtttacagaggtttttacgtcttccggtggtgtgatgtgtgcatctgtaaagggtaatgctttatagagtgatgtttgcccgtcccgtgcctctacagaaagaacacccatatcaataaacatatttataatattacgcacctgacgatcactaaccattccaatattagctaatgttttttgattggcgtaacattcttgcccttgttcattgaacccagctacgtaactgtagatttcaacggctggaagtgtcgcggtgtattccttacctgacggtgagaaccactttttaaacatcttcagccattgttcaactactacatatgtttgtttactatctttcttattgaggcattgcgcttttgcttcggcaattgttttggtgttttggttcatttagttcctcctttgtaaggactgtaattagtaattcattaacaagttttggaattgatttcccttctgcctttgcacgatttaacaacgcgttataagttgcagaatcaaaattaatattcatttggttttctccttctcctgttattattctttctctgcttctgccttacgcagttcatcaataatttttagtgcatcgtcaaagcatttttcacgctctggataaccacagcgccgcgctgtgttcctgttcatccttacttgatgtcgtgttagctcaccttttttaaatgcctctacgacgtgttccggtgtataccatttcataaaaaactccttatttagataaaagaaaaacacaccttgcagcctgacggctcaaagtgcagtgttctgtgatttgattatttagatggagagagatgtttctcccctccctacttacaatactacataacggcggctttgtcaaccctcttttataaaaaatttgatcattttcaatttcttatattttttcttagctttttgtgctgcctactctggtacaattcttccctgttgtctaaaacgctctcaatcgcactctgacggggttttgataaaaacaatacattcccttatgtagaggttgtttatctcgtcagaggcttatttaaggggcttatttttgatttatcagatgatggaaagatggtggatagataaactctgatttcagacatcttataaaatacctgcaaagttctcagaagctctgtaacgagctaatctattaccgctaaggtgtttcccttacattaccctgtttagctcgcctacggcttgatttaagcggtagaatcttatttaaccttcaactacaaaaaccattctttcttttttgttgttggttgttttgtcatgttatgcgttagcatccccaaagggtaacgcgacactaacaaccattcgcttacgctcaggttattgcacaagtaaatttcaatcgttagatggtagttagttaattatcgttctgcgcacagcgcaagactattagccatacgcaagccgtaggctatttgcacatagtagattacatattcgttgtgagcggaaagcgaacatagatcagctaactactaacaaaaaacaaaaaacaaaaactatctgttatgacaagcatcagtctaacttgtgcaaggttctggcgaatgccaatagattaagggatagtcgaagactccctaacgggtatccctataattattctttaaaagataaaagaatttataaaagatagtttaattgtagtttaattatagtattgtaggaactcatttcctgggtaggtaggaactcatttcctgggtaggtaggaaacccgcactatacgattgccaatagattaagggatagtcgaagactcccctaacgggtatccctataattattctttaaaagataattatagttagttgttagttttattattagtattattaaagtaatcttattgtcagtcatcgtgaccgaccccccccagtcatcgtgaccgacacccccccacacaacatctgtgcaatgatcttctaaaagtgtttcttgctatcaaaaattaaaaaacaggcttaaattcaagattaattgatgattaatccctatgtaattccatactaaaaattcaatgaaaagtagcttcaaagtgcaattcttactttcttcacttttacgtcaccatcaccaaagccttatgtaatgcggcatatagcgtatcactgcaaaattgttgctcaataaacgttctaccatttgttgaacgaatgttcactcgtgcacatctcaaagagaataattatttgtcacacaattccataataagaattattatcacttataatgcaatacaacccagattcgatacactttagcaaagtgtattctgtaacctactgatctttatatactcaggcatatatagaccatttatcgctatttattggctatttttcatctgccgaaaataaatttcttgacaagacaaatcatttgtgaacagcttgcataaaataaatttacttataaatcaacaagatatttcatatttgtgcctgcatcagatcgggaggcttgatctttgtgttcaacgatggtgacggacgcacctaaattaaatcggttttaatcgcctttaataccttttaatcagtcttaatcaccttttaatagccctttaatcatttttgatcatttagtgctctcaaccataaaacgtatcgtgcaacatattgaaaatgatcattttatgatcaaaactactttcattgaaacgaataaggagagtataaagatgaaaggtattagccaagccctcaagaatgtagacgaggtaaaaacagtagcagcagagctacagcgcaatagtaaaaccaacctgttttattgcttatgggtgtttatgtatgaaagcgggttgcgtgtctctgacgtactcaagctaaaatatcaggatgttgaggggcaatctcatttgaagataaagcaggagaaaaccggaaacgtagtaaggccaaaagttacccccgccatgttgtcagtggtggcacaacgcaaggcagagcaaacgaagatgcctgtagctacagattttattttcagtgctggcacattacgcagtaaaggcgaagccgtaacccgtaacacggtattcactgaatttgggaagatgggacgtagagccggattctctaatgtgggatgccatacgccacgtaaaagtcggggccgtgtgatgtttgatgcaggggtagctatagagacaatagcccatttcctgggacagacagatccgcgctctactatgtattacatcgggtatggtcaggatgtgcaggacgatttagcagaggagttttctttagaatggtgatccaaattaaaagcttatttgtgctgacgttggcgctattgcctgtcctatcgaatgccggacagataacaatggtcaacccacaggaagaacagacggagaatggaaaaacgctgtgcacatatcagaacagcaattatctgttcacttacgtaactaaggggaaatgcccttatgcaaaaacatttgacacttccgccaaagaataacgattttaacgggattttggataaatgctgtttctgcaattaatgcaataccaactcgcggagtattgaccaacggcacgcgaaaaaaccatatgtgtttgcaccttatcaacttcaaagcatttgggacagtaggctgtttcatcgccttctttccagtaaagtccatctttgaaagtgaaggtgtgcttatcctttagctgctcttcaagctgcttatttttttgttcagcctcaaaaagaagtgcttgggttgtgattacttccatcttcacacttgcaagttcgctcatgaggttagcaagctcaagtttaagcgttgctttatcaagttcgccgccatcatcagcgagcttctttgcaatacctacagctttgtcaatgatacctacagccgccgctgtacttgccaacactccagacatattgcccctaattttaacaagttcactttataaaagctaaagccctaagaacggtttttaaccgcgttacctgctcaggcttttcaagttcatccaaattaacattaattttatctaaacagatggctatacgtgacataacctcgccatgaatctgcttcaaaccttcgccatattgagtggcaatatggtaagtctgttctaaattaaaacgatggatatctttctgcgtttcatgaaatatggtttgaagtttagctaagtcctctaaaacctgattattcattctgaaagtatcaaccagactccttgctgagccataacaaataacaattgccttcattgtctcttcattaacagaagttaatgcgaaagagttgctttcatagaatgagaaataattttgagtcaacggaaagatgctttcaaaaggtttaccaccttcataattttcaagagaatcgtaaattctggctttataaagttccagaagcgtttcgacttccgcttttattccaatcaagacactcttttgcttatcctttgcttcattaactgaagctctgtcttgcctacgtccatcgatcagagtaccccacagggtgaacaatccccctatcaaggcaccaactaaaccagaaatcagttcacttcccatgttgccccctaacaatcatttttgacggcaatgatcccattgctcagtagtccttgcaactcgatcactgattgcaaagttcttcagcaacgaatcataagcgtacactttgcttttatcatctgctgtcatcaacttaccatcaggtttcaactttggcgaaagcaagtatgtaccgtttaaacggttagctttgaagctatcaacatgcaacgttacttcagcacttcccagcacacgtaaagaacctattctgccattctttattgttgctatcgaatactgacatagataagttttcacaattgaagctgcgcttttttcggcaatcttcactgatggagaatccaaagaggatttggggattgaactatgaagagaagatgacggataagagtaatgttgataagtagaagatgagcgcgaactacctccacatgttttccatgccgcaatacacgaattaccacacggtatacctttcttgcaattcttcgcgtatgcagagaacgacaacccagctaaaagaaatataccaatggttatcctaaccagcgaagaccaacccataaccccccccttctttttagtttttccctacatgataccatacctaaattaagggaataggaaccataaagccccgttggtgatacagcaacaagtggagcgtagcgacttcatcagattgtcagaaagatcacaccttatcaggataaccgtgtacccgttgggagcgtggctgaaacgctgatagagcttgcatatggtttgcaaggaccaatatcaccataaacctgtttacgcagccacaaggccgcacatcgggcttaaatgcgtgtgttcagtctgtcgatgacattacaatgccaggatgggctttatcttcacgttgtgctatcgcggtgtgagaggtgcaactgccgccaacgttaggttatactgtcatctcaccgtgtaacttaacgtgacagttactaagggcggatcacaatggtagaactcctaagcaaattaaataggtaactatttaagttgctgacagagaagacttttttggtcttctccacctggggagattctggagcgggcgaagggaatcgaaccctcgtatagagcttgggaagctctcgttctaccattgaactacgcccgcttcgagatgcgtaaggcattataaaccttacgctctccttagcaagtgccgcgctgctgactgctgattaattcgccatcagcattttggcttgctgccctgcggcggcaagtaacgtagcggatcaattgccgttgcacggtaacgaatctggaaatgcaggcgaacagatgccgcatccgtgctccccatagtggcgattttttgcccagccttcacgctttgcccattatttaccagcatcgtgtcattatgggcgtaagccgtaatgtaatcttcactgtgtttaatcatgatgagattaccgtagccacgcagctggttgcccacatacaccacctttcctgcacccgcggcgtaaataggtgtaccccgtggagctgagatatcaatccctttattgccgccatctgctgtcgaatacggcatgataactttccctgtcgttggccataaccaacaacgttgccctactggcggccaggaagatttcggtaccgctgatgacggtgtaaccgatgcggttttggtcgttgatttggcggttgatttacgtgtactactgctacttttcgccccacccagttttagtttctgaccaacttcaatggtgtaagggggggaaatgccgttcagtcgcgccagttcttttacgctggttcccgtggtgcgcgaaatacgatatagcgtatccccccgtttcacggtgtaaacggagccggaatacgttcctgtatcggatgatttgctacccgaacagcccgccaaaagcagtccaaccgataacaacatcacgatacccagagattttttattcaggcgtcccgcactcaaaatctttcctcgcttaaaaaacaagacgccttatcatagcagccagcctcttgatacccaatctcttgcttctggaaaaacgtggtaatagagaaagaggttaatttcatttggcaaagggaagtatcatcagcaaaatattcgctgtagaggtatcgaacttcctgactttttaccctatttcccatcctgatgcgtaataatcccaatttatcacattgattttatcgccactcatattgatacgtatcactgcccctattcagagtcctgtttcgtatcatatctgtgtttttttaacgtcatcacacttcctacctcccctaacgcttatcgtcgtttctggcgtaaatcttgcctgcttagactaaatctttgccataagaaccaaatgttcaaatcgaggggatttctatggaagcgcgggaagcaaccgctacgggtgaatcatgcatgcgcgtcgatgccattgctaaggtcaccgggcgggcacgatatactgacgattatgttatggcgggcatgtgttatgcgaaatatgtacgtagccctatcgcacatggttatgccgtaagtattaatgatgaacaagccagaagtttgccgggcgtactggcgatttttacctgggaagatgtgcctgatattccatttgctactgctgggcatgcctggacacttgacgaaaacaagcgcgataccgccgatcgcgcactgctaactcgccatgttcgtcatcatggtgacgccgttgccatcgtcgtggcccgcgatgaactcacggcagaaaaagcggcgcaattggtcagcattgagtggcaagaattacccgttatcaccacgccagaagcggcgctggcagaagacgctgcaccaatccataacggtggcaatttactgaaacaaagcacgatgtcgacgggtaatgtccaacaaacaatcgatgccgccgactaccaggtacaggggcactatcagacccccgttattcaacattgtcacatggaaagcgtaacatcgctggcgtggatggaggatgactcgcgaattaccatcgtttccagcacccagatcccgcacattgttcgccgcgtggttggtcaggcgctggatattccctggtcatgcgtacgagtcatcaaaccgtttgtcggtggcggttttggtaataaacaggatgtactggaagagccaatggcggcattcctgaccagcaagcttggcggcattccggtgaaagtttcccttagccgtgaagagtgtttcctcgcaacccgtacccgccacgcttttaccattgacgggcaaatgggcgtgaaccgcgacggaacattgaaaggttatagtctggatgttctgtctaacaccggcgcttatgcatctcacgggcactccatcgcttctgcgggggggaataaagtcgcttacctttatcctcgttgtgcctacgcttacagttcaaagacctgctataccaacctcccctcggctggtgcgatgcgtggttatggcgcgccacaagtcgtatttgccgttgagtctatgcttgatgacgccgcgacagcgttaggtattgatcctgttgaaattcgtttacgcaacgccgcccgcgaaggagatgctaatccgctcacgggcaaacgtatttacagcgcagggttgccggagtgtcttgaaaaaggccggaaaatctttgaatgggaaaaacgccgtgcagaatgccagaaccagcaaggcaatttgcgccgcggcgttggcgtcgcctgttttagctacacctctaacacctggcctgtcggcgtagaaatagcaggcgcgcgccttctgatgaatcaggatggaaccatcaacgtgcaaagcggcgcgacggaaatcggtcagggtgccgacaccgtcttctcgcaaatggtggcagaaaccgtgggggttccggtcagcgacgttcgcgttatttcaactcaagataccgacgttacgccgttcgatcccggcgcatttgcctcacgccagagctatgttgccgcgcctgcgctgcgcagtgcggcactattattaaaagagaaaatcatcgctcacgccgcagtcatgctacatcagtcagcgatgaatctgaccctgataaaaggccatatcgtgctggttgaacgaccggaagagccgttaatgtcgttaaaagatttggcgatggacgctttctaccaccctgaacgcggcgggcagctctctgctgaaagctccatcaaaaccaccactaacccaccggcgtttggctgtacctttgttgatctgacggtcgatattgcgctgtgcaaagtcaccatcaaccgcatcctcaacgttcatgattcagggcatattcttaatccactgctggcagaaggtcaggtacacggcggaatgggaatgggcattggctgggcgctatttgaagagatgatcatcgatgctaaaagcggcgtggtccgtaaccccaatctgctggattacaaaatgccgaccatgccggatctgccacaactggaaagcgcgttcgtcgaaatcaatgagccgcaatccgcatacggacataagtcactgggtgagccaccaataattcctgttgccgctgctattcgtaacgcggtgaagatggctaccggtgttgcaatcaatacactgccgctgacgccaaaacggttatatgaagagttccatctggcaggattgatttgaggataacatcatgtttgattttgcttcttaccatcgcgcagcaacccttgccgatgccatcaacctgctggctgacaacccgcaggccaaactgctcgccggtggcactgacgtactgattcagctccaccatcacaatgaccgttatcgccatattgttgatattcataatctggcggagctgcggggaattacgctggcggaagatggctcgctacgtatcggctctgcaacgacatttacccagctaatagaagatcctataactcaacgtcatctcccggcgttatgtgctgcggccacgtccattgctggaccgcagatccgtaacgtcgctacctacggtggaaatatttgcaacggtgccaccagcgcagattctgccacgccaacgctaatttatgacgcgaaactggagatccactccccgcgcggtgttcgtttcgtcccgattaatggctttcacaccgggccgggcaaagtgtctcttgagcatgacgaaatcctcgtcgcctttcattttccgccacagccgaaagaacacgcgggcagcgcgcattttaaatatgccatgcgcgacgcaatggatatttcaacgattggctgcgccgcacattgccgactggataacggcaatttcagcgaattacgcctggcatttggtgttgccgcgccaacgccgattcgctgccaacatgccgaacagactgcacaaaatgcgccattaaacctgcaaacgctggaagctatcagcgaatctgtcctgcaagatgtcgccccgcgttcttcatggcgggccagtaaagagtttcgtctgcatctcatccagacgatgaccaaaaaagtgattagcgaagccgtcgccgcggcggggggaaaattgcaatgaatcacagcgaaacaattaccatcgaatgcaccattaacgggatgccttttcagcttcacgccgcaccaggcacgccgctctcggaattactccgcgaacaaggactgctaagtgtcaaacaagggtgctgcgtgggtgaatgtggtgcctgtacggtgctggtcgacggcacagcaatagacagttgcttataccttgccgcctgggctgaaggaaaagagatccgcacgctggaaggtgaagcgaaaggcggaaaactttctcatgttcagcaggcttatgcgaaatccggcgcagtgcagtgcgggttttgtacgcctggcctgattatggctaccacggcaatgctggcgaaaccacgcgagaagccattaaccattacggaaattcgtcgcggactggcgggaaatctttgtcgctgcacggggtatcagatgattgtaaatacagttctggattgcgagaaaacgaagtaaaaggatatccggcctgaattcaggccggattcactgaggttatgtgtttaacaactcatatttcttaatcttgcgatagagcgtagcaatgccgatgcccagttcatcagcaacttgcttcttgctgttatgacgtgaaagcgcctcgcggatcatttgcttttccatctcctccagcgccgtgccgcccgcatcatcgagtgacaggtgcgcctcactgacctctgttacatcactttgctccgttgtgccattattcagcagatttggcggcaatagcgtgctgtcgataacttcacctgaaggaactacgttaaccagatattccatcaaattgcttaactcgcgcaggtttccgggccaacgatgcttacgcaatatttcgacgacatcgggagcaatgccaggataaaccgatcccagacgacgggtatgcagatgtaaaaagtaatgcaccaatagttcaatatcttcctgacgttcacgcagcggtggcagagttatcgggataacattaagtcggtagaagagatcttcgcggaatttaccttcggcaatgaactgggccaaattctgattagttgcagaaatgatgcgaatgtcgacttgtattgggctactggcaccaatcggcagaatttcacgcgcctcaatagcgcgcagtaatttagcctgcaacattaatggcatatcacctatttcatcgagaaacagcgtgcccgtattcgccgcctgaatcaaccctgttttaccgttggcagaagcgccagtaaatgcgcctttaacataaccgaacagttcgctttccagaagctgctccggaatcgcggcacagttgatagcaataaagggtttattccgtcttccgctcaacttatggattgctcgggcgacgacttctttacccgtgccgctttcaccaaccaccataacgctggatgggctgggtgcaatacggctaatgagtcgttttaattgccgcataacacggcactcgccaaccaattgttcaatatgtggttcatcaggtgcatttgctacagaaaaactggtatgcgattggtgaaatgccattaaaaataattgtcggccctgaatgttatgcaattgaccaatgattaattcacttttatcgtcccacgaaacaatatgctgcatatgtccatgagtaaaattactctcaaatgttaatggtctgaaacggataggtttcccaataatattattttgtacaacaccaagtgtttttaaggcagtctgattaacaaactgaacccgactttcatcatcaacaactaatacgccctgatccatattatcgatcatggtcgcgaatattttactgatgttatctcctggcccctgatcctccagaagtttcgaaacaaaaatggtggatatatggcgaacataatcagaaaattcgcgtaaattatcactgatatgctcttgttgctcgtgggtaacggcaatcaaacttatcaccccaacacaacgatcctgtaaaatgacaggcgtacccagaaatgctttttcgcggcaattttctttactatcgcaaccttcgcaaaggggatcgaagcgagactgtgtcacaactttttcagttttcgtttccaggacgtggcggagcaggcgtgagttgccgctcaactggcgaccaagaaacttcccatacgcgcccgttccggcgacgcgacacaagttttcatcaacgatctcaacctcaagctgcaaaacgctggcaagcattctggcaaaacgctgaattgtcggttgaatttgcatcaatactgactgcgtagtagcaagctccatagctttaccttccagacttacttaaaagtcgatcattgaagacgttgatggttcacagatcatgatgatattaactcaggcgaaattggctttgataaaaacataagatttttatcattttctaatgaaattatggaagagatatcacatttctatatcaatatgagaattacggcggtgagtttatcaaactgaagagagatagcctgtccctttatcttatttctgatacttagcagcaaataaataacgcgataaaaaaagccaaacgttttcgtattttacaaacaaccggaagctggcatcaatttgtgatcaaccccacacattatccgtcaaattagtcttttgcagccccgtggataattctggcacacttattgttagtcccaggtatagctgtgaaaacaccaatcactttggcaagtcacagtgaaataaaccactttgcctgtcattccactaccgggactttatgatgaaaactgttaatgagctgattaaggatatcaattcgctgacctctcaccttcacgagaaagattttttgttaacgtgggaacagacgccagatgaactgaaacaagtactggacgttgccgcagcattaaaagcactgcgtgctgaaaacatctcaaccaaagtctttaatagtggattaggtatttccgtattccgcgacaactccacccgtacccgcttctcttatgcttccgcgcttaacctgctcggccttgcacaacaagatctcgacgaaggcaaatcacaaatcgctcacggcgaaaccgtgcgtgaaaccgccaatatgatctccttctgcgccgacgctattggtattcgcgacgatatgtatctgggcgcaggcaacgcctatatgcgtgaagttggcgctgcacttgatgacggttacaagcagggtgtactgccacagcgtccggctttagtgaacctgcaatgcgatattgaccacccgactcagtcaatggctgacctcgcgtggttacgtgaacactttggttcactggaaaacctgaaaggtaaaaaaatcgccatgacctgggcctactctccaagctatggcaaaccgctctctgtaccacaaggcatcatcggtctgatgactcgcttcggtatggatgtcaccctggcccatccggaaggctacgacctgatcccggatgtggttgaagtggcgaaaaacaatgctaaagcatctggcggtagcttccgtcaggtcaccagcatggaagaagcgttcaaagatgcagacatcgtttatccgaagtcatgggcaccttacaaagtgatggaacagcgtaccgaattgctgcgcgctaacgatcacgaaggcttaaaagcactggaaaaacagtgtctggcacagaacgcgcaacacaaagactggcattgtactgaagagatgatggaactgacccgtgatggcgaagccctgtacatgcactgcctgccagctgatatcagcggcgtatcctgtaaagaaggtgaagtgactgaaggcgtattcgaaaaataccgtatcgcaacctacaaagaagccagctggaagccttatatcatcgccgcgatgatcctgtcccgtaaatacgccaaaccaggtgcactgctcgagcaactgctgaaagaagcgcaagaacgcgtgaaataacccctcgggccgatcagctggtcggccctctatttccagaggccaaaaggataggatatgtccgttttctcattgaagattgatatcgccgataacaaatttttcaacggcgaaacatcaccgctcttttcgcaaagccaggccaaactggcgcgccagttccaccagaaaatagctggttatcgcccaacaccgctttgtgcgctggacgatctcgcaaacctttttggtgtgaagaaaattcttgtcaaagacgaatcaaaacgattcggtctgaacgccttcaaaatgctcggcggtgcgtacgccatcgctcaattattgtgtgaaaaatatcatcttgatatcgaaacgctgtcatttgagcacctgaaaaatgccatcggcgaaaaaatgactttcgcgaccaccaccgacggcaaccacgggcgcggtgtggcgtgggcagcgcagcaactcggacagaatgcggtgatttacatgccgaaaggttctgctcaggaacgcgttgacgccattctgaacctcggtgccgagtgcatcgtcacggatatgaactatgacgataccgttcgcctgaccatgcaacacgcgcagcagcacggctgggaagtggtacaggacacggcatgggaaggttacaccaaaatcccaacctggatcatgcaaggctacgcaaccctggcagatgaagccgtcgagcaaatgcgtgaaatgggcgtaaccccgacgcacgttctgctgcaagccggtgtcggagcaatggccggtggtgtgctgggttatctggtcgacgtctatagcccgcaaaatctgcacagcattattgttgaacctgacaaagctgactgtatttatcgctccggcgtcaaaggcgacatcgtcaacgttggcggtgatatggccaccatcatggcgggcctggcctgtggcgaacctaacccgctgggctgggaaatcctacgtaactgcgccacccaattcatctcctgccaggacagcgttgccgcattaggtatgcgcgtgctgggtaatccgtacggcaacgacccgcgcatcatctccggtgaatccggcgctgtcggtttgggcgttctcgcggcggttcattatcacccgcaacgtcaaagcctgatggaaaaactggcgctgaacaaagatgccgtggtgctggttatcagcactgaaggcgacaccgacgtgaagcactaccgcgaagttgtctgggaaggcaaacacgctgtagcaccttaatcaccctattggaactactccctgcaaaacggggagtaaaaaatctggagaaaaataatggctaagaatattccattcaaactgattcttgaaaaagcaaaagattaccaggcggacatgactcgcttcctgcgcgacatggttgctattcccagtgaaagctgcgacgaaaaacgcgtagtacatcgtattaaagaagagatggaaaaagtcggcttcgataaagttgaaatcgacccgatgggcaacgttctcggttatatcggccacggcccgcgtctggtggcaatggacgctcatatcgataccgtcggcattggcaacatcaaaaactgggacttcgatccgtacgaaggcatggaaactgatgagctaatcggtggtcgcggtacttccgaccaggaaggcggcatggcatctatggtttatgccggtaaaatcattaaagacctcggtctggaagatgaatataccctgctggttaccggtactgtgcaggaagaagactgcgacggtctgtgctggcagtacattattgaacaatccggcattcgcccggaatttgtggtcagtaccgaaccaaccgactgccagatataccgtggtcagcgcggtcgtatggaaattcgtattgatgttcagggtgttagctgccacggttctgcgccagaacgcggtgacaacgccattttcaaaatgggtccgattcttggcgaattacaagaactctcccaacgtctgggttatgacgaattcctcggcaaaggcaccctcaccgtttctgaaatcttcttcacatccccaagccgttgcgctgtagcagatagctgcgccgtctctattgaccgccgtctgacctggggcgaaacctgggaaggcgcgctggacgaaatccgcgccctgcctgcagtacagaaagctaacgcggttgtttctatgtacaactacgaccgtccgtcctggactggcctggtttacccaaccgaatgctacttcccgacctggaaagtggaagaagatcacttcaccgttaaagcactggtgaatgcctacgaagggctgtttggcaaagcgccggttgttgataagtggaccttctcaactaacggcgtatctatcatgggccgtcacggcattccggtgatcggctttggcccgggtaaagaacctgaagcgcatgcacctaacgaaaaaacctggaaatctcacctggtgacctgtgccgcgatgtacgctgcaatcccgttaagctggctggcaacagagtaattactcttcacttattcccctccggttcgccggagggtttttggagtttgctatgcgcgtattgatcaaaaacggcactgtcgttaacgcagatggacaagccaaacaggatttgctgattgaaagcgggattgttcgccagttgggcaacaatatttcgccgcagctcccgtatgaagaaattgatgccactggctgttacgttttccctggcggcgtggatgtccatacgcatttcaatattgatgtcggcatcgcgcgcagttgtgatgatttttttaccggtacccgcgcagctgcgtgtggcggtacaacaaccattattgaccatatgggatttggcccaaacggctgtcggttacgccatcaactggaggtttatcgtggttatgccgcccataaagcggtcatcgattacagctttcacggtgtgatccagcacattaatcacgcaatcctcgacgaaatcccgatgatggtcgaggaaggactgagcagttttaaactctatttaacctatcaatacaaactcaacgatgacgaggttttgcaggcattacgccgtctgcatgaatccggcgcgctgaccaccgtgcacccggaaaatgatgcggctatcgccagcaagcgggcggaatttatcgccgcagggttaaccgcgccgcgctatcatgccttgagtcgccctctggaatgcgaagcggaagccatcgcccgcatgattaacctggcacaaattgccggtaacgccccgctctatatcgtgcacctgtctaacggcttaggtctggattatctgcgtcttgcccgtgcgaatcaccagccagtctgggttgaaacctgcccacaatatctcctgttggacgaacgcagttacgatacagaagacggcatgaagttcattcttagcccaccgctgcgtaacgtacgcgagcaggacaaactgtggtgtggcatcagcgatggtgcgattgacgtggtggcgaccgatcactgcaccttctcgatggctcaacgcctgcaaatttctaaaggcgatttcagtcgctgcccaaatggcttacccggtgtggaaaaccgcatgcagttactgttttccagtggcgtgatgacgggacgtataacaccggaacgctttgttgaattaaccagcgcaatgcccgccaggctgtttggcctgtggccgcaaaaaggattattagcgcccggttccgatggcgacgtggtgattatcgacccacgtcagagccaacaaattcagcatcgccatctccacgacaacgccgactactcgccatgggagggttttacctgtcagggcgcgattgtcagaaccttatcccgtggtgaaacgattttctgtgacggcacctttacaggcaaagccgggcgaggtcgtttcctgcgacgcaaaccgtttgtccctcccgtgctctaaccactgtcagggatctatacacaatcaagaatgatgagtgaggaaaaatgagtaagaaaattgttctcgccctgggcgggaatgcgctgggcgatgacctggccggacaaatgaaagcggtaaaaattacttctcaggcaattgttgatttaattgcccaaggacatgaagttatcgtcactcatggtaacgggccgcaggtgggcatgattaaccaggcctttgaagctgctgcaaaaactgaagcgcactcgccaatgctgccgatgtctgtctgcgttgccttaagccagggttatattggttacgatctacaaaacgccttaagagaagaactgctttctcggggcattaataaaccggtagcaacgctggttactcaggtcgaagtcgacgctaacgatccggcattcctcaacccgaccaagccgatcggttcgttctttaccgagcaagaagcagagcaactgacaaaacagggttacactctgaaagaagatgctggtcgcggctatcgccgtgttgttgcctcgccaaaaccggttgatattattgaaaaagaaacggttaaagctctggtagatgcaggccaggtggtgatcaccgttggcggtggtggtattcctgttattcgtgaaggtaaccatctgcgtggtgccagcgcggttatcgataaagactgggccagcgcccgtttagcagaaatgattgatgccgatatgctgatcattctgactgcggtagaaaaagtggccattaacttcggtaaagagaatgaacagtggctcgatcgcctgtcattaagtgatgctgaacgctttatcgaagaaggtcattttgcgaaaggttctatgctgcctaaagtggaagctgccgcctcgtttgctcgctctcgcgcaggtcgtgaagcactgattaccgtattgagcaaagcgaaagaggggattgaaggcaaaaccggaacggtgatttgtcagtaattttaaggccgggtgggtaataccatccggccattttcatttaagccacttccagcacttcttttgtcgctttcacgccctgatgcatcaacatcattaacgcctcaagtacgccgccgccaatcgcccgggctttatcagaaacgctggtgaaatcagccgtttcaccacgaggatcgatatcaccaattttaaaaccaccgaccactgccaggccgtcgttcaacaagccacgcaccatccccgtcaacggtgctttaatttcatgctcaccaatccaggcaatcacatcgccctctttcaccagatcgcctaatttcacgttggatcgcataatgcctgcagcaggagcacggatcacccgtcgggtggtatgccccataatattgccaggaacaccggtattctcctgcgcacaaccagagtaaatcacctgaccgagccagtgcccgcgatttgtttcaattaccgcatgacaatccttccctgcagtaaagcccggcccaagcgcgattgttactggtgccatatctgcccgcgttcccaaattctgtttcgccagaatagcgtccaccacgcaaagcggtttcagttcatcaagcaatgaacaggcgggatctgccatcacagggatgaatccgcgttcggtaagtttcatcgcttccgcagagctggttgccaggcgagcagtaacgccttcgaccgtcatttcgccatcgaacacggcctgggcaaacgccacggtacaacgaatcactgtcggtttttccacttccagcatgatcactttaaaacccgcatgatacagacgtagcgccacaccactggcgatatctcccgcaccgcgaatcaccactagctggtgtccggaaggatgagaaggtttcatcatcagcccacccggcgcgttatttttcacctgtaatatttctgccagcacgctgatggcgatctcctgcggcgtttccgcacctatgttgtaaccaacgggcgcatgtaaacgggcaatatgttcttcagccacgcctttctcacgcaattgacgcaggaaaagctgaaccttgcggcgacttgccagcaaccccaaccatgcaatgggcttttcaatgagtttgtcgagggcttcacgatcctgattattcgtggcaatcaggacaaaattatcagggcgaatatccagtgcttccactgccgcaccaaacgactcagcatggagaagcgtggttgatggtgggaatagttcaggattgaggctttcgcgataaatatcggcaacggcaatatcaaatcctaatagcgcggcactctgggctatcgcccggttgacatgccccgcgccaatcaacaccagacgtggacgcataccatggacgctgataaatactgacattgcacctccacaatctgacccgacagcatccgcaccgttacgagccatacgtccatggaataatcgcggcttacgttcctgcaatgcctgaagtgactcttcaatcaccttccgctcaaccattccgccaccaattgtaccgacgatagaaccatcggcgcgcactaacatttgtgcagaatggcggggagtcgagcctcggctatcaacaatttgcgccatcgcaaacggacaattttgctcttcgagttttgcagcctctgtgaaaatattcataccaacctcaatggatatcctttcagtaacccggaatacccgggccgctaattcacaaatctgcgcgcgattgcaggatgttcttgtatatcgcccagccagattgcctctacgtcgtgttgttgcagcggttgaaggagctcgctttgtgcaatcgcattctcacattgagaaaaacggttaatgaaccagactcgccgacaaccttgcggtacgtttttaaacgccccctgagggtggcgaaccagcgcaacgagatcgctcagttgcaaggttgcatcaggtgttaacccggtaatatcagcaaactgcgaccagcgatggacattttctgtgctcactttcgcgcccaaagtatgtcctcccatcacagcaatcacgcagcaactgcttttgggtatgcaaggttcgtgctcatcaggcgcttttaacggcattccacgcgagccatctgcttcaatgagaattacgtcacactctggtcgttgcaccagtgcatcaatcgcttctggcgtaaatccctgcacttttccctggttcgctttccagctgtgaaaacaaaatgaaatgggggatgtaagagacgcatgaggaagcatggcgggatcacgacagaaaaccacgggccagtgagacgttggcataaacatatgtgtcgtcgtcgtgattaacacacgcctgccgctagcctggagcagttctgccagccaaaaaagcaagctggttttccccccagcaccaacaacagaaatcacagtgggacgtttctgcgcacctaaatcaatgactaatgccgatgggtcaactatacttttcacgagtctttatgacctctctgggataaattatccccaacttaatccatcaggaagtaacgcaattatcaggcgttattagcccctataaataatggaaccactatgtcagccatcgactgtataattaccgctgccggattatcatcaagaatggggcaatggaaaatgatgttaccctggcaacaggggacaattcttgatacaagtatcaaaaatgcgttgcagttttgtagccgaattattttagtcaccggctatcgtggtaatgaactgcacgaacgttatgcgaaccagagcaatatcactattatccacaacccagattatgcgcagggtttactaacatcagtaaaggccgcagtacccgcagtgcaaacagaacattgttttctcacccacggtgacatgccaaccctcaccatcgatatttttagaaaaatctggtcgttacgaaatgatggcgcaatactgccactccataatggcatccccggccatccgattttagtgtcaaaaccatgcttgatgcaggcaatccaacgacccaatgtcaccaatatgcgtcaggcactccttatgggagctcattattccgtcgagatagaaaatgcagaaataattttagatattgatactccggacgactttattacagcgcaaaaaaggtatactaaaatttagaaaatgtagttaaacgattgcgttcaaatatttaatctctccagcactctttatcataatgataaggaatcactgattttgagaaaagagaaaaagtgataaatgggctgacaataataattttcaggagtgattttaattctcatttggcacctgtgagttcattcacaaaaagcctttaagtttcgagccgcctcacatttttttatatttcccgccaaacctggcaagagtggtgcgattgttgctctatccccctaaaccaccggatttctcaacaccggtcactcaatgatatctgtataagctaaggagagggttatgggggatattatgcgtcccattccgtttgaggaacttttgacgcgcatatttgatgaataccaacaacaacgctcaatctttggtattcccgagcaacagttttactcacctgtaaaaggtaaaactgttagcgtcttcggtgaaacctgtgccactcccgtcggccctgccgctggcccgcacacgcagctcgcgcaaaatattgtcacttcctggctgactggcggacgcttcatcgaactaaaaaccgtccaaattcttgaccgcctggagctggaaaagccctgtatcgatgccgaagacgagtgctttaacaccgaatggtctaccgaatttaccctgcttaaagcctgggatgaatacctcaaagcctggtttgccctgcaccttctcgaagcgatgttccagccttctgattccggtaaatcgttcatctttaatatgagcgtcggttacaacctcgaaggtattaagcaaccgccgatgcaacagttcatcgacaatatgatggacgcatctgaccatccgaaattcgctcaatatcgcgatacgctgaataaattactccaggatgacgcatttttagctcgccacggattgcaggaaaaacgcgaaagcttgcaagccttacccgctcgcatccccaccagtatggtgcatggcgtcaccctctccaccatgcacggctgtcctccgcatgaaatcgaagccatttgccgctacatgctggaagaaaaagggctcaacacctttgtgaaacttaacccgaccttactgggatacgcgcgtgttcgtgagatcctcgatgtctgcggtttcggttacataggcttaaaagaagagtcatttgatcacgacctcaagctgacgcaagcactggaaatgctggaacgcctgatggcactggcaaaagaaaaatcactcggctttggcgtaaaactgactaacactctcggcaccatcaacaataaaggcgcactgcctggtgaagagatgtatatgtcaggccgtgcgctgttcccgctctccatcaatgttgcagcagttctctctcgcgcctttgacggcaaactgcccatttcttattccggtggtgccagtcagctgactatccgcgatatttttgatactggtattcgccctattactatggcaaccgacctgctgaaaccaggcggctatctgcgcttaagtgcctgcatgcgcgagctggaaggctccgacgcctgggggcttgaccatgttgacgtcgaacgactgaacagactggcagcagatgcgttaaccatggaatacacccagaaacactggaagccagaagagcgtattgaagtggcagaagacctgccgctgaccgattgctacgttgccccctgtgttactgcctgtgctatcaagcaagatattccggaatacatccgtctgcttggcgaacaccgctatgccgacgcgctggaactcatctaccaacgcaacgctctgcccgccattaccggtcatatttgcgatcaccagtgccaatacaactgtacccgcctggattacgacagtgcgctgaatatccgcgaactgaaaaaagtcgcgctggaaaaaggttgggatgaatataagcaacgctggcacaaaccagccggttctggttcacgccatccagttgccgtgattggtgcaggtccggcgggtctggcagcaggttacttccttgccagagcgggccatccggttacgctgtttgaacgcgaagccaatgctggcggcgtggtgaaaaatatcattcctcagttccgtattcctgcagagttaattcagcacgatatcgattttgttgccgctcacggcgtgaaatttgagtatggctgctcacccgatttgaccgttgaacagttaaaaaatcagggcttccactatgttctgattgccaccggcactgataaaaatagcggtgtgaaactggcgggcgacaaccaaaatgtctggaaatcactccccttcctgcgtgaatacaacaagggtacagcgctcaagctgggcaaacatgtggtcgttgtcggggcgggtaacaccgcaatggactgcgctcgtgcggcgttacgcgttccaggcgtagaaaaagcaacgatcgtttaccgtcgttcactgcaagagatgcccgcatggcgcgaagagtatgaagaagcgttgcacgacggcgtggagttccgtttcctgaataatccggaatgtttcgatgctgatggcaccttaaccttgcgcgttatgtcgcttggcgaacccgatgagaaaggtcgtcgccgtccggttgaaaccaacgaaacagtaacactgcatgtagacagtctgatcaccgccatcggtgaacagcaggatactgaagccctgaatgcgatgggcgtaccgctggacaaaaacggctggccagacgtcgaccataatggcgaaactcgtctgactgacgtctttatgatcggcgacgtacagcgcggaccatcctccattgtcgctgctgtcggaaccgcgcgtcgggcgaccgatgccatccttagtcgggaaaatatccgttcccaccagaacaataaatactggaacaacgtcaatccggcggaaatctatcaacgtaaaggcgatatctctatcacgctggtgaacagtgacgatcgtgatgcgtttgtcgcgcaggaagccgctcgctgcctcgaatgtaactacgtttgcagcaagtgtgtggatgtctgcccgaaccgcgccaacgtctccattgcggtcccaggcttccagaaccgtttccagacgctgcacctcgacgcttactgtaacgaatgcggcaactgcgctcagttctgtccgtggaacggtaaaccgtacaaagacaaaatcaccgtcttcagcctgtcgcaagactttgataacagcagcaacccaggcttcctggtggaagattgtcgggtacgcgtacgtctgaataaccaaagctgggtgctgaacatcgacagcgaaggccagttcgacaacgtaccaccggagctgaacgatatgtgccgcatcatcagccatgtccaccagcatcatcattatctgctgggccgcgtggaggtgtaatcatgttgattctgaagaatgtcaccgcagtacagttacacccggcgaaagtgcaggaaggcgttgatatcgccatcgaaaatgatgtgattgtcgctatcggcgatgccctgacgcaacgctaccccgatgccagctacaaagagatgcatggtcggattgtgatgccgggaattgtctgctcgcacaaccatttttactcggggctttcccgcggaattatggcaaacatcgccccctgcccggatttcatctcaacgctgaaaaatctctggtggcggctcgatcgcgcccttgatgaagagtcgctctattacagcgggctgatttgttccctggaagcgattaagagcggatgtacatcggttatcgatcaccatgcctctccggcgtatatcggcgggtcgctctccacattgcgcgacgcatttttaaaagttggcctgcgcgcgatgacctgttttgaaactactgaccgtaacaacggcatcaaagagttgcaggaaggtgtagaagaaaacatccgcttcgcccgtcagattgatgaggcgaagaaagcagcaaccgagccgtatctggtggaagcacatatcggtgctcacgcgccgtttaccgtgccagatgccggtctggagatgctacgtgaagccgtgaaagccacaggccgtggtttgcatattcacgctgcggaagacctttacgacgtttcctacagtcaccactggtacggcaaagacctgctggcacgactagcgcaattcgatctcatcgacagcaaaacgctggtcgctcatgggctttacttgtcgaaagatgacatcaccctactcaatcagcgcgatgcgttcctggtgcataacgcccgttcaaacatgaacaaccatgtcggctacaaccatcaccttagcgacatccgcaatctggcgttgggaacggacggcattggttcggacatgtttgaagagatgaaatttgccttctttaaacatcgcgatgcgggtggtccgctgtggcctgacagttttgccaaagccctgactaatggcaacgaactgatgagccgcaactttggcgcgaaatttgggcttctggaagccggttacaaagctgatttaaccatttgcgattacaactcgccgacgccgctgctggcagacaatatcgccgggcatatcgctttcggtatgggctcaggcagcgttcacagcgtaatggtcaatggtgtgatggtctatgaagaccgtcagtttaacttcgattgcgattccatttatgcacaagccagaaaagccgctgccagtatgtggcgtcggatggatgcgctggcataaatgacagatgccctcttcccgcagggaagagggttaaataaggaaagaagatgattgaacaatttttcaggcccgactctgtcgaacaggcgctggaactgaagcgccgctaccaggatgaagccgtctggttcgccgggggcagcaaactcaatgctacaccaacccgtaccgataaaaagattgccatttccttacaggatctggaactggactgggttgactgggataacggtgcactgcggattggcgcaatgtctcgcttgcagccactgcgtgatgcgcgatttattcctgcagcgctgcgtgaagccctcggttttgtttactcacgccatgttcgtaatcagtcgaccattggtggtgaaatcgccgcccgccaggaagagtcggtgctgcttcccgtcctgttggcactggatgctgaactggtttttggcaacggcgaaacgctgtcaatcgaggactacctggcctgcccatgcgatcgcctgctaaccgaaattatcattaaagatccgtatcgcacctgtgcgacccgcaaaattagccgttctcaggcaggtttaaccgtcgtgacggcagccgttgcaatgacagaccacgacggtatgcgaattgcgctggatggcgtcgccactaaagcactgcgtctgcatgatgtcgaaaaacaaaatctggaaggcaatgcacttgaacaggctgtcgccaacgccattttcccgcaggaagatttgcggggcagcgtggcctataaacgctatatctcgggagttctggtagccgacctgtatgccgactgccaacaggctgaggaggaagccgtatgatcatccactttactttaaatggcgcgcctcaggagctaaccgttaatccaggcgaaaacgtgcaaaagctgttgtttaacatgggaatgcactctgtacgcaacagtgatgatggcttcgggtttgctggttctgacgcaataatctttaacggtaatatcgttaacgcgtccttgcttattgccgcacagttagagaaggcagatattcgtaccgcagaatctctgggcaaatggaacgagttaagtctggttcaacaggcaatggttgatgttggcgtggtgcagtctggttataacgatccagctgcagctctgattatcaccgatcttctcgatcgcatcgccgcacctacccgcgaagagatcgacgacgcgctttctggtttgttcagccgcgatgctggctggcagcaatactatcaggtcattgaactggcggttgcacgtaaaaataatccgcaggccaccattgatatcgctccgactttccgtgacgacctagaagtcattggtaagcattatcctaaaactgatgccgcgaaaatggtgcaggcgaaaccctgctatgttgaagaccgcgtaacggctgacgcctgcgtcattaaaatgttacgtagcccacacgctcacgcactgattactcatctggatgtcagcaaagctgaagccttaccgggcgtcgttcacgttattactcacctgaattgcccggatatctactataccccgggtggtcagagcgcaccggaaccgtcaccgcttgaccgccgtatgttcggcaagaaaatgcgtcacgtcggcgatcgtgttgctgcggtcgtcgcagaaagtgaagaaattgcgctcgaagcactgaagctcatcgacgttgaatatgaagtgcttaagccggtaatgtcgatcgacgaagcaatggcggaagatgcgcctgtcgtgcacgatgaaccggtggtgtatgttgctggtgtgccagatactctggaagacgataacagccatgcagcccagcgcggcgagcatatgatcatcaacttcccgatcggttctcgccctcgcaaaaatatcgccgccagtattcatggtcatattggcgatatggacaaaggctttgccgatgccgatgtgatcattgagcgaacctataactcaacgcaggcacagcagtgcccgactgaaacacatatctgctttacccggatggacggcgatcgtctggttatccacgcctccacccaggtaccatggcacttacgccgccaggtcgcgcgcctcgtgggcatgaaacagcataaagttcatgtcattaaagagcgagttggcggcggttttggttccaaacaggacatcctgctggaagaagtgtgcgcctgggcaacctgcgtgaccgggcgtccggtactgttccgctacacccgtgaagaagagtttattgctaacacctctcgtcacgtcgcgaaagtcaccgtcaaactgggagcgaaaaaagatggtcgcctgacggcagtgaagatggatttccgcgccaacactggcccttacggcaaccactcactcaccgtaccgtgtaacggaccggcgctgtcgctgccgttatatccgtgcgataacgtcgatttccaggtcaccacctactacagcaacatttgcccaaatggtgcttatcagggttatggcgcaccgaaaggtaacttcgctatcaccatggcattagcggaactggctgaacagttacagatcgaccaactggaaattatcgaacgtaaccgggtacacgaagggcaagagctgaaaattctcggtgcaatcggtgaaggtaaagcgccgacctccgttccttccgccgccagctgtgcactagaagagatcctgcgtcagggtcgcgagatgatccaatggtcgtcaccgaaaccgcaaaatggtgactggcacatcggtcgcggcgtcgccattatcatgcagaaatcgggtatcccggatatcgatcaggctaactgcatgatcaaactggaatcggacggcacctttatcgttcattctggcggtgcggatattggtactggtctggatactgtggtgacgaaactggcagcagaagtgctgcattgcccaccgcaggacgtgcatgttatctccggtgataccgatcatgcgttgtttgataaaggcgcatatgcctcgtccggtacttgcttctcgggtaacgcggcgcgtttggcagcggaaaatctacgggagaaaattctgttccacggcgcgcaaatgttaggtgagccagtggcagatgttcaactggcaacgccgggcgtcgtgcgcggcaagaaaggcgaagttagtttcggggatattgcccataaaggcgaaaccggcaccggctttggttcactggtgggaactggcagttatatcacgcctgatttcgccttcccgtatggcgcaaacttcgctgaagttgccgtcaacacgcgtacgggtgaaatccgcctggataaattctacgccttgctggactgcggtacaccggtcaatccagagttagcgttgggacaaatctacggtgccaccctgcgtgctatcggccacagtatgagcgaagagatcatttatgacgccgaaggtcacccgttaacgcgtgatttacgcagttacggcgcaccgaaaattggtgacattccgcgtgatttccgcgctgtgctggtgccgagcgacgataaagtcggcccgttcggggcgaaatcgatctcggaaatcggtgtaaatggcgcagctccggcgattgctaccgcaattcacgatgcatgcggcatctggttacgcgaatggcatttcacaccggagaaaatactcactgcgctggaaaaaatataaataataaatggccgcttcggcggcctgtttctctgtttgaacgatgactaaatagtgactgcgaaaatgagataagccgttctcaaggcgtcctgcgccccaaattcgtgggaatttattttactaattcagatgatcaaatttactttaaaaggagtgaagggatgtctgatataaaccatgcaggttctgaccttatatttgaactggaggatcgccctccctttcatcaggctctcgttggtgccattacccatctgttggcaattttcgttccgatggtaacccccgcgttaatcgtgggtgcggccttacagctttccgctgaaacaaccgcctatcttgtttctatggcgatgatcgcctctggtattggtacctggttacaagtaaaccgctacggcatcgtcggttctggcctactctcaattcagtcagtcaatttttcatttgttacggtcatgattgcgctgggcagcagcatgaaaagcgacggttttcacgaagagttaatcatgtcgtcgcttctcggcgtctccttcgttggcgcatttctggttgtcggatcttcatttatcttgccctatttacgtcgggttattacgcctaccgtcagcggtattgtggtactgatgatcggcttaagcctgattaaagtcggcattatcgattttggtggaggatttgcagccaaaagcagcggtacgttcggcaattacgaacatctcggcgttggtttattggttttaattgtggtgatcggctttaactgctgtcgcagtccgttgctacgcatgggagggatcgccattgggctatgtgtcggctatatcgcatcgttatgcctgggcatggtggatttcagcagtatgcgcaatttgccgttaatcaccatcccgcatccgttcaaatacggctttagttttagcttccatcagttcctggtggttggcacgatttatctgcttagcgtgctggaagcagtcggcgatatcaccgccacggcaatggtttcccgccgccccattcagggggaagagtatcagtcccgactgaaaggcggcgtgctggcagatggtctggtttctgttatcgcctccgctgtcgggtcattacccttaaccacgtttgcgcaaaataatggggttattcagatgactggcgtcgcttcacgttatgtcgggcgaaccatcgcggtaatgctggttatcctcggtttgtttccgatgattggcggcttcttcacgaccattccctcggcagttctgggaggcgcaatgacgttgatgttttccatgattgccatcgctgggattcgcataatcatcaccaacggtttaaagcgccgagaaacacttattgtcgccacttctttaggtttaggacttggcgtctcctacgatcccgaaatttttaaaatattgccagcctctatttatgtactagttgaaaaccctatttgtgctggcgggttaactgcgattttattaaatattatcctccctggtggctaccgacaggaaaacgttctgcctggtattacctcagcggaagagatggattaacagtaaaggagtcaatgatgtcaggagaacacacgttgaaagcggtacgaggcagttttattgatgtcacccgtacggtcgataacccggaagagattgcctctgcgctgcggtttattgaggatggtttattactcattaaacagggaaaagtggaatggtttggcgaatgggaagacggaaagcatcaaattcctgacactattcgcgtgcgcgactatcgcggcaaactgatagtaccgggctttgtcgatacacatatccattatccgcaaagtgaaatggtgggggcctatggtgaacaattgctggagtggttgaataaacacaccttccctactgaacgtcgttatgaggatttagagtacgcccgcgaaatgtcggcattcttcatcaagcagcttttacgtaacggaaccaccacggcgctggtgtttggcactgttcatccgcaatctgttgatgcgctgtttgaagccgccagtcatatcaatatgcgtatgattgccggtaaggtgatgatggaccgcaacgcaccggattatctgctcgacactgccgaaagcagctatcaccaaagcaaagaactgattgaacgctggcacaaaaatggtcgtctgctatatgcgattacgccacgcttcgccccgacctcatctcctgaacagatggcgatggcgcaacgcctgaaagaagaatatccggatacgtgggtacatacccatctctgtgaaaacaaagatgaaattgcctgggtgaaatcgctttatcctgaccatgatggttatctggatgtttaccatcagtacggcctgaccggtaaaaactgtgtctttgctcactgcgtccatctcgaagaaaaagagtgggatcgtctcagcgaaaccaaatccagcattgctttctgtccgacctccaacctttacctcggcagcggcttattcaacttgaaaaaagcatggcagaagaaagttaaagtgggcatgggaacggatatcggtgccggaaccactttcaacatgctgcaaacgctgaacgaagcctacaaagtattgcaattacaaggctatcgcctctcggcatatgaagcgttttacctggccacgctcggcggagcgaaatctctgggccttgacgatttgattggcaactttttacctggcaaagaggctgatttcgtggtgatggaacccaccgccactccgctacagcagctgcgctatgacaactctgtttctttagtcgacaaattgttcgtgatgatgacgttgggcgatgaccgttcgatctaccgcacctacgttgatggtcgtctggtgtacgaacgcaactaataataaaactttaacatcctcgtgaggacatcattatgtctggagacatcctacaaacaccggacgcaccaaagccacagggcgcgctggataattattttaaaattaccgctcgtggcagtaccgttcgtcaggaagtactggctggcttaacgacctttctggccatggtttattccgttatcgtcgttccgggaatgctgggcaaagcaggttttcctcccgcagctgtgtttgttgccacctgtctggtcgcgggcttcggctcgttgctgatggggttgtgggccaatttgccaatggcgattggttgtgcgatttccttgacggcatttaccgcattcagtctggtactcgggcaacaaattagcgttcctgtcgcactgggcgcggtctttctgatgggcgtcatcttcaccgctatttccgtaaccggtgtgcgtacctggatcttacgtaatttaccgatgggtatcgctcacggtacaggtatcggtatcggcctgtttctgctgctgattgctgctaacggtgtgggtatggttatcaaaaacccgattgaaggcttgccagtggcgctcggtgcgtttacctccttcccggtgatgatgagcttgctggggctggcggtcatcttcggtctggagaagtgccgcgtacccggcgggatcttgttggtgattatcgcaatttcgattatcggcttaatctttgacccagcggtgaaataccacggtctggtggcgatgccaagtctgactggcgaagatggtaagtctctgattttcagcctcgatattatgggcgcactccagccaaccgtacttccgagtgtactggcattggtgatgaccgcagtgttcgacgctactggcaccatccgtgccgtcgccggtcaggcgaatttgttggataaagacaaccagatcatcaacggcggcaaagccctgaccagtgactcagtaagttcaatattctccggcctggtgggcgcagcgcccgcagcggtttatatcgaatcagcggcaggaaccgccgccgggggtaaaacagggttaaccgcaaccgtagtgggggcgttattcctgctgattctgttcttatcaccgctgtcatttttgatccctggttacgccactgcacccgctctgatgtacgtaggtttgctgatgttaagtaacgtctcgaagctggatttcaatgattttattgacgctatggctggcctggtgtgtgccgtgttcatcgttctgacttgtaatatcgttaccggtattatgctgggctttgtgacactggtcgtaggccgcgtctttgcacgcgaatggcaaaagctgaatattggtacggtgatcattactgccgcactggtcgcattttacgcgggtggttgggcaatctaatagattctccgcgcctttcagcgcggagatttctttcacagaggattctcaccgctggcaacaatacgctgctggcggactcgcctgagttctctttcagtaagcaactgcagcgcctgtgttgggcaagattcaacgcaggcaggcccctcttcccgctgttcacagagatcgcatttcacaatttgttgtcgggtatcccccggcaacgactgaatggtgatcattccaaacgggcacgcactgacgcaactctgacagccaatacaacgggcagaattggtctgcaccacctgctcgcccatcgtcagcgcccccacggggcaagcgccaacacaaggggcgttttcacactgatggcacatcaccggcgcactgatgctgtccagtcgctgtaccttcagccggggtaaaaagacatcggcattcaactcctgttctgaagggtgagcgaccacacaggctacttcacaagtacggcagccaatacagtcagccggattaacgataattaacgatttcatcacgatgccttcgtatcaaacagagttaacatatcgcgcgccgcctgccttcctgcggccattgcagtgacaaccagatccgcgccatgaactgcatcaccaccagcaaagacttttttcagatgcgtctgggtaggtaaatacccgacgtcaccggtttgaatcaggccccatttatcgagtttaattccgctgccctgcaaccacggcatggcatgcgcctggaaaccaaaggccataatcagaacatcggcgggcaattcaaactctgaacccgctaccggacgaggacgacggcgaccatccggccccggctcacccatggcggtacgaatcaggcccaccgcagttaaacgcccatcttcgtcacaagcgatatattgcggttgaacattgaactgaaactcgacaccttcctcgcgcgcattaaccacctctttgcgcgagcccggcatactgacttcatcacgacgatacgcgcaggtcacgctggcggcattgaggcggatggaagtccgcaaacaatccattgtcgtatcgccaccgcccaataccacgactcgcttaccttccacgtccgtcagcggatactcttcagactccggcaatcccatgagctggcgggtatgggcagtcaggaacggtagagcctgaatgacaccgggcgcatcttcatgcggcagatctgctcgcatcatcccgtaagtccccacgccgatgaaaactgcatcatattcagaagttaaatcgctaaaggtaatatcgcggccaatttcacagttaagatgaaagtcgattcccattgcggtgaatatctctcgccgctggcttaataccgttttatcgagtttgaaaggaggaatgccaaaagtcagcataccgccaatttctggatggcgatcaaagacatcaacctgaactcccgcgcgcgccagaatatcagcacaccctaaccctgctggcccagcgccaatcaccgccactttttcgatacggggaacaactttgctgacatcgggacgccagcccatcgccagcgcggtatcggtgatgtagcgttccagattaccgatagagactgcgcccgagtgatctttcaaagtacatgcgccttcacaaagacggtcctgtggacataccctgccgcaaatttctggtaaggaactggtctggtggcaaagttctgccgcttcaataatctttccttcctgtaccagacggatgtaatccggaatagcgttatgcagcgggcaatgccagttgcagttagctttttcggcacaataaacacagcggtcactctcataagtcgcttgttgtggatccagcccgcaatatatttcgccaaagtgggttttccgttcactcgctgaaattttatctgcgcctttacgcgagttaacggggagcaacgctgcactgcgagatggctgagcgtctgatgacgcttttcctgctgccgttttgcgctggcgggccacctttatctgctgtaaccctttatcgtccatcagtcgtaacgcctgtgttgggcagacttcaatacaggcttgcgtgccggaactgcgctggttacaaaggtcgcatttctgcgcaatcgtatcgaccatctcaacgacgccaaaggggcaagcgattgcgcatcttttacagccaatacatttttgctcgtccagttgtacgctatcggactggaaagtcagagcattaaccggacaagccgtaacgcaaggggcattgttgcagtgatggcaggccaccggattcgcagcctggcctttccctacaacgtggatacgcggtcgaaagtcactgtgactcagcggccagttttcttgattgtgtgccaccgcacaggcaatttcacaagcatgacagcctatacattccgcagcttcagcagcgataaacttattcatttgcatccctttcatttaatgagttatgtcttctcaaatttcgcgatgcaataaacgggcatatattaggtagcatgaccgttttaattataattttgcgactgagttcaaattattgcccctcaatctatgccgctttcattatttcaacattgccgaccaaaagagcgctatccagataaaaacgattaaatgcgagagtgcgacatgccagaatgattaatgaaatatcaatatgagaaaattacagataatttcattgtcaggttctcttctcattttcgtggtttaaccacgattatgtgattgcctccgcaattcctgtctctaactccccttcctcgcaaaaactggcactccacgagcatgtgtttagacagtttcattaacgtaaacggttgctttttactctggcgggcgaaaggagaaacactgatgagcgccatagattcccaacttccctcatcttctgggcaagaccgcccaactgatgaggttgaccgcatattatcaccaggaaagctgatcatactcggtctgcaacacgtccttgtcatgtacgcaggtgcagtcgctgttcctcttatgattggtgaccgactgggcctctcaaaagaagctattgcgatgctcattagctcggatctcttttgctgcgggatcgtcacattattgcaatgtatcggtatcggccgctttatggggatccgcctgccggtgattatgtcggtgacctttgctgctgtaacaccaatgatagccattgggatgaacccggatatcggcctgctggggatatttggtgccactatcgccgcgggttttatcaccacattattagcgccacttatcggtcgcttgatgcctttattcccgccactggttaccggtgtggttattacttctatcgggcttagcatcattcaggtgggtattgactgggccgccggaggtaaagggaatccgcaatatggtaatcccgtttatttaggtatctcctttgctgtcttaatttttatcttgctcattactcgctatgcgaaaggatttatgtccaacgtcgccgtattactggggattgtatttggctttttactttcgtggatgatgaatgaagtcaatttatccgggctacatgatgcttcatggtttgcgattgtcacgccgatgtcatttggtatgccgattttcgatcccgtttccattctgaccatgactgccgtgttaatcatcgtgtttatcgagtcgatggggatgttcctggcactgggtgaaatagtcggtcgtaaactctcttcacacgatattattcgcgggctgcgtgtcgatggcgtagggacaatgataggcggaacgtttaacagcttcccccacacgtcattttcacaaaacgttggcctggttagcgtgacgcgcgttcatagccgctgggtgtgtatttcttcgggaattatattaatcctgtttggcatggtgccaaaaatggcggtgctggtcgcctccattccgcaatttgtgctgggcggtgctgggctggtgatgttcggcatggtactggcgacagggattcgaattctgtcgcgctgtaactacaccaccaaccgttacaacctctatattgtggcgatcagtctcggcgttggcatgactccgacactctctcacgatttcttttctaagttaccggccgtactgcaaccgctgctacatagcggcattatgctcgcaacccttagcgccgttgtgctgaacgtcttctttaatggctatcagcatcatgctgacctggtgaaggaatccgtctctgataaagatttaaaagtcaggacagtacgtatgtggcttctgatgcgcaagctgaagaaaaatgagcatggagaataatatgaatcttttaatgcgcgctatattcagtctgctgttgctttttactctctctattcctgtcatttctgactgtgttgcaatggccattgaaagttgcttcaaatatatgatgctacttttttaaatggtttttacctgtcggcatccgctcaaaacgggcggttgtcgataaacgctcacttggttaatcatttcactcttcaattatctataatgatgagtgatcagaattacatgtgagaaattatgcaaacggaacacgtcattttattgaatgcacagggagttcccactggtacgctggaaaagtatgccgcacacacggcagacaccctcttacatctcgcgttctccagttggctgtttaatgccaaggggcaattattagttacccgccgcgcactgagcaaaaaagcgtggcctggcgtgtggactaactcggtttgtgggcacccacaactgggagaaagcagcgaagacgcggtgatccgccgttgccgttatgagcttggcgtggaaattacgcctcctgaatctatctatcctgactttcgctaccgcgccaccgatccgagtggcattgtggaaaatgaagtgtgtccggtatttgccgcacgcaccaccagtgcgttacagatcaacgatgatgaagtgatggattatcaatggtgtgatttagctgatgtattacacggtattgatgccacgccgtgggcgttcagtccgtggatggtgatgcaggcagccaatagtgaagcaagaaaattgttgtctactttcgcgcagcacaattaaaaaaccccgacatttgccggggttgtgagcataacgtaatgcttattttaccggacgcatcgccgggaacagaataacgtcgcggatggtatggctgttggtgaacagcattaccatacggtcgatgccaatccccagacctgctgtcggcggtaagccatgttccagtgcggtaacgtaatcttcatcgtagaacatcgcttcgtcgtcacctgcgtctttcgcggcaacctgatccaggaagcgttgcgcctgatcttccgcgtcattcagctcgctaaagccgttaccgatttcacgaccaccgatgaagaactcaaagcggtctgtgatttccgggttaatgtcgttacgacgcgccagcggagaaacttctgccggatattcagtaatgaaggtcggctgaatcagatgtgcttctgccacttcttcgaagatctcggtaacgatacggcccagaccccagctcttctcaacgtggataccgatagattcagcaatcgctttcgcagagtcgaagttatccagatccgccatgtcggtttccgggcgatatttcttgatcgcttcacgcatggtcagtttttcgaacggtttaccgaagtccagcgtcacgtcgccgtaggtcacttccgtcttaccgagaatatcctgtgccagagtacggaacagcgattcggtcagctcgatcagatctttgtaatctgcgtaagccatgtagagttccatcatggtgaactctgggttatgacgtacggagataccttcgttacggaagttacggttgatttcgaatacacgctcgaagccaccgaccaccagacgcttgaggtacagttccggcgcgatacgcaggtacatgtcgagatccagcgcgttatggtgggtgataaacggacgcgcagcggcaccgccagggatcacctgcatcatcggcgtttcaacttccataaagccgcggttcaccatgaactggcgaataccagagaggatctgcgagcgtactttaaaggtgttacgggattcatcgttagagatgagatccagataacgctgacgatagcgcgcttcctgatcctgcaagccgtggaatttatccggcagcggacgcagtgctttggtcagcagacgcagctcggtacagtggatagacagttcgccggttttggttttgaacagtttacctttcgcgccgaggatgtcaccgaggtcccattttttgaactgctcgttgtaaacgccttccggcagatcgtcacgggcaacgtacagctgaatgcggccacccacatcctgcagggtaacgaaagacgctttacccataatacggcgggtcatcatgcggccagcaacggcgacttcgatgttcagcgcttccagttcttcgttctctttaccgtcgaattctgcgtgcaattggtcagaggtatgatcgcgacggaaatcgttcgggaaggcaatcccctgctcgcgcaggttcgccagcttctcacgacgcgttttcagttcattgttaagatcgactaccgcgtcagcgccctgtgcgtgttgttcagacatgttggttcctcataaccctgctttcaaacttgcttcgataaattgatccaggctgccgtccagcacggcctgcgtgttgcgggtttctaccccggtacgcagatctttaatgcgggagtcatcaaggacataagaacgaatctggctgccccagccgatgtcggatttgttatcttccatcgcctgtttctcggcatttttcttctgcatctccagttcataaagcttcgctttcatctgcttcatggcctggtctttgttcttgtgctgggaacggtcgttctggcattgggtcacgatcccggttgggatgtgggtaatacgcaccgcagattcggtacggttaacgtgctgaccgcccgcgccggacgcgcgataaacgtcaatgcgcagatccgccgggttgatttcgatatcaatatcatcatcaacttccgggtaaacaaacgcagagctgaacgatgtgtggcgacgaccgccggagtcaaacgggcttttacgcaccaggcggtgaacgccagtttctgtacgcagccagccgtaagcgtaatcgccggagattttgatcgtcacggatttaatacccgccacttcaccttccgactcttcgatgatttcagttttgaaaccacgcgattctgcccagcgcagatacatacgctcaagcatgctcgcccagtcctgtgcttccgtaccgccagaccccgcctgaatatcgaggtagcagtcggcgctgtcatattcgccagagaacatacggcggaactcaagctgcgccagtttttcttccagggcgtcgagttcagcaacggcttcgttaaaggtttcttcgtcgtcagcttctacagccagttccagcagaccagaaacatcttccagcccctgtttcatttggtcgagggtgtcgacaacggcttcgagggaggaacgctctttacccagcgcctgtgcgcgttcgggttcgttccagacatccggctgttccagctcggcgtttacttcttccagacgctctttcttggcgtcgtagtcaaagataccccctaagaacgtcggagcgttccgtgaggtcctgaatgcgattatttaccggattaatttcaaacatggtctgatttcttttattgagctagtcaaaatgcggtgataagagcgggattgtacccaatccacgctcttttttatagagaagatgacgctaaattggccagatattgtcgatgataatttgcaggctgcggttgccgcgaaactcgttgatatcgagcttgtaagccagttgcacttcgcgcacgccgttatccggccagagggcggtatcgacattaaaagcaataccatccagcagcggaccgccgccgaccggttcgaccatcaccttcaaatgacgttcgcccaccagccgctgttgcagcagacggaaatgaccgtcaaacagcggctccgggaacatctgcccccacgggccagcatcgcgcagcaactgcgccacttccatggtcatttcggacgggcttaacggaccgtctgacaccacttcgccttgcaatagcgaagggtccagccactctgtaaccagttcgccaaaccgttgttgaaagagttcgaatttatcctcttccagcgacaaacccgccgccatcgcatgaccgccaaacttcagtatcatgccagggtagagtgtgtctaatcgctccagtgcatcacgcatatgcagcccctgaatggagcgacctgaacctttcagcgtaccatcacctgctggcgcaaaggcgataaccggacggtgaaaacgctctttgatgcgcgaagccagaataccgacaacgccctgatgccattcggggtgatacattgccagcccgccgggtagcgtgtcgcgacttcgctccagtttctcgcacagggtcagggcttcaacttgcattccttgttcgatctcttttcgcgtctggtttagcgcatcgagttcatttgccagcacgcgcgcttcgccgatgttgtcgcacagcaagagcgccacaccgacggacatatcgtccagtcgtccggcagcattgagacgtggccccagcgcaaaacctaaatcgctggcggcgagtttttgtgcatcacggtttgccacttccagcagcgctttaatccccggacggcactttccggcacggatgcgactcatcccctgccaggtcagaatgcgattattagcgtccagcggcacgacgtccgctactgtccccagcgctaccagatccagcagttctgccaggttaggaattgcgatgccgcgctcatcaaaccagccctgatcgcgcaaaaaggtgcgcagcgccagcatcagataaaacgccacacccacgcctgccagtgatttcgacgggaaattacagtcgcgcaagttagggttaatgatcgcttccgctgcgggtaatgtttcgcccggcaaatggtgatcggtaacaataaccggaatgcccaacgagcgagcgtgttcaacgcccgcatgggaggaaataccgttatccaccgtgacaattaactgcgcgccacgggcatgggcctgatcgactacttccgggcttaagccgtaaccgtcttcgaaacggtttggtaccagatagtcgatattgctgcaaccaagcgagcgcatcgccagcacgcttagagccgtgctggtcgcgccgtcggcgtcaaaatcgccgaccacaataatccgcgttccttcgcgaaaagcgttgtaaaggatctcaacggccttttcgacgccgctcagttgctgccagggcaacatacctttaacactgcgttccagttcttgcgcactgcgcacgccccggctggcgtataaacggcgcagcaagggaggcaattcagcgggcaagtctgccgtttcatcgacttcacggcgacgaagttgtatctgttgtttcacgcgaattatttaccgctggtcattttttggtgttcgtcgaggaattctttcatctctttcggcggctggtaacccggaacaagtgtgccattgctcagcacaactgccggagtaccgctaacgccaagctggacgccaagtgcgtaatggtcggcaatatccacgtcgcagctggctggtgcgacgcttttacctgccatcacatcatcaaacgctttgtttttatctttcgcacaccagatagctttcatttctttctctgcatcgctgtccagcccctggcgcgggaaagcaagataacgcacggtgatccccagcgcgttatagtctgccatttgctcatgcagtttgtggcagtaaccacaggtaatatcagtaaacacggtgatgacgtgtttttcctgcggcgctttataaacgatcatctctttttcaagcgcattcaactgctttaacagcatcttattggtgacattgaccggagccgtgccgctaacgtcatacattggcccctgaatgatatgtttaccatcatcggtgatgtacaacacgccgctgttagtcagaactgtcttcatgccagctacgggcgcgggctgaatatcgctgcttttgatgcccattttggctaacgtttgttgaattgccgcgtcatcagcctgagcaaaacctgaaaacgccgctaacaaagtaaacaacataaaacctttcttcataaatcttcccgttcttttcagacatcacgcccgcgggtgatgctgttgatgaagttgccgcagacgctcggtagcgacatgcgtataaatttgcgtggtggaaagatcgctgtggcccagtagcatctgcaccacgcgtaaatccgcaccatgatttaataaatgagtggcaaaagcgtgacgcaacacatgcggtgacagcttttcgctgtcgatacccgccagcacagcataatgtttaatgcggtgccagaaggtctgtcgcgtcatctgctgcgcacgctggctgggaaacaacacgtcaattgacacaccattcagcagccacggacgcccatgttccagataggtttccagccagtaaaccgcctcttcacctaacggtaccaggcgctctttgttgcctttaccaatgacccgcactacgccctgacgcaggctgatatcactcattgtcagtccgaccagttcagagacacgcagcccggtagcatacaacacttcaagcatggctttatcgcgtagctccagtggctgatcaattaatggtgcctgtaataaacgttcgacctgcgcttcgcttaaatcttttggcaaacgctggggcaatttcggtgaagcgagatgcgcactgggatcgtcttcacgaaacttttcgcgataaagatactggaacaatcggcgcactgcactcagcaaacgcgctgagctggtggctttatacccgccctccagccgttctgccagtaatgcctgcaaatcgtcactttgcgccgtcgccagcgtcaacccgcggtgatgcaaccactccaccatcattgacagatcgcgacggtaagcgttcaacgtattttcagccagatttttttccagccacagagcatcaagaaactgctcgatgcgtgccagatcctgtttcacttgcgccccttatggtcactcatttgatccattatgccttattgtgccgtgactaaagcgattctgatacactagctgcaaaagccacagcagaatcgagaagcttacgttatgaatatgggtcttttttacggttccagcacctgttacaccgaaatggcggcagaaaaaatccgcgatattatcggcccagaactggtgaccttacataacctcaaggacgactccccgaaattaatggagcagtacgatgtgctcattctgggtatcccgacctgggattttggtgaaatccaggaagactgggaagccgtctgggatcagctcgacgacctgaaccttgaaggtaaaattgttgcgctgtatgggcttggcgatcaactgggatacggcgagtggttcctcgatgcgctcggtatgctgcatgacaaactctcgaccaaaggcgtgaagttcgtcggctactggccaacggaaggatatgaatttaccagcccgaaaccggtgattgctgacgggcaactgttcgtgggtctggcgctggatgaaactaaccagtatgaccttagcgacgagcgtattcagagctggtgcgagcaaatcctcaacgaaatggcagagcattacgcctgatctcactgacggcttagcgcatatgctttgccgtcatctttatctttgcgtctcttgttgcaacaaaatccgccgtaaatcccgccattcggcttcgtccatgctgtcggctgccagccataaatgttgccgtttaccgccatcagaacgtaaacgcagcatcatgccgctcttaatcatccacggtgctttgacgatgcaccactcctgcccttgccaacgcaaacgcccgtccatcaacaagcgaatttccccctggcgagcattaatacgccgctggctgcgaacgcaatcaaacaccaccagcgaaagtaacaccatccataacggggtgtaactgagtggccagggcatgagtaaaataacagcggcaaccagcccatgaatcagcaaggaaagccactgtgcgcgccaggagacgcgcaaatcagattgccacaggaccacgttcccggttccgtgtctggatgagtcggaccatcatttccagttctgcatcggccggtttaccgtgattcatcagccagttaaacaggtccggatcgtcacattccagcagacgaataaagatgcgtttttcgtcatcgcttaagctgtcgtactcatgttcgaaaaacggcatgattgaaatatcgagttcgcgcataccacggcggcatgcccaatgaatgcgggctttgttgttaatgtccatcttcttcctgtctcacgaaaatccagtacccggctattgtaacgtgtttttcgccttcttttacgggaatatcagtaaacaccatcgcgatcgcgaaattaattcacaacaattcaatggcttcatttttttggaagtcgcctcgcagaaggcacagatcgcgtagtgaaagcacttgcattgcctcatagctcttttaccattagtcattaatacgccgttaagcaactcaggactctattatggcttttacaccttttcctccccgtcagcctacggcttctgcccgtttaccgctgacgctgatgacgcttgatgactgggcgcttgccaccattactggcgcggacagcgaaaaatatatgcagggtcaggtgacagcagatgtcagccagatggcagaagatcagcacctgctcgccgcccattgcgacgccaaaggtaaaatgtggagcaatttacgtctgttccgcgacggcgatggctttgcatggattgaacggcgcagcgtgcgtgaaccgcagctgactgaactgaaaaaatatgcggtattctctaaagtgaccatcgcgccagacgacgagcgtgtgctgcttggtgttgccggttttcaggcgcgcgccgcgctggcaaatctctttagtgaactgccttcgaaagaaaaacaggtagttaaagaaggcgcgaccactttgctatggtttgaacacccggcagaacgtttcctgatcgtaaccgatgaagctactgctaatatgctgaccgataaactgcgcggtgaagcggaactgaacaatagccaacagtggctggcattaaacattgaagcgggtttcccggtgattgatgccgccaacagcgggcagtttatcccacaggcgaccaacctccaggcgctgggcggcatcagctttaaaaaaggctgctataccggacaagagatggtggcgcgagcaaaattccgtggtgccaataaacgtgcgctctggttgctggcaggtagcgccagccgactgccggaagctggtgaagacttagagctgaaaatgggcgagaactggcgtcgtaccggtacggtgctggctgcggtaaaactggaagatggtcaggtcgtggtacaggtcgtcatgaataacgatatggaaccggatagcatcttccgcgtacgcgacgatgcgaatacactgcatatcgagccgctgccgtattcgctcgaagagtaaatctctttatcgcatcaggcatttatcgcctgatgcgacgctggcgcgtcttatcaggcctacaaaggcatacccattacgcctgcccaatatacaaatagatcgccagaaagtggcacacactaccgccgagcacgaagccgtgccagatggcatggttgtatggaatgcgtttgcagacgtagaaaatcaccccgagcgaataaaccacgccgcctaccgccagtaaggtaacgctgcccgccgcgagcttaactgccatttcataaattaccaccagcgacagccagcccatcgccagataggtcaccagagataaaattttgaatcggtgcgcgatggtcagtttaaacagaatacccagcaatgccaggctccagataacaatcatcaacccgcgcgctaacggagaatccagccccaccagcaaaaacggcgtgtaggttccggcaatcaacaggtaaatagcgcaatggtcaaatttcttcagccacatttttgcccgttgatgaggaatggcgtgatagagcgtcgaagcgaggaacagcaggatcatactgccgccatagaggctgtaactggttatcgctgtggcgctggcattgagatccaccgcctgaaccagtagcaacaccagcccaacgataccaaacaccaacccaatgccgtgactgacgctgttggcaatttcctctgccagcgaatatccctgcttaatgaggggcttctgaaccataacttactccggagaaacgtacacgcacatgtatacctctccagcgtaactgagaatagttccagtgaacacctgttagctaaaataaattctgatttgagactaatctcctaaaaatcatgaaattaaatgcgaaatttcaactaacaggcgtgagttcaatttaaagacatttaaattcaatcacataaaactgtgtctgaccgggatagatgtcggcaatgacctttatcagttcagtcagggtcatattttcctgctctgcatgtttttccgtcagcgtatccagcgttacggttgaggttgcggtgacttcaatcgtgcaaaaataaccgtcatcttcaaaacgcccgacacgaagcacatcacccgttttgaagtgcgattcagactcgtcgcggatggtgatggttttacgcccagccagaatgtcatcctggaaacgttgaaaaaaagtgatgtcgtttggctgcatggtactatttcctgtaagaattgactcatctggagcctatgatagtgaaaaaactcaccttaccgaaagatttcttatggggcggcgcagttgccgctcatcaggtcgaaggcggctggaacaaaggcggcaaagggccgagcatttgtgacgttctgaccggtggcgcacacggcgtgccgcgcgaaatcaccaaagaagtcttgccaggcaaatactatccaaaccatgaagccgttgatttttatggtcactacaaggaagacatcaagctatttgccgaaatgggcttcaaatgttttcggacttccatcgcctggacgcgtatttttccaaaaggtgatgaagctcagccaaacgaagaagggctgaagttctacgatgatatgttcgatgaactgctgaaatacaacatcgaaccggtgatcaccctctcccactttgaaatgccgctgcatctggtgcagcaatacggtagctggaccaaccgtaaagtggttgatttctttgtccgtttcgcggaagtggtgtttgaacgctataagcataaagtcaaatactggatgaccttcaacgaaattaacaaccagcgtaactggcgtgcaccgctgttcggttactgctgctccggcgtggtttataccgagcatgagaacccggaagagacgatgtatcaggtgctgcatcaccagtttgtcgccagcgccctggcggtgaaagctgcgcgtcgcattaacccggagatgaaagtcggctgtatgctggcgatggtgccgctctatccctactgctgtaacccggacgatgtgatgttcgctcaggagtcgatgcgcgaacgctacgtctttaccgatgtgcagctacgcggctattacccgtcctatgtgttgaacgagtgggagcgtcgcggatttaacatcaaaatggaagacggcgatctcgatgtactgcgtgaaggcacctgcgattatcttggtttcagctattacatgaccaacgcagtgaaggccgaaggcggcaccggcgatgcgatctctggtttcgaaggcagcgtaccgaacccgtatgttaaagcgtctgactggggctggcagattgatccagtaggtctgcgctatgccctttgcgaactgtatgagcgttatcagaggccgctgtttattgtcgaaaacggttttggcgcttacgacaaagtggaagaagatggcagcatcaacgacgactaccgcattgactacctgcgcgcccatatcgaagagatgaaaaaagcggtgacttacgatggcgtggatctgatgggctacacaccgtggggctgcatcgactgcgtatcgttcaccaccgggcagtacagcaaacgctacggctttatctatgtgaataaacatgacgacggtgctggcgatatgtcgcgttcacgtaagaagagctttaactggtaccaagaggtgattgccagcaacggcgagaagctttaagtcgatgaagtaccggatgcaatacttgttgcatccggtcagacaacttccctgttttatttcccgcccgccaaatcgataaaacttcccgtgacgtaagaggctttatcacttagtagccagacaatggcctgcgcgacctcttctgcctgtccaccacgctgcatggggatgttcgacttaacgcgatcgacgcgtccaggctcgccgccgctggcgtgcatttcggtataaataaaccctggccgcacgcagttaacgcggatcccctgcgcggcgacttccagcgatagtccggtggttaacgtatcaatcgcccctttcgatgccgcgtaatcaacatattcccctggcgaacccaaccgtgaggccaccgaagagacattgacgatagcgccgccactgccaccatttttaagcgccatgcgttttaccgcctcgcggcagcagagaaaatatcccgtcacgttggtggaaagtactcggttgattcgctctgcggtaaggttttcaacggtgcactgggtaaacaagatcccggcgttattgaccagcgctgctagcggttcatcgtgctgatcgattgctgtaaacatcgcaacgacctggttttcgtcgctgatatccgcctggagcacgaatgctttgccaccggcttgcgttattaagttcatcacttcctgcgccgcgtggaggttttgctgataattaaccgccaccgtatacccttcttgcgccaacagtaatgcagttgcccgcccgatgccgcgactgccaccggtcacaagtgctataaccatttgtttttccgagaaaaattcattcgttgacgtatctttgagattgctaacaaactggctcaatcttcaatgttggcacgcttttccccctcgccctttcagggagagggccggggtgagggtaaatattcgcgccagtgccggcctgttcccctcaccctctccccaaaggggcgaggggactgtctgagcacttttgtactttgtcatctgactaaaaaggcgccgaagcgcctttagaaaatagtcgaatcagtgaattactggtattcgctaatcggtacgcaggagcagaacaggttacggtcgccgtaaacatcatccagacgtttcaccgtcggccagtatttgtctgccacacctgccgggaatactgcaacctcacggctgtacggatgcgcccactcggcgaccagttcgttctgaatgtgcggcgcgttcaccagcgggttatcttccagcggccagacaccggctttaacctggtcgatttctgcgcggatagccagcatcgcgtcgataaagcgatccagttccactttgctttcagattcagtcggttcaaccatcagcgtacccgccaccgggaacgacatggtcggcgcgtggaaaccgtagtcgatcaggcgcttggcaatatccagctcgctgatgccggtttcttctttcagcgggcgaatatcgagaatacattcgtgcgccacgcgaccgtcgcgaccggtatacagcaccgggaaggcatcctgcaggcggctggcaatatagttggcgttgaggattgccacctggcttgcttttttcagcccttctgcgcccatcatgcggatgtacatccagctgattggcaggatagaggcgctaccgaacggtgccgcagaaactgcgccctgacgggttaacatgccttcgatttgcaccacgctatgacccggtacaaacggtgccagatgcgctttcacaccgatcggtcccatacccggaccaccaccgccgtgcggaatgcagaaagttttatgcaggttgaggtgcgaaacgtccgcgccaataaagcccggcgaggtgatgccaacctgggcgttcatgttcgcgccatcaaggtaaacctgaccgccgaactgatgcacgacttcacacacttcacggatcgtttcttcatacacgccgtgggtagaaggataagtcaccatgatacaggagaggttatcgcccgcctgttccgctttcgcgcgcagatcagtcagatcgatgttgccgtttttatcacacgccacaaccaccacctgcattcctgccatatgtgcagaagcggggttagttccgtgcgcagaagccgggatcaggcagatatcgcgatgcccttcgttgcggctttcatgataatgacgaatcgccagcaggcccgcgtattcgccctgtgcgccggagttcggctgcatacaaacggcgtcgtaaccggtcagtttcaccagccagtcagccagctgcgcaatcatctgctgataaccttcagcctgttccggcggacaaaacgggtgcagttcggcaaattccggccaggtgattgggatcatctcggcggcggcgttcagtttcatggtgcaggaacccagcgggatcatcgcctgattcagcgccagatctttacgctccagcgagtgcatatagcgcatcatttcggtttcgctgtggtagcgattaaacaccggatgggtgaggatttcgtcgtcgcgcagcatcgcaggctggatagagcggctgtcgtgagccacgtctttgtccagcgtgtcgatgtccaggccgtggttatcgcccagcagcacgttgaaaagctgcattacgttttcacgcgtggttgtttcatcaagggtgatcccaaccgcgttcagaatatcgctacgcaggttgatttcagccgcttcggcacgcgtcagtacgcccgctttgtcggccacttccacacacaaggtgtcgaaatagtgcgcatggcgcagcttcagacctttttgttgcaggcctgccgccaggatatcggtcaaacggtgaatgcggttagcgatacgtttcaggccaaccgggccgtgataaacggcatacaggctggcgatgtttgccagcagtacctgggaagtacaaatgttggagttcgctttctcacggcggatatgttgctcgcgagtctgcatcgccatgcgcagcgcggtattgccagctgcatctttcgatacaccgataatacggcccggcattgagcgtttgtattcatctttcgccgcaaagaatgccgcgtgtgggccaccgtagcccatcggcacgccgaagcgttgcgccgaaccaaaaacaatatccgcgccctgtttacccggcgcagttaacagcaccagcgccataatatcggcggcaacgctgaccacaattttgcgtgatttcagttcgctaataagcgcagtgtagtcgtgaatttcaccggtagtgcctacctgctgtaacagcacgccgaagacgtcctgatggtcgagcactttttgcgcgtcatcgacaatcacttcaaaaccaaaggtttcggcacgagtacggaccacatccagcgtttgcggatgcacatcggaagccacgaagaagcggttggcatttttcagtttgctgacgcgtttcgccatcgccattgcttcggcggcagcggtggcctcgtccagaagagaagcagaggccatatccagtccagtcaaatccagcgttacctgctggaagttgagcagtgcttcaaggcggccctgggagacttcaggttgatacggagtgtacgcggtataccagcccggattttccagcatgttacgcaggataaccggcggtagctgcacggcggtgtaacccatgccgatgtaagacgtgaagcgtttattgcgactggcaatagccttgagttctgccagtgcggcgtattcggtcgccggtgcgccaacctgcggtggtgtcgcaagctgaatatctttcggcacaatctggccggtcagcgcgtttaacgattgtgcaccaacggcattcagcatttcttgctgttgcgcggcgtccggtccgatatggcgttcaataaaagcgccgctgttttcaagctggcttaacgtctgtgtcatgagcgatggttcctgaaacgtgcagtgaattgtgaacctctctccttacgaagagagtgagggtgaggcataaattttcctcaccctgatcctctcccgcagaagaggaataaagccgttactcgtcttctaacaatgtttcgtatgcggtcgcatccagcagtgattccagttcgctttcatcgctggctttgattttaaagatccagccacctgcatacggttcgctgttcaccagttccggggaatcgctcagtgcgtcgtttaccgccacgatttcaccgcttactggcgcataaatgtctgacgccgcttttactgattcggcaaccgcgcagtcatcgcccgcgctaaccgttgcgcccacttccggcaggtcaacaaacaccatatcgcctaacagctcctgggcatgttcggttataccaacggtgtaagtgccgtcggcttctttacgcagccattcgtgttctttgctgtatttcagttctgctggtacgttgctcatcaatcaatctccaaaaaagtaaatcacgcgacggctttgccgttacgcacaaaaacaggttttgtcactttaaccggcatttcacggttgcgaatttgcacaatcgccgtttcgccaataccttccggcacgcgcgccagcgcaatgctgtaacccagcgtcggggagaaagtaccgctggtgataatgccttcatgctggttgccctgcgcatcggtaaagcgtaccggcagttcattacgcagcacgcctttttcggtcatcaccagaccaaccagtttttctgtaccatgctcacgctgcacttccagggcttcacgaccgataaagtcacgatctgccggttcccaggcgatagtccagcccatgttggcggctaaaggagaaatagtttcgtccatctcctgaccataaagattcatgcccgcttccagacgcagcgtgtcacgcgcgcccaagccacatggcttaacacccgcttccaccagcgcacgccagaaatcggccgctttttcattgggcagcgcaatttcatagcccgcttcaccggtataaccagtggtggcaataaacagatcgcccgcctgcacgccaaagaacggtttcatcccttccaccgcctgacgctgggcgtcattaaacagtgtggcagcttttgcctgcgcattcggcccttgcacggcaatcatggaaaggtcatcacgaacggtaatttcgatgccgaaaggttcagcgtgttgggtaatccaggagaggtctttttcgcgggtggcggagttaacaacgaggcggaagaaatcttcagtaaagtagtagacgatgaggtcatctatcacaccgccagaggcattcaacatccccgagtaaagggctttgccgcttttggtgagcttcgccacatcgttcgccagcagataacgcagaaactcccgggtgcggctgccgcggagatcgacgatggtcatatgtgacacatcaaacattccggcatcggtacgtaccgcatgatgttcgtcgatttgcgaaccgtaatgcagcggcatcatccagccgtggaaatccaccatgcgagcgccgcaaagcgtgtgttgttcgtacaaaggagtctgttgtgccatcttgtcctcattgaataagcggggctgacaacttttcatggtgaaattatcaccacgaaacccagcatcggagccactcccggtccccaacgcaatcgttctcttttgcctgaacttaccaccgaaacagactgttaaccataaggtaaaattgatcatcacattagcttatggttaaaaaacgccaaaatcgcgacagaataaaaaaccaaaaaacacaccagtttctatataaagatgatgccattagaaagctaatttgaataaggcaatattaagagctaaaaaaatgtcaaaaaacactaaatcaaaaaataatgacattagaaaatataatgcgaaaacggaggtgaaattagtttatttcaaatgaggaaaatctcccggcgaaaaaaccgggagatgaaagtgtgatgggtatcaaataaacagcagaagagaaatttttaacgcagccattcaggcaaatcgtttaatcccattgcctggcggataagttgtggtttaacgccaggaagcgtgtcggccagtttcaaaccaatatcacgcagcagttttttcgccggattggtaccggaaaacagatcgcggaatccctgcataccagccagcatcagcgccgcactgtgcttgcggctacgctcataccggcgcaggtaaatgtactgcccgatgtctttcccctgacgatgcaaccgtttcagttcagcaatcagctctgcagcatccataaagccgagatttactccctgccccgccagcgggtgaatggtatgcgcggcgtcgcccaccagcaccagacggtgcgcggcaaactggcgcgcataacgccccgtcagtgggaacacctgacgcgcgctctcaaccttgcataagcccaggcgattatcaaaagcgatatttaacgcgcgattaaattcatcttcacttgcctgctgcatccgctgcgcttcctctggcgacagtgaccagacaattgagcaaagatgcggatcgctaagcggtaaaaaggccagaatgccttcgccatggaaaacctgccgcgccaccgcatcatgcggttcttccgtgcgaatggtcgctaccagcgcgtgatgctgataatcccagaaagtcagcggaatatctgctttgttgcgcaaccaggaattagcaccgtccgcgccaatcaccagacgcgccgttaacatgctgccatctttcagcgtcaggaaagtttcattttctccccaggcgacctgctgtaattctgcgggggccaacagagtgatatctgacgactgctgcgctttgttccacagcgcgtagtgaatcactgagttttcaacgatatgcccaagatggctatagcccatgctttgatcgtcaaacgaaatgtgaccaaaactgtctttgtcccacacttccataccgtgataacaactggccctacgagagagaatgtcctgccagacgccaagacgggtgagtaatttttcgctggcggcattgatagccgaaacgcgcagttgtggtggtgcatccgccgccagaggttccggtacgcgctgctccagtacggcaacgcgtaagccgctcccctgtaagccgcaggcaaccgccagccccaccatgccgccaccaacaatggctacatcaacactttgcattgtttattccttaaaaccgccttcaacgcgccacccaaccgagggtgcgctgcgccagcacatcgcgtgccggggtgaataattccatcgtcatcagtccgatgttgcgcccgacaaccagcggtgcccaacggttggcaaaaagatgtaccaggctgtccgtgacgccgatggttgcttcgcgatcactctgtcgacgctgctgatagcggcacaatatgccgtaatcaccgatgtcttctccgcgctcatgcgcctgagtcagggtttccgcaaggctcatgacatctcgcataccgaggttaaacccttgcccggcaatcgggtgcagagtttgcgccgcattgcccaccagcacggtacgatgggtaatagctctggcggcgcgggttaacgccagcggataagcactgcgtttaccggcgtgggtaatttttccaagtcgccagccaaaggccgactggagttcacggcaaaacttctcgtcgctccacgacagcacctcttcgcgccgttccagtggatgacaccagaccagcgaacagcgtccgtcagacatcggcaacatcgccagcgggccatgttgcgtgaagcgttcaaaagcgcggccttcgtgcgcaacggaagtcgcaacgttggcaatcacggccagttgttcgtaaggctcctgctgccagtcaacgccgcacgcggtggctaacgctgaatgggtgccatcagctgctaccagcacgcggcccgtcagcgtctcgccactctccagcgtcacttcaacgtgactctgagtacgggcaacgttagccacgcgatcagggcaatgcagcgttacgccaggtgctttacgcagcaatgcaaacagccgttgcccgacattgtgcaattcgacaacctgtcccagcgccgccagttggtaatcttctgcggcgagggtgacaaatccagcgtgaccacgatcgctgacatgcacggtagtgatggcggttgcgtaatccgccagagattgccagacgccgatgcgcgccagttgctgacaggtccccgcagccagcgcaatagctcgtccatcaaagcccggatgagcatgtgactctggcgcggtcgcttcaatcaaatgtaccggcagcgccccgtgacttaaccgggaaatagccagcgccagcgtcgcgcccgccatgccgccaccgacgatgattacgctcattgctttctcgcagctgccatcaacgcttcgatttcttccggctttttcaccacgctggcggtgaggttttcgttgccggtttcggtaatcacaatgtcgtcttcaatacgaatgccgataccgcgatattgttctggcacatccgcatccggcgcgatatacagaccaggctctacggtcagtaccatccccggttccagaatgcgcgagcgatcctgaccataaacgccaacgtcatggacatctagccctaaccagtggctaaggccatgcataaagaaaggacgatgggcgttctgagcgatcagttcatcaacatcacctttcagaatgccgagttttaccaggccgctaaccatgatgcgcaccacttcaccagtgacttccagaatggaagttcccggacgatacaggcgcaagctggtttcgagagactccagcacaatgtcgtagatttcacgctgggcctgagtgaatttgccgttgaccgggaaggtgcgggtaatatcgccagcgtatcctttgtattcgcaacccgcgtcaatcaacaccaggtcgccgtcgcgcatttcacactcgttttcggtgtagtgcagaatgcagccgttttcaccgctgccgacaatggtgttataggacggatagcgcgcaccgtggcggttaaattcgtggtgaatttcgccttccagatggtactcgaacattcccggacggcatttttccatcgcccgggtatgtgccatggcggtgatttctcccgcgcggcggagtacggcaatctcttctggcgatttgaacaggcgcatttcatgaacaacaggacgccagtcgatcatcgttgccggtgcggtgagattttgccgcgaacctttacgcagtttttccagcgcactgttcacgatttcatcagcatatgcatattcgccctgggcatggtaaaccacatccaggccgttaagtagttgataaagttgctgattgatttcgctgaatgccagtgcgcggtcaacgcccagtttctctggcgcggcatcctgacctaaacgacggccaaaccagatctccgccgtcaggtcgcgaacgcggttaaacagaacgctgtggttatgagtgtcatcgcttttaatcagcaccagcaccgcttccggttcgttaaagccggtgaagtaccagaagtcactgttctgacgataggggtattcgctgtcggcgctacgtgttacttctggtgcagcaaaaatcagcgcggcgctgctgggttgcatttgctccaccagggcctgacggcgacgctgaaactcttgccgggatatctcactcataacactctccttacgttttttgtttttagtgtagagtcggtttttgtacttctggcgcggtcggttgcggatgagtaaaggtgtcgtggcataacagcgcggcaacacgaacgtattcgatgatctcttcaagcgacatttcaagctcttcctgatcttcgtcttcgtcgtaacccagttgcgcaatgttacgcagatcgtcgatagcttcaccggtttcgccggtcactttatccagcttcggttgcgtaacgccaagaccaagcaggaagtgattgacccaacctgccaatgcatcagcccgatcgaaaacgctgacatcatcgccatcaggcagataaagctgaaaaaggaagccgtcatcctgcagggcatcgctggtggcagagtgcattttacgcagtgcctgtgccagctcatgaccgaaagccatgccttcgttcgtcaggtcgtgaagtagcggtagccatgagctgtcatcgttaccgccacatatcatcccactgattaaaccatgcatctcagcaggggtcagacccgtcccttgttggttcagatactggttcatttcgttgtaaccaggcatttcgttctgtatagacataagcattcgtcgtcaaagggaggaatattcatgatatgctaccactttgggccctggtggaccagaaaagggcttgtctcttctcatcagggtagctatagtgtcgccccttcgcagaccatgggtctaaagacgaaggcagcgcagtcaatcagcaggaaggtggcatgtctgcacaacccgtcgatatccaaatttttggccgttcactgcgtgtgaactgcccgcctgaccaaagggatgcgttgaatcaggcagcggacgatctgaaccaacggttgcaagatctgaaagaacgcactagagtcacaaatactgaacagttggtcttcattgccgcattgaatatcagctatgagttagcgcaagaaaaagcgaagactcgtgactacgcggcaagtatggaacagcgtattcggatgctgcagcagaccatagaacaagcgttacttgaacaaggtcgcatcaccgaaaaaactaaccaaaactttgaatgacacttttcggtttactgtggtagagtaaccgtgaagacaaaatttctctgagatgttcgcaagcgggccagtcccctgagccgatatttcataccacaagaatgtggcgctccgcggttggtgagcatgctcggtccgtccgagaagccttaaaactgcgacgacacattcaccttgaaccaagggttcaagggttacagcctgcggcggcatctcggagattcccttcttatctggcaccagccatgacgcaactaccagaactcccactgacattatcccgacaagaaatccgcaaaatgattcggcaacgtcgtcgtgcgttaacgccggaacaacagcaggaaatgggtcaacaagccgctacccggatgatgacttatcccccggtggtgatggcgcatacggtcgctgtattcctctcttttgatggtgaactcgacacccagccgctaatagaacaactctggcgcgccggtaagcgcgtatatcttccagttttgcatccctttagtgccggtaatttgctgttcctgaattaccatccgcaaagcgaactggtgatgaacaggttgaagatccatgagccaaaactggatgtgcgtgacgtgctacccctttcccgattagacgtgctgatcacaccgctggtcgcctttgatgagtacggtcagcgcctgggaatgggcggtggtttttatgatcggaccttacaaaactggcagcactataaaacgcaaccggtgggttatgcgcatgattgtcagttggtggaaaaactccccgttgaagagtgggatatccctcttcctgcggtggttacaccgtcgaaagtctgggagtggtaagggcgatacacctgcatcgccctgattgacatcgttgattctttaacctaatttagtgagtaagggtaagggaggattgctcctcccctgtgactgactgttaataagctgggaaacttatgagtaacagtacaatcagtatgatggcaagtcgcatcataacccttctccttcaagccctcgcttcggtgagggctttaccgttacagccccatgctgcccagctatcgtaagctctctttaaataaccacaacgcattgatctacctttaaatcttttcttcgagcgtgctcgaaaaaccccatgcaaaacagagataatttttgggaaaaaggatctattacggcagtaaacgtgggcgatgaagtggctatcaaaaagttcggttcagggcgatgcaccccgcatcgccctgattgacatcgttgattctttgacctaatttagtgagtaagggtaagggaggatgactcctcccctgagactgactgttaataagctccgaaacttatcagtaacagtacaatcagtatgatgacaagtcgcatcataacccttctcctttaagccctcgcttcggtgagggctttaccgttacagccccatgctgtcccgccatcgtaaatccccattaaataaacacaacgcattgatctgactttgatttattttctggagcagactcgcaaagtagaatgcgcaacgcggcaacggtgtggagaagggataaaaaaacgggcaagtcagtgacctgcccgttaattttcagagaaggggaattagtacagcagacgggcgcgaatggtacccggaatagctttcattgcctgcagcgctttttcggcaacgtcttcgtcagcttcaatatcaataactacataacccatctgggcggaagtttgtagatattgcgcggcgatgttgacgccctgctcggcgaagattttgttcagcgcagttagcacgcccggacggttttcgtggatgtgcatcagacgacgaccaccatgcagtggcagcgagacttccgggaagttcaccgcagagagcgttgagccattgtcagaatacttgatcaatttacccgcaacttccaggccgatattctcctgcgcttcctgagtcgaaccgccaatgtgtggcgtcagaaggacgttgtcgaattcacacagtggagaggtaaatggatcgctattggtcgccggttccgtcgggaatacgtcgattgccgcccccgccagatgtttgctcgccagcgcatcacacagcgccggaatatccaccacagtaccgcgcgaggcattaatcagcagcgagccgggcttcattagcgaaatctctttcgcgcccatcatatttttggtggacggattctctggtacatgcagactcaccacatcgctcatattcagcaggtcagaaagatgctgtacctgagtggcgttgcccagcggcagtttgttttcaatatcataaaagtaaacatacattcccagcgattcagccagaatgcccaattgcgtaccaatatgaccgtagccgatgatacccagctttttgccgcgcgcttcaaaagaacccgccgccagtttgttccacacgccacggtgcgctttagcattggcttccggcacgccgcgcaatagcagcagcagttcgccaatcaccagctccgcaacagagcgcgtatttgagaacggtgcgttaaataccgggatcccgcgctttgccgccgcatccagatcaacctggtttgttccgatacagaaacagccaatagcgaccagtttttctgcggcgttgatcacgtcttcagtcagatgggtacgggatcgcaggccgatgaagtgggcatcgcggatggattcttttaattgttcatcatccagcgcgcctttgtgaaattcgatgttggtgtaaccagctgcacgaaggctttccagcgccttttggtgcacgccttctaccagcagaaacttaatcttgtctttctccagcgatacctttgccatttacccaatcctgtcttttgaaatgttgtgtgcggatttgcatccgcctttcaacatatcaaaaaataatattgcggcaatatgaacgtttgcgtcgcgatgttgaggaaatatcacgcaaaggtaattcttggatgaatatgctggtttagaggatttatttagagcaatcgacaattgcctggtaaaagcgtgacacatgtcaccaaatttaatgaagagaatttttttaacgggggaggttcccccgtcagatcatttcacaatggttttgacaccgtcaggtgtgccaatcagcgcaacgtccgcgccacggttagcaaacaagccaacagtcaccacgccaggaatcgcatttatggcgttttccatcgctatcgggtcaaggatttccatgccgtggacgtcgaggatcacgttgccattatcggtcaccacgccctgacggtattccggacgaccgcccagtttcaccagctgacgcgccactgcactacgtgccatcgggataacttctactggcagcgggaatttacccagaatatcaacctgcttggaagcgtctgcaatacagataaatttttctgcaaccgaagcaatgattttttcacgggtcagcgccgcgccgccgcctttgatcatttgcatgtggccgttgatttcatctgcgccatcaacgtagatgccaaggctgtcgacttcgttgagatcaaaaacgtgaatgccgaggcttttcagtttttcagtggaagcatctgaactggaaacggccccttcaatctggcctttcattgtaccgagcgcgtcaataaagtgtgcggcggtggaacctgtacctacaccaacaatggtgccgggctgaacatactgaagtgccgcccatcctactgcttttttcaattcatcctgcgtcatgatcgtttcgcctgtggtatgaaatttcacacgcattatatacaaaaaaagcgattcagaccccgttggcaagccgcgtggttaactcatccataaaatatcgcgcaatggcgggcatcccctttcgccccgcaaataaagcatacaacggtctgggtatgccgctccacggtgcgaacagaggcaataacgccacgccattcaacataaccagggcgcgaagtcgctaagcgaaatgcaatagcgcaaatccctgatcttttaagctgcgcgtttaaccattgatacaaatgttacccgccgacggctgcggtatatgcaacctgacacaaaattgtgtcatagtgcaggaaaaagcatttaccaggagcagacaacagcaatgaaacgcccggactacagaacattacaggcactggatgcggtgatacgtgaacgaggatttgagcgcgcggcacaaaagctgtgcattacacaatcagccgtctcacagcgcattaagcaactggaaaatatgttcgggcagccgctgttggtgcgtaccgttccgccgcgcccgacggaacaagggcaaaaactgctggcactgctgcgccaggtggagttgctggaagaagagtggctgggcgatgaacaaaccggttcgactccgctgctgctttcactggcggtcaacgccgacagtctggcgacgtggttgcttccggcactggctcctgtgttggctgattcgcctatccgcctcaacttgcaggtagaagatgaaacccgtactcaggaacgtctgcgccgcggcgaagtggtcggcgcggtgagtattcaacatcaggcgctgccgagttgccttgtcgataagctcggtgcgcttgactatctgttcgtcagctcaaaaccgtttgccgaaaaatatttccctaacggcgtaacgcgttcggcattattgaaagcacctgtggtcgcctttgaccatcttgacgatatgcaccaggcctttttgcagcaaaacttcgatctgcctccaggcagcgtaccctgccatatcgttaattcttcagaagcgttcgtacaacttgctcgccagggcaccacctgctgtatgatcccgcacctgcaaatcgagaaagagctggccagcggtgaactgattgacttaacgcctgggctatttcaacgacggatgctctactggcaccgctttgctcctgaaagccgcatgatgcgtaaagtcactgatgcgttactcgattatggtcacaaagtccttcgtcaggattaatccatcaaataatgcctgatagcacatatcaggcatttccctcacttctttttgtattccttgaatcacatcacaaaatagacaaatctcaggcggcaaaaaacgacgtctgaatgcattttttttgctggcgacaaacccacgtaaaaagctcaccgtaggcgcaaataccctcattttgattgcgttttacggagcaaataatgtctaacgtgcaggagtggcaacagcttgccaacaaggaattgagccgtcgggagaaaactgtcgactcgctggttcagcaaaccgcggaagggatcgccatcaagccgctgtataccgaagccgatctcgataatctggaggtgacaggtacccttcctggtttgccgccctacgttcgtggcccgcgtgccactatgtataccgcccaaccgtggaccatccgtcagtatgctggtttttcaacagcaaaagagtccaacgctttttatcgccgtaacctggccgccgggcaaaaaggtctttccgttgcgtttgaccttgccacccaccgtggctacgactccgataacccacgcgtggcgggtgacgtcggcaaagcgggcgtcgctatcgacaccgtggaagatatgaaagtcctgttcgaccagatcccgctggataaaatgtcggtttcgatgaccatgaatggcgcagtgctaccagtactggcgttttatatcgtcgccgcagaagagcaaggtgttacacctgataaactgaccggcaccattcaaaacgatattctcaaagagtacctctgccgcaacacctatatttacccgccaaaaccgtcaatgcgcattatcgccgacatcatcgcctggtgttccggcaacatgccgcgatttaataccatcagtatcagcggttaccacatgggtgaagcgggtgccaactgcgtgcagcaggtagcatttacgctcgctgatgggattgagtacatcaaagcagcaatctctgccggactgaaaattgatgacttcgctcctcgcctgtcgttcttcttcggtatcggcatggatctgtttatgaacgtcgccatgttgcgtgcggcacgttatttatggagcgaagcggtcagtggatttggcgcacaggacccgaaatcactggcgctgcgtacccactgccagacctcaggctggagcctgactgaacaggatccgtataacaacgttatccgcaccaccattgaagcactggctgcgacgctgggcggtactcagtcactgcataccaacgcctttgacgaagcgcttggtttgcctaccgatttctcagcacgcattgcccgcaacacccagatcatcatccaggaagaatcagaactctgccgcaccgtcgatccactggccggatcctattacattgagtcgctgaccgatcaaatcgtcaaacaagccagagctattatccaacagatcgacgaagccggtggcatggcgaaagcgatcgaagcaggtctgccaaaacgaatgatcgaagaggcctcagcgcgcgaacagtcgctgatcgaccagggcaagcgtgtcatcgttggtgtcaacaagtacaaactggatcacgaagacgaaaccgatgtacttgagatcgacaacgtgatggtgcgtaacgagcaaattgcttcgctggaacgcattcgcgccacccgtgatgatgccgccgtaaccgccgcgttgaacgccctgactcacgccgcacagcataacgaaaacctgctggctgccgctgttaatgccgctcgcgttcgcgccaccctgggtgaaatttccgatgcgctggaagccgctttcgaccgttatctggtgccaagccagtgtgttaccggcgtaattgcgcaaagctatcatcagtcggagaaatcggcctccgagttcgatgccattgttgcgcaaacggagcagttccttgccgacaatggtcgtcgcccgcgcattctgatcgctaagatgggccaggatggacacgatcgcggcgcgaaagtgatcgccagcgcctattccgatctcggtttcgacgtagatttaagcccgatgttctctacacctgaagagatcgcccgcctggcagtagaaaatgacgttcacgtagtgggcgcatcctcactggctgccggtcataaaacgctgatcccggaactggtcgaagcgctgaaaaaatggggacgcgaagatatctgcgtagtcgccggtggcgtcattccaccgcaggattacgccttcctgcaagagcgcggcgtggcggcgatttatggtccaggtacacctatgctcgacagcgtgcgcggcgtactgaatctgataagccagcatcatgattaatgaagccacgctggcagaaagtattcgccgcttacgtcagggtgagcgtgccacactcgcccaggccatgacgctggtggaaagccgtcacccgcgtcatcaggcactaagtacgcagctgcttgatgccattatgccgtactgcggtaacgccctgcgactgggcgttaccggcacacccggcgcggggaaaagtacctttcttgaagcctttggcatgttgttgattcgtgagggattaaaggtcgcggttattgcggtcgatcccagcagcccggtcactggcggtagcattctcggggataaaacccgcatgaatgacctggcgcgtgccgaagcggcgtttattcgcccggtaccatcctccggtcatctgggcggtgccagtcagcgagcgcgggaattaatgctgttatgcgaagcggcgggttatgacgtagtgattgtcgaaacggttggcgtcgggcagtcggaaacggaagtcgcccgcatggtggactgttttatctcgttgcaaattgccggtggcggcgatgatctgcagggcattaaaaaagggctgatggaagtggctgatctgctcgttatcaacaaagacgatggcgataaccataccaatgtcgccattgcccggcatatgtacgagagtgccctgcatattctgcgacgtaaatacgacgaatggcagccacgggttctgacttgtagcgcactggaaaaacgtggaatcgatgagatctggcacgccatcatcgacttcaaaaccgcgctaactgccagtggtcgtttacaacaagtgcggcaacaacaatcggtggaatggctgcgtaagcagaccgaagaagaagtactgaatcacctgttcgcgaatgaagatttcgatcgctattaccgccagacgcttttagcggtcaaaaacaatacgctctcaccgcgcaccggcctgcggcagctcagtgaatttatccagacgcaatattttgattaaaggaatttttatgtcttatcagtatgttaacgttgtcactatcaacaaagtggcggtcattgagtttaactatggccgcaaacttaatgccttaagtaaagtctttattgatgatcttatgcaggcattaagcgatctcaaccggccggaaattcgctgtatcattttgcgcgcgccgagtggatccaaagtcttctccgcaggccacgatattcacgaactgccgtctggcggtcgcgatccgctctcctatgatgatccattgcgtcaaatcacccgcatgatccaaaaattcccgaaaccgatcatttcgatggtggaaggtagtgtttggggtggcgcatttgaaatgatcatgagttccgatctgattatcgccgccagtacctcaaccttctcaatgacgcctgtaaacctcggcgtcccgtataacctggtcggcattcacaacctgacccgcgacgcgggcttccacattgtcaaagaactgatttttaccgcttcgccaatcaccgcccagcgcgcgttggctgtcggcatcctcaaccatgttgtggaagtggaagaactggaagatttcaccttacaaatggcgcaccacatctctgagaaagcgccgttagccattgctgttatcaaagaagagctgcgtgtactgggcgaagcgcacaccatgaactccgatgaatttgaacgtattcaggggatgcgccgcgcggtttatgacagcgaagattaccaggaagggatgaacgctttcctcgaaaaacgtaaacctaatttcgttggtcattaatccctgcgaacgaaggagtaaaaatggaaactcagtggacaaggatgaccgccaatgaagcggcagaaattatccagcataacgacatggtggcatttagcggctttaccccggcgggttcgccgaaagccctacccaccgcgattgcccgcagagctaacgaacagcatgaggccaaaaagccgtatcaaattcgccttctgacgggtgcgtcaatcagcgccgccgctgacgatgtactttctgacgccgatgctgtttcctggcgtgcgccatatcaaacatcgtccggtttacgtaaaaagatcaatcagggcgcggtgagtttcgttgacctgcatttgagcgaagtggcgcaaatggtcaattacggtttcttcggcgacattgatgttgccgtcattgaagcatcggcactggcaccggatggtcgagtctggttaaccagcgggatcggtaatgcgccgacctggctgctgcgagcgaagaaagtgatcattgaactcaataactatcacgatccgcgcgttgcagaactggcggatattgtgatccctggcgcgccaccgcggcgcaatagcgtgtcgatcttccatgcaatggatcgcgtcggtacccgctatgtgcaaatcgatccgaaaaagattgtcgccgtcgtggaaaccaacttgcccgacgccggtaatatgctggataagcaaaatcccatgtgccagcagattgccgataacgtggtcacgttcttattgcaggaaatggcgcatgggcgtattccgccggaatttctgccgctgcaaagtggcgtgggcaatatcaataatgcggtaatggcgcgtctgggggaaaacccggaaattcctccgtttatgatgtattcggaagtgctacaggaatcggtggtgcatttactggaaaccggcaaaatcagcggggccagcgcctccagcctgacaatctcggccgattccctgcgcaagatttacgacaatatggattacttttccagccgcattgtgttgcgtccgcaggagatttccaataacccggaaatcatccgtcgtctgggcgtcatcgctctgaacgtcggcctggagtttgatatttacgggcatgccaactcaacgcacgtagccggggtcgatctgatgaacggcatcggcggcagcggtgattttgaacgcaacgcgtatctgtcgatctttatggccccgtcgattgctaaagaaggcaagatctcaaccgtcgtgccaatgtgcagccatgttgatcacagcgaacacagcgtcaaagtgatcatcaccgaacaagggatcgccgatctgcgcggtctttccccgcttcaacgcgcccgcactatcattgataattgtgcacatcctatgtatcgggattatctgcatcgctatctggaaaatgcgcctggcggacatattcaccacgatcttagccacgtcttcgacttacaccgtaatttaattgcaaccggctcgatgctgggttaatgactcgtcccgtcacgatcttcagcaatatgctgaagcatcgtggcggtataacgatgatttctgattgaataaagatattcctgcatatacatcggcctgtgcggcgcatcaaaatatttcagcgttgccggattcaccagtcgccaggcaaaatgcgggatcaccgtcagaaaatgtccgcgctccacggcgctgattttggccataaaactgtagggacgataaataatggttggattgatcccacaaggtcgcatattcgcatcaatcattgcttcgaagttggcccggttctgaaagcgcatttgtagccagggcagctcctgaagcagctcttgctcttgacgctcttcataacggcgagaaacgagaaagcctaatcgcagcggtggtagttcactgatagtcaggttttccagttcctgaactcgtgcagatacatgctgtggggagataataaaatctaactggcggtcaaaaagattatcgataacgccgttttcgctgaactcaactggctgggcggtcacgccttcatacttatctccgagactaatcaactgatcgaaaataattgtcggataagtattatctatgccaatcacaatttctcgtgaacgacgtcctgagttatggatttcattatcaatcgcagaaagccgttgataaaccgggaacagtttttgatacagttcctgtccggctttattgaggctgatattattatctttgcgggtaaatagcgtatagccaatttgttcttccagcgcggcaatgcttttaccaaatggcgaagccgtcatatggattttttctgccgcccgggcaatattattggtttgcgctaataaaatgaaattgcgcatctttttcgaaataaaaatgtccatccccctcccccgcatccttgtccgcttaaccgtttcagtcagcctatccttgatgaaaccgcgagcaaagataggtgattacgtcatggttttacagaaaattacagaaaaaggaggcaatatcgggtaaaggcattagcccgacgaatacgtcgggctacaagtattattgtgctgcaggtgttttagcgggttgttgatccacaggttctaactggaagaccacatcgacctgatcatcaaactgaatagcggcctgctcgtaagtttcctgggcggacaccggcgcggcatcggctttcatcatccgcaccattgggctgggctgatagttggaaacatggtagcgcacgctatataccggccccagtttacgatgaaagccgttcgccagttcctgcgcctgatgaatcgcgttatcaatcgctgccttacgcgctttgtctttataggcatccggctgcgccacgcccagcgacacagaacgaatttcgttaagacccgccttcagcgcgccatccagcaaggaattcagtttgtctaactgacggagcgtgacttccaccgttctcacagcgcggtagcctttcaggatacttttaccatcctgataatcataatctggctgggtgcgtaagttcgctgagctgatatcttttttcgcgatctgattgagttcaaggaaggaaatgtattgtgcgacgcgctcatctgcctgtttcttggcagtagcggcatccttcgcggccacgttaacttcaatcgcaagagtggcaatgtctggcaccgcatccacgcttgccgtaccggaggtgacaatatgcggtccatccggcaattcgttagcctgcgctgccatcccgctaatacccattaatgccgccagggcgataactttgaacttcacgttagtctctccgtgttaattgacttgcccaaaattcaggacctctggaggcaagcttagcgcctctgttttatttttccatcagatagcgcctaactgaacaaggcttgtgcatgagcaataccgtctctcgccagctgcaaggctataaaccacatgacacatcccactaccagattgataatgcgctgtgattttgccgtgcgcaggcgcggtgccagccaggctgcgagaatagccagaccaaagaaccacaggaaagaggcgctaattgtcccgagcgcaaaccaacgttttggttcgacgtcaagctgcccgccaaggctgtccagtacaacaaaagtatccaggtaaacatgcggattcagccaggtcactgccaacatggtggcgataattttccatctgccttgcttcaggacttcggcactggctaactcaatattactactcatcgctgttttaaaagcgccaaaaccataccacagcaagaagactacgccgccccaggtgaccagcgccagcaaccacggcgactgcatcaataacgcgctaccaccaaaaatccccgcgcaaatcaggaccaaatcgctgatagcgcaaagtaaggcaatcataatgtggtactgacgacgaatgccctgattcatcacaaaagcattttgtgggccgagcggcagaatcatagctgccccaagagcaagaccttgaaagtaataagaaaacacgttggatattccgaattaagtatctgatgcagagactatatcgcgggattgttattagcggaaattgataatattaattagcaatcagaataactaataagagagaggccagagagtattatctggcctcagcgttgattacgcagctttgtcttctttcacccgcttaaagttcacatccatttgcgggtacgggaagctgataccggcggcatcaaattcacgtttaatacgctccagcacatcccagtacacgttttgcagatcgccgctgttgctccagacgcggaccacgaaattaatcgacgatgcaccaagttcgttcaggcgcacagtcatttcgcgatctttcaaaatgcgatcttcagactggataatattggtcaggatctgcttaacctgatcgatatcggaatcatacgccacgccaataataaattcgttacggcgaactggctcgcgggagaagttaataatatttccagcaataattttaccgttcggaataacgataattttaccgtctgcagtacgcatggtggtggagaaaatctgcacactcagcacagtaccggctacgccgccgaggtcaacatattctccggcacggaacgggcggaacatgacaagtaacacgccagcggccaggttagaaagtgacccctgcaaagccagaccaacagctaagcctgcggcaccgagtacagcaatgactgacgctgtttgtacacccacgcgtcccagggcagcgattagcgtaaaggcgataataccgtaacggactaatgcagaaagaaaatcagcaacagtggcatcgattttacgggagatcatcaggcgattcaccgcgttggaaatcatccgcgcgataatcaaaccaacgatgatgatcgcgagtgccgccacgatgtttactgcataacttagcagcagcgcctggttagctaccagccagcttcccgcgccgtttatgctatcgacaacattcaaatcttccattcaatattccttttcaactgactcaaaatggagaaatacactccgccgccttatgacgggcagtctgacaagggtaaacaataaagcataattttgccaaatagatcacagatttctcatctgaatcaccttgcttttggcgaaaaaaagacccgcagagcgggccttgagataagcagaaaggaatatcttacagaacgtcgatcgcgttcagttcctggaatgctttttccagacgagcaatcatcgaagtctgaccggcacgcagccatacgcgcggatcgtagtatttcttgttcggctgatcttcgcctttcgggttacccagctgaccctgcagataagcttcgttcgctttgtagtagttcagaacgccttcccaggttgcccattgggtatcggtatcgatgttcatttttactacgccgtagcttacggagtctttgatttcctgagcagtagaaccggaaccaccgtggaatacgaagttcaggctgttgtgcggcaggttgtgtttcttagaaacatattcctgagaatcacgcaggatggtcggagtcagaaccacgttacccggcttgtaaacaccgtgtacgttaccgaaggacgcagcgatggtgaaacgcgggctgattttgctcagctcggtgtatgcgtaatcaacgtcttccggctgggtgtacagtgcagaagcgtccatgtggctgttgtccacgccgtcttcttcaccaccggtgcaacccagttcgatttccagagtcatgccgattttggacatacgctccaggtatttagagcagatttcgatgttctcttgcagagattcttcagacaggtcgatcatgtgagaagagaacagcggcttaccggtagctgcgaagtgtttttcacccgcgtccagcagaccgtcgatccacggcagcagtttcttcgcgcagtggtcagtgtgcaggataaccggaacaccataatgttcagccatctggtgaacgtgatgcgcaccagagatcgcgcccaggatagcagcaccctgcggaacgtcagatttcacgcctttaccagcgataaaggaagcaccaccgttggagaactgaacgataaccggcgctttaactttagcagcagtttccagtacggcgttgatggagtcagtaccgacgcagtttactgctggcagtgcgaagttgttttcttttgctacctggaaaactttctgtacgtcatcaccagtgattacgccaggttttacgaaatcaaaaatcttagacatgtctcttgtcctgtatcgtcgggccttatactcatcatacttcaagttgcatgtgctgcgtctgcgttcgctcaccccagtcacttacttatgtaagctcctggggattcactctcttgtcgccttcctgcaactcgaattatttagagtatgaaaaaatgcgtgctctaaaagcgcgctgaaacaagggcaggtttccctgccctgtgattttttacttcttagcgcgctcttcgagcatcgctactgcaggcagtactttaccttccacgaattcgaggaatgcgccgccgccagtggagatgtaggagattttgtcagcaatgccgaacaggtcgattgctgccagagtgtcgccgccgccagcgatggagaacgcttcgctgtctgcgatagcgttagccacgatttcagtacctttgcggaagttcgggaattcgaacacgccaaccggaccgttccacagaatggttttcgcattcttcaggatttcagccagttcctgagcggaagcatcaccgatatccaggatctgctcgtcagctttcacatcgttaacagatttcagggtagccggtgcagtttcagagaactcggttgctacgcgaacatcagacggaaccgggatgttgcaggtggtcagcagacgtttagcttcgtcaaccaggtcagcttcgtacagggatttacccacatcgtggccttgtgccgcgataaaggtgttagcgataccaccaccaacaatcagctggtcagcgattttagacaaggagtccagaacggtcagtttggtagatactttagaaccaccaacgatagccaccatcgggcgagctggttctttcagtgctttacccagcgcgtccagttcagctgccagcagcgggcctgcgcacgcaacgtcagcgaatttaccgataccgtgagtagaagcctgcgcgcggtgagcagtaccgaatgcgtccattacgaacacgtcacacagtgcagcgtattttttggacagggtttcgtcgtctttcttctcgcctttgttgaagcgaacgttttccagaacaaccagttcaccttcagcaacgtcaacgccgtcgaggtaatctttaaccaggcgaaccgggttagacagtttgtctttcaggtagttaacaaccggcagcagagagaattcttcgttgtactcgccttcggtaggacgacccaggtgggaagttaccatcacttttgcgccttgtttcagggccagttcgatggtcggcagagaagcacggatacgcgcgtcgctggttactttcccgtcttttactggtacgttcagatccgcacggataaatacacgtttcccagcaagatccagatcggtcatcttaattacagacatggtgaatcctctcgttgattctaaaagttttgcagacgctgcttgcgtcttacctgaaagcaacagtagccatagctaacgtcgtgtcgagcattcggttagcaaagccccattcgttatcgcaccagaccaacgttttgatcaggtgtgcgccactgacccgggtttgggtgccatcgacaatggcactgtgcggatcgtggttaaaatctacagagaccaacggcaattccgtatagtcaactataccatgaaatgcaccttgtgctgctttttgcagcaacaggttgacttcattggcttttacaggtttcttcaccgtcacgcttaaatcgattgccgtcacatttatggttggcacacgtaccgcaatcgcttcaaagcgatcgttaaattgcggaaaaaatcgtgtgataccggcggccagtttagtatcgaccggaatgatcgactggctggctgcccgggtgcgacgcaggtcaggatggtatgcatcaataacctgttgatcgtgcatggcggagtgaattgtggtcacagtgccggactcaataccgtacgcatcatctaacaatttgatgacgggaattatgcaattcgtggtacaggaagcgttagaaacgatgcggtgttccgcacgaagttgatcctgattgacgccgtaaacaacggtcgcgtcgagatcgttactgccaggatgtgaaaagagcacttttttggccccggcggcaatatgcgcttcgccatgctcgcgggagccatatacgccggtgcagtcgaggactacatcaacgccaagttcacgccaggggagcgattgcagtgaacgttcatgcaatacgcggatggcgtcatcaccaacaaaaagttgatcgcgttcctgtcgtacttcccatgcaaaacggccatggctggtgtcatatttcaacaaatgcgccatgcccgcagcatccgccagttcgttgattgccaccacggtaatttccgcccggcgtccggattcatacaaagcacgaaccacattacgcccgatgcgaccgaagccatttatcgctacgcgtacggtcatagatctcctgcaaggttttccctgagcaaatttgccagacagagtaatccagcaaatcgtccggggaaaccttacctgtcgcaaactgcgactgattggttaattgtcgaacatttaatcgactgaaacgcttcagctaggataagcgaaacgtggaataaaaggaatgattgtccagtcaaagaaagcaattatctgacttacgtcacgttttcagccccgcccctgtggaatttattccactttgcagaatcacgaataagcgtagcaaaatcttttcgttgtgccgtcacaaaccctgacttatatcagaatatgactgatgcagcgtcgatattatccgcaatacgtccgagtttcggagtactccaatgatgacattgccctacccatattcttcctccgcacgcttttacgcactgcgcctcctccccgggcaggaagttttttcccagctacacgcttttgcacagcagcatcaacttcatgccgcctggattgcaggctgtaccggtagcctgactgacgtcgccttgcgctatgccgggcaagaaggcaccacgctcctgaacggtacattcgaagtgatctcactaaacggcacgctggaacagagtggtgagcatcttcatctctgcgtttccgatccacacggcacgatgcttggcggtcatatgatgcccggctgtaccgtgcggaccacgcttgaactggtgatcggtagccttgaggaactggcgtttagccgccaaccttgcgcgctttctggttacgacgagttgcatatttcccccgttaaataactactttcaaagaggttttcttatggcgcgtagccacttttccagtcaggcactggtgttgatcgttatatctatcgccatcaatatgatcggcgggcaactggccagcatggtcaaattacctatatttctcgactccatcggcacacttattagcgcggtactgcttggtccggtgatcggaatgctgaccggcttactgaccaatttactctggggattgctgaccaacccgatcgccgccgcatttgcacccgtcgcgatggtcatcggcctggtcgccggttgcctggcgcgagcgggttggtttcgcaccctgccaaaagtcgttgtcagcggcgtgattattacgcttgcggtaacggtcgtcgctgtaccgctgcgtactgcgctgttcggcggtgtcaccggtagcggagccgatttgttcgttgcctggatgcactcgatggggcaaaacctggtggagtcggtggcgattacggtgataggcgcgaacctggtcgataaaattcttacagcggtgattgtctggcttttactgcgccagctgccgattcgcaccacgcgccattttccggcaatggctgccgtgcgctaaatgcatccatttacctcattaacactgtgggcattggcggcctgcaccacgcttatcctgcccgcgcagaccattttgccaatctatagcgcggcgacctttttctgccttattgcgctaaaggccacgcggcggcgggcaaaatatgtcgtctggctgatgttctcgctgggagccgggctgtggctggtacacggtggctggctaccagaatggctaagcggcacgccacgctcgccagaacggtggtcgcatgctattacgctctggttgcggattctggcgattgtttcaacctcacagttgtggatgcagtacgtccccgtgcaatgttttattcgcgctctgtttgcttctcgcctgccgccaggcgtcgcttatctgtttgccgggccgttattggtcgttgagcagttaaaacggcaattagcgattattcatgaagcgcagcgtgcccgcggcgtgccgctggatgagggctggtatcagcgtttacgtgcgatgcccgcgttaattattccgctaacacacaatgcgcttaacgatctggctgtccgtggtgcggcgctggatatgcgggcatttcggatccacaaccgacgaacaacgttgtgggcaccagccgatagcaccctacaacgcgtagcgcgttacaccatgatcttgctgatgctgacagaattcggagcgtggatatggttacgttagaacagttccgttattgcccgacacactcaacgcatcctccgttctgttatgactttcactatgtcaaaccggggatggtcgccatctttggtgacaacggcagtggcaaaagtacgctggcacagctgatggcgggctggtatccggactttctgccaggagagataacaggcacggggacgctcctcggtacgcccattgggcatctcccgcttaatgaacaatccgccaccatccagctcgtccagcaatcgccctatttgcagctctccggctgtacctttagcgtggaagaagaagttgcctttgggccagaaaatctgtgtcttgctgaagcagagattatggcgcggattgatgccgccctgactctgaccgagtgccagccgttgcgccatcgtcacccggcaacactctccggtggagagacacagcgcgtggtcatcgcctgcgccatcgcgatgcagccaaagctcttaattcttgatgaagcctttagccgcctgactccgcaggccagcgaaatgctgttgcagcgcttacaacactgggcgtttgaacgtggttcgctgattattctttttgaacgtcatcgcacacctttcctgaactactgccagcaagcgtggcaattgcaaaacggagcgctccagccactatgttaacgttaaataagatatcttatcgctggcctggcgcggcaacggattgtctttgcgacatttctctgcaactcaaacaaggtgaatggttggcgctgaccggcgacaatggcgcgggaaaatcgacgctgttacgagtaatggcaggtcttcttacgcccacagccggtacggttatgctgcaacaacaggcgatgaaaaacctgaaaaaccgccagcgcgcggcaaaggttggcgtactgtttcaggaagcggaaaaccaactttttcacagcaccgtcgctgacgagatcgcatttggtttgaaactgcaaaaatgcccggcggatgaaatcactcaacgtacccatgctgccctgcaatgttgtcagttagcagacactgccaactcgcacccgttggatctgcatagtgcgcagcgacggatggtcgccgtcgcctgcctggaagcactctctccgccactattgctgctggacgagccgagtcgggattttgacgaaaattggttgagcgtgtttgaaagctggctggagaagtgcggccagcgaggcacgagcgtcgtagcaatcagtcatgacgccgcatttacccggcgtcatttctctcgtgtggtgcgactggaagatggtctaatcaggaacgttaatccaccagacgatattcacccgtagcggtcatcattaaggtcaaatttgcaggcagactctcttccagcccccggcgaacattcggcccgtcggtacggtcataaaaagcttctgcgtctgccagcgatacccctcccgccagcttgcgccctaccagtcgttcccgcaacgcagtagctggcgcgttgataaagatcgagaaatcacaaaattgcgcaagctggcaccacttctcgtcgtccagcaacaaccagtttccttcgacgatgacgagtggtgcggtaacgtgcaacgcatcttcaacaggatcatgcttttgtcgatcatactgcggccacgtacaatccccttccactacctggcacagattttccgccagtttcgcaacgtcaaatgtctctggtgcgcctttgaaggggcgcaattgatgcgcatccagccagctattgtaatggtgaaaaccatccatcgggagcgtctggatagcgggtaattcagggtcttgttgcgcgagatattcccagaaggtagttaaggtagatttacccgtccccggcggagcgcaaagaaaaaccaccgtacgtcgctgcggacttaccgtctgtaaggccgccagcatacgcagcaacggtttatgcacgcgttctatctcttcatcatggtactgcgcttgcacgttcagcccattcaccgttaattcaattttcacggcgttaattcctttaaggtggtcgttactgccagcgtcagcgccgttttgaccattccgctaaaacgcgcctctgaccagacggcgaaatcggcgaacttcatcgcttttaacgcgtcatagagcgtcgcattgcagcttatgctattgacgttgctgataaaatcccaggtcatgtcatcggcaaatccgggcgtttcatcctgttcgttcaggtaatgccagtactgggaaaagtgcgtgatatcggcatacagccatttatccattttccccagcgcataaatcaaacgcagcgcaacatcaatatcgtcaagcgggccgctttgggcgagtaacggcttcactgcatattcgacgatctcttcatcgttatcgacaaacagcgatggcagaaactggcgtatcccctggagcaaaatagaatgcgcagttttcataaatgaaaataaattgtcctgtgcatccagttgctcaagcacatcatcttctgtcagcgtcgccattggtcttccgatagatcaccatcaatgcagggagtctattatattacacgtttggtccgcgccgccgatcagtaatgtctgcgtccgcaccccattcgccgtctgttggataccgttcaccaactcgccgcccgtcacgcccgtagcgctaaagaggatatcgttccccctcaccagttcatcgagcgagtacacacggttaacgtcaacgcccattgccttacaacgcttgcgctcctgctctgcaatctgccgattttccgtgtaatcccctttagcctgacaaaagtcaatcagctcggcctgcatatccccacctaatgctttaacggcacaggcagaaatcacaccttctggcgcaccgccgatggtgtacatcacgtcgtaaggattatcctgccagcaggtcagcacgctggcggcgacatcgccatccggcagggcaaaaaccttcacgcccagctgtgttgcttcttcaatcgcggcactcaggcgcggtttatccagcgtaaccatgcgcagcttgtccagcggtttacctaacgcccgcgccacgttgcgcaggttgtccgccagaggcaaagacagatcaatcgccccggcagccagtcgattaacaaccagctttttcatatacatatcgggcgcatgtaacaggctatctcgaggggcgaaagccatgaccgccagcgcattgctctgccccatcgctaccatccgcgtgccttcaatcgggtcaaccgcgatatcgacttctggcccatcgcctttgcccacctcttcgccaatccacagcatcggcgcatggtcaatttctccttcgccgataaccactcgtccacgaaaagcgacgtcgtttaatgcctggcgcatcgcggtgaccgccaggccatcaattttatttttgtcgccacatccggtttgcggccaggcagccaacgctgcctgttccgtaacgcgaaataatggccacgccagggacatcattgcgcggcctccccgatatcaacgccaaattgtgccagcagatatttctcggcctgttcattccagatgccgtgcgtttcctcaaccagccgcgccaactctttaaacagcggatcggttttgcctttttcggcaaaatcggcaatggcagtgagcggcatggtcacgccgttataaatgagttttttaccgccagggatatccggcagattgagcacgatatctggcaccgcatccagcccaccgatatgcgtgaccataaaggacggctgcaactgccccgtggcgcttaacgcaatcgcctctttcatgtcgtccgttgaaccgccggatgtaccgactacgtgcgtgctgttgtaatggacgttgtagaaattaaacggcactttgaagtttttatccgtcggcccggcaaagaagttcagacagccatcttccgccagtaattcgtcagccatctcaacgacagcaggcaccgccgcataaacaaaaatgtcatcgaacccgacatctcctgtcagcgcccgcagcgtctggaccggatcgctcatccctttggtattcacatacaccagctcaatgcctttactggccgccagatccaccggcagcagcttctgcacctgcgccaggcgtttgtcgtcgatatcgaccaccaccacccgtgacggttgtatgccaccgttaatggcgtaatcgatagcgccaatgcccatcggacccgcacacgccagcagtgcaatattgccgccaggtttgacgcccatgcgatgctcataaacatattgcgtggtgtgataattggcatgataagcaccaataatgcagcacataggctctgccagcgacgccgcagcaaaataagagccgtgatacggtaatacgcagcccaaattaatggcgatttcgggaataatcatataggtggcgttaccgccaaaatattcgtagctgtagcctgctgaatatccgcttggtaaccccatcgccggttgcaatacaaaacgctggccttttttatatttgccagtgagatttttacccacttcgacaataaccccggcacattcatgcccggtaatgaccggatgattttctaaatcgtcgggtacgcgtttatgttcactaccgagtaacgccgctttccaggtcgataaacagacgctgtcagaaattacactcactaacagttcattatcggtaatttctggcagttcaaattcgcgcagacggacatcccgcttgccataaatagcagcaactttggttttcatttttacctctgtaatcagtgtttatgttcggcggttaattgattaaataaagtgtcgagttttggatcgccaatatagttattaatcaatatcagcggtttatccgtcacacgtttcacgcgcccttccagactggcgtgagtgacgacgatatcggcatccgcaggcacgttttctatcgcgtaatgttttacttctattgccagccccgctttttccaggcgtttacggaaggtggtcgcgcccatcgcactggagcccatccccgcatcgcaaacaaaggcgatacgcttaaccctgcttaacgagaatgcaccctcttgtttcatcgccttaaccgcattggctgactgagcaaactcatcttcgctctccgtttccaccgttttttccatcttcagtatcagcgaagtaatagcaaaggacaccagggtacctaccgtaacaccggcaattgtcgccaggaacgagcctttcggcgtcagtgccaggtaagcaaagatagaccccggacttgggccagccaccagaccaccgtccagtaagttaaacatccaggtaccagacataccgcccgcaatcatggcaataatagtcagcggcttcatcagcacatatgggaaatacagttcgtggatcccaccgaggaagtgaataatcatcgccccgggcgcagaacgtttactcatccctttaccaaacaaggtaaacgccagcagcagccccaggcccggacctgggttagaggccaccataaagaagatggatttaccgttaaccgaagcctgttgcattcccagcggataatagacgccctgatcgatcgcattattaaggaaaagcactttcgccggttcattgatgactgacagcagaggcagataacccgcatgtaccagcgcctcgatacactctttgacgaaagtattggcaattaacaccgccgggccgatcacttcaaaacccagcagacaaaggagcatccccgcgatacctaatgagaagttattgataaccatctcaaaaccggcaggtatgcgtttttccagtgccttatcgacatattttatgaccaacccaccgagcggccccatgatcattgagccaaggaacatcgggatctctgcgccaacgatcacaccaatagtacctattccgcccatgaccgccccgcgtttaccgccgaccagatgaccaccagtagaaccaatcatcacgggcaataaataggtaatcatcgggccgacaattttggcgaaatgttcattcggcagccaaccggtgggaataaataacgcagttatgaagccccaggcaataaaagcaccaatattggggatgaccattgcagtcaaaaagcccccaaaagcctggacctttgcacgagcagacttgttttccataatattatcctgtagaggagagagtaattatccgcggctgataatgtccgctaattgtttttctgatgatgctgttaagagttgttcgagtatttcttcttcgcacagtaattcacttaacgcctgaatagcgccaatgtgcgaatcggcatcggcagcagagagtccgatgagtaatttaattggttcgtcattccccggaaaataaacatcttgttcaagtaatgtcaaagacatcccggttttaagcgccccacattccggtcgcgcatgaggcattgccacgcctggtgcgagaatataataagggccattgttaatggtggaatctttaattgcctgaatgtaattctcgctgatatagtttttatccagcaatgataccatcgagaaatcgatagcttcctgccaatcttttgctgaatgtataactgagattgatgattccggaaaataatcactaagccgcataaattatccttattttatttttagggtaccgtcaggcggtaaaaataaaatactcgtgcggtttaatgaaagcaattgagcagggaaaccgatgttttgaaaacagtgaattattaatttcttatataacattgagttatagatataacaacaaatgtcaatacgcatatcgtgatgcatattacataattgatatttattgcatataaatatttgtgatctacaacacgctttatctattgcttgtccgcaaacggacatatcaaggtaataaaaaaggtcgccgaagcgacctttttacccgaaatgctaattacagcagttcttttgctttcgcaacaacgttatcaacagtgaagccgaactcttcaaacagcagctctgccggagcagattcaccgaaggtggtcataccgacgatagcaccgttcaggccaacatacttgtaccagtagtcagcaatacccgcttctacagcaacgcgtgcagtaaccgctttcggcagtacggattcacggtaagcagcatcctgcttgtcaaatgcgtcggtagacggcatggacaccacgcgcgctttcacgccttcggcagtcagtttttcgtaggcagcaacagccagttcaacttctgaaccggtagcgatgaaaatcagttccggctgaccggcgcagtctttcagcacataaccaccgcgcgcgatgtttgccagttgctcttcagttcgttcctgctgcgccaggttctgacgggagaggatcagtgcggtcgggccgtcctgacgctcaacaccgtatttccacgcgaccgcggattcaacctggtcacacggacgccatgtagacatgttcggggttacgcgcagagaagcgacctgctctaccggctggtgagtcgggccatcttcgcccagaccgatggagtcgtgggtgtaaaccatcacctgacgctgtttcatcagcgcagccatacgtacggcgttacgtgcgtattccacgaacatcaggaaggtggaggtgtacggcaggaaaccaccgtgcagggagataccgttagcaatcgcggtcataccgaactcgcgaacaccgtagtggatgtagttacccgcagcatcttcgttgattgctttagaaccagaccacagggtcaggttagacggtgccaggtcagcagaaccgccgaggaattccggcaacagcggaccgaaagcttcgatagcattctgagacgctttacggctggcgattttcgccgggttagcctgcagtttagcaatgaactcttttgctttcgcgtcgaagtcagacggcatttcgcctttcatacggcgggtaaattcagcggcttcctgcggataagctttcgcgtaagcagcgaatttctcgttccatgcggattctttcgcctggcctgcttctttcgcatcccactgagcatagatttcagacgggatttcgaacggtgcatatttccagcccagctgttcgcgggtcagggcaatttcagcgtcgcccagcggcgcaccgtgggagtcgtgagtaccggctttgttcggggaaccgaaaccgatgatggttttgcacatcagcagggacggtttgtcagtcactgcgcgcgcttcttctactgcgcgtttgatggatgccgcgtcatgaccgtcgatgtcgcgaataacgtgccagccgtaagcttcgaaacgcattgcggtgtcgtcggtgaaccagccttcaacgtgaccatcaatagagataccgttgtcatcgtagaacgcaatcagtttacccagcttcagcgtacccgccagagagcaaacttcgtgggagatgccttccatcatgcagccgtcgcccatgaaggcataggtgtagtggtcgacaatgtcgtggcccggacggttaaactgcgccgccagcgttttttctgcaatcgccataccgactgcgttggcaataccctgacccagcggaccggtggtggtttccacaccagcggtgtaacccacttccgggtgacccggagttttagagtgcagctgacggaagtttttcagttcttccatcggcagatcgtaaccggtgaggtgcagcaggctgtagatcagcatggagccgtggccgttggacagcacgaagcggtcacggtcagcccaggacggattctgcgggttgtgtttcaggaaatcacgccacaggacttcggcaatgtcagccatacccataggggcacccgggtgaccggatttggctttctgtactgcgtccatgctcagcgcacgaatagcattggcaagctctttacgtgaggacattttgactccagatcggatgatgaagggcacgcccttaacgacttgacgacagcgcgttttgggctacgccggaaaatttgccaacaatttaccgcaagccgcgcgtcatgtacatggaacatccttttgccgcttcagaaatctctggatcatgctcgcatgttgcgcaatctactcgcccgtccgctgcgcttttccttatactgagactgagcgtcgattcacctgcaaacggcgcatttttagaataatcctgaccttgtgcggaagagaaaacatgaaaattcgcgccttattggtagcaatgagcgtggcaacggtactgaccggttgccagaatatggactccaacggactgctttcatcaggagcggaagcttttcaggcttacagtttgagtgatgcgcaggtgaaagccctgagcgatcaggcatgtcaggagatggacagcaaggcgacgattgcgccagccaatagcgaatacgctaaacgtctgacaactattgccaatgcgctaggcaacaatatcaacggtcagccggtgaattacaaagtgtatatggcgaaggatgtgaacgcctttgcaatggctaacggctgtatccgcgtctatagcgggctgatggatatgatgacggataacgaagtcgaagcggtgatcggtcacgagatggggcacgtggcgttaggccatgtgaagaaagggatgcaggtggcgcttggtacaaatgccgtgcgagtagctgcggcctctgcgggcgggattgtcggcagtttatctcaatcacaacttggtgatctgggcgagaaattagtcaattcgcaattctcccagcgccaggaagcagaagccgatgattattcttacgatcttctgcgccaacgcggcatcagcccggcaggtcttgccaccagctttgaaaaactggcgaaactggaagaaggccgccaaagctcaatgtttgacgaccatcctgcatccgccgaacgcgcccagcatattcgcgatcgcatgagcgcggatgggattaagtaaagcctggtggtgtcgaacgtaggtcagataaggcgttcacgccgcatctgacatgaatggcacatttgttaccttgtgcgcattgccggatgcgatgctggcgcatcttatccggcctacgggtgccgaacgtaggtcggataaggcgttcacgccgcatccgacattaatggcacgttttacccgtgcgcatcgcatctggtgcttactcgccctttttcgccgcctgaatatacagcatctccagcgccagcgtcgccgcagccagagcggtgatttccgactgatcgtatgccggagccacttccactacgtccatcccaacgatgttgagatctttcaggccgcgtaccagtttaatggcgcgatcggaggtcagaccgccaattaccggcgtaccggttcccggcgcaaatgcaggatccaggcagtcgatatcaaaggtcaggtaaaccggcatatcacccacaatttgtttcacctgggcgataacgtcatccacgctgcgatcgttcacctggcaggcgtccagcacggtaaagccgttgtctttatcaaattcggtacgaataccaatctgcacggaatgattcggatcgatcagaccttctttcggcgcggtatagaacatggtgccgtggtcaaattcacaaccgttcgcgtaggtatcggtgtgggcgtcaaagtgtaccagcgccattttgccgaaatgcttcgcatgagcacgcagcagcggcagcgtaacaaagtggtcaccaccgaaggagagcatacgcttaccggcagccagcagcttctcggcgtgcgcctgcagcttctcgctcatctcacgggcatcgccgaaagcatataccagatcaccgcagtccacgacgttcagacgctcacgcatgtcgaaattccacgggaagcggttgtgttcccaggccagattcgtcgaaacctgacggatagctgccggaccgtggcgtccccccgcacgaccagaagtggccatatcgaacggcacaccagtaatcacccagtcagcatcgctgtcatacggctggaagttcatcggcaggcgtaaaaaaccaaaggcattggaaaccagtgagttatcgtattgatgacctaaggtgctcatggatggactcctattacaaagtcgatataaaaaaacccttccgcgtcgttaggcccgacgaggaagggttggatttgcgaaacacaagtttgtgctaattatcgccttaaatgggcgaggcatcaagcgaggttgctatttccgacacggtggcggcgcatagccattgttatctgccggaaaggcttgtccagagcacggcggcagcgcgttttgcgcctggccttgtaattcaaaggcggcaaagcctattacaccggtattacgcacatcgccttgcgccgaattggctgcgtaggaatcagcaacgttggcgaactgaaaagccgcttcggtatgtttatctttgcggaatcctttaatcgctaaagaatctccggcattcacaatatagccgttgttattcagcgaaccttgcttgccgttcagcacatccaggccatcaacagtagcaacgatctcgtagttggtgttacgactgtaattacggacatataattgataattcattccgactctggcatggacaatatagcgtggttcattattggatgaatcataaacacgcgtaataggtagagaattaaaattaccatcgcgaatagcatattccagttcgttaatacgaatgctataaacgcggtcatagccggaaggaacattagtcgaataactaataacgatcatctctgccggatcgcgccaggctcgctcagcagatacgccctgaaccgatgagtgcacatccccaccccaggcagtgccgacattgcccgatgcactgctattatactgcgcattactggaacaaccggccagcagcacgattaatgccaccaacgcgctacgtactttccattttttcataaccgttccctctgcatttaattaatgcagcgattgtagggagattatttaataagaaaagcagcgagattatttttaagaatatataaaaagaaagcgggccgatttacgtaaataaatcgacccgccagcggaataatcttaattattcatcttcaagataggtataaccgtacaaacctgcctcgaactcttcaaggaactgttgttgcagttcagcatcaagatcggttttcttcacttgatcgcggaactgggttaacagcgttttcggatcgagctgtacatattgcagcatgtccgccacggtatcgccttcgtcagacagttctacttctacgctaccgtcagggaacacgaacacgtcaaccgcttcggtatcaccgaacaggttgtgcatattgccaaggatctcctgatatgcgccgaccataaagaaaccgagcatcggcggattctctggatcgtactccggcattggcattgtcgtggcaataccatcaccatcaatatagtggtcgatagcaccgtcagagtcacaggtaatatccagcagcactgcgcgacgttccggcacttgatccagcccttccagcggcagaaccgggaacaactggtcgatcccccatgcatccggcattgactggaacagcgagaaattgacgtacattttgtccgccatacgttcctgcagttcgtcgattatcggacgatgcgcacggttttgcggatccagctgcttttgcacttcatggcacatgctcagatagagttgttctgcccatgcacgttcttgcaggctaaaggtgccggaagagtagccgatatgaatatcgtgcaaatccatctggctgtcgtgcaaccattcacgcagagaacggcgagttcctggttcgtgcatctcctgccaggtttcccacatgctttgcagtgcgcgcggcgcatcttctgcgggcgcggtcggcaccgtatattcgttacgttccacgccgatgatattcgacaccagcacggtatggtgcgcagtcaccgcacggcccgattcggtgattaccgtcggatgcggcagaccattttcttcacacgcatcaccaattgcccagatgatgttgttggcatattcattaaggccgtagtttaccgaacagtcggactgcgaacgagtaccttcataatccacgcccagaccgccgccgacgtcgaagcactgaatattgacgcccagcttgtgcagttccacatagaaacgcgccgattcacgaacgcccgtggcgatatcgcgaatattcgccatctgcgaaccgaggtggaagtgcagtagttgcaggctgtcgagacgcccggcttcacgcagggtttcaaccagttgcagtacctgagtcgcagccaggccgaacttcgatttttccccgccggaggactgccatttacccgagccctgcgaagccagacgtgcacgcacgcccagacgaggaacgacattcagacgttctgcttcatccagcacaatggcgatttctgacatcttctcaatgaccagatagaccttgtggcccatcttctcgccaattaatgccaggcggatatattcgcggtctttataaccgttgcagacgatgacgctacgggtcatgccagcatgtgccagcactgccatcaactcggctttggaaccggcttccagacccagcggttcgcccgaatgaatcagggactcaatcacgcgacggtgctggttaactttgatcggataaacaaggaagtaatcgccgttatagccgtaggattcccgcgcacgtttgaacgcggcgttaatggaacgcaaacggtgctgcaggatctgtgggaaacagaacagtgcaggcagacgctggccctgtgcttcacgagttttcactaactgcgcgagatcgacgcgagcttccgggacgtccgggtccgggcacacgctgatgtggcccagctcgttaacgtcatagtagttattgccccaccaggcaatattgtaagtacgcagcatcttgctggcttcctgggagctcattgcaacctcctgcatggagcgtagtacaccgtgttcgcccgctgacgaaggcaaacccatagacatgtcgtcagacatagcgaacctcaaattattttattaagtgtaaaacagttaacgactatcgcagcctggaactgcgataacaacccataagcacatggattttccagcagtgaatgctgacgctccaactgcgcaaccggtttctttttcataacattattaagcacataaccgaacgtaagtgtgacagttcggcgaaaccacgagaaaactcttgtttttacaagagcgcccttgttcagtcctcagtaactgtaaccagctcttgaatcctgagaagcgccgagatgggtataacatcggcaggtatgcaaagcagagatgcagagtgcggggaacgaatcttcaccagaacggtgagacaggttaagcagcagacaacggttcattatttcgtatcacctccacggccgcctgttaagacgaacccacaagccaaaactctgatttcaacccggctggaagtggcaacacgaaagaaacgtcgtgtgctttttatttaagccgcgcgccgcgttttataccccacaatggcagaaaattgcaaaagataaatacgcagaatgccggcattgtcaggaaaaatttccagccacgtttttaacagaatgagacacgattcaaaaaaaagtggaaatcgggtgaagaattgacctaaaatagccatccagatgttaatccatccataccgattaacactcagactgccagtgtttttaacctgcagagtcgtggtaggatccgctaccacagaaaatccacacaacagtttgagctaaccaaattctctttaggtgatattaaatatggcaaaacacctttttacgtccgagtccgtctctgaagggcatcctgacaaaattgctgaccaaatctctgatgccgttttagacgcgatcctcgaacaggatccgaaagcacgcgttgcttgcgaaacctacgtaaaaaccggcatggttttagttggcggcgaaatcaccaccagcgcctgggtagacatcgaagagatcacccgtaacaccgttcgcgaaattggctatgtgcattccgacatgggctttgacgctaactcctgtgcggttctgagcgctatcggcaaacagtctcctgacatcaaccagggcgttgaccgtgccgatccgctggaacagggcgcgggtgaccagggtctgatgtttggctacgcaactaatgaaaccgacgtgctgatgccagcacctatcacctatgcacaccgtctggtacagcgtcaggctgaagtgcgtaaaaacggcactctgccgtggctgcgcccggacgcgaaaagccaggtgactttccagtatgacgacggcaaaatcgttggtatcgatgctgtcgtgctttccactcagcactctgaagagatcgaccagaaatcgctgcaagaagcggtaatggaagagatcatcaagccgattctgcccgctgaatggctgacttctgccaccaaattcttcatcaacccgaccggtcgttttgttatcggtggcccgatgggtgactgcggtctgactggtcgtaaaattatcgttgatacctacggcggcatggcacgtcacggtggcggagcattctctggtaaagatccatcaaaagtggaccgttccgctgcgtacgcagcacgttatgttgcaaaaaacatcgttgctgctggcctggccgatcgttgtgaaattcaggtttcctacgcaatcggcgtggctgaaccgacctccatcatggtagaaactttcggtaccgagaaagtgccttctgaacaactgactctgctggtacgtgagttcttcgacctgcgcccatacggtctgattcagatgctggatctgctgcacccgatctacaaagaaaccgcagcatacggtcactttggtcgtgaacatttcccgtgggaaaaaaccgacaaagcgcagctgctgcgcgatgctgccggtctgaagtaatctttcttcacctgctttcaaaggccagcctcgcgctggcctttttcttttacctcaccgcggtggataggcattcacgccgcatccggcaaaaagctgcccgcacaataacatcattcttcctcaacacgttttatcgcaaattatcatcactactgaaaccgattacaccaataacaccagccaaatatttgtaatattttcatattattattcagttttcacagttgttacatttcttttcagtaaagtcttaattgcagataacagcgtttaatctatgatgatataactcaattattttcatgcacttaaaccataactaagataaatgttagtgtaagcgattacactgatgtgatttgcttcacatctttttacgtcgtactcacctatcttaattcacaataaaaaataaccatattggagggcatcatgcctgacgctaaaaaacaggggcggtcaaacaaggcaatgacttttttcgtctgcttccttgccgctctggcgggattactctttggcctggatatcggtgtaattgctggcgcactgccgtttattgcagatgaattccagattacttcgcacacgcaagaatgggtcgtaagctccatgatgttcggtgcggcagtcggtgcggtgggcagcggctggctctcctttaaactcgggcgcaaaaagagcctgatgatcggcgcaattttgtttgttgccggttcgctgttctctgcggctgcgccaaacgttgaagtactgattctttcccgcgttctgctggggctggcggtgggtgtggcctcttataccgcaccactgtacctgtcagaaattgcgccggaaaaaattcgcggcagtatgatctcgatgtatcagttgatgatcactatcgggatcctcggtgcttatctttctgataccgccttcagctacaccggtgcatggcgctggatgctgggtgtgattatcatcccggcaattttgctgctgattggtgtcttcttcctgccagacagcccacgttggtttgccgccaaacgccgttttgttgatgccgaacgcgtgctgctacgcctgcgtgacaccagcgcggaagcgaaacgcgaactggatgaaatccgtgaaagtttgcaggttaaacagagtggctgggcgctgtttaaagagaacagcaacttccgccgcgcggtgttccttggcgtactgttgcaggtaatgcagcaattcaccgggatgaacgtcatcatgtattacgcgccgaaaatcttcgaactggcgggttataccaacactaccgagcaaatgtgggggaccgtgattgtcggcctgaccaacgtacttgccacctttatcgcaatcggccttgttgaccgctggggacgtaaaccaacgctaacgctgggcttcctggtgatggctgctggcatgggcgtactcggtacaatgatgcatatcggtattcactctccgtcagcgcagtatttcgccatcgccatgctgctgatgtttattgtcggttttgccatgagtgccggtccgctgatttgggtactgtgctccgaaattcagccgctgaaaggccgcgattttggcatcacctgctccaccgccaccaactggattgccaacatgatcgttggcgcaacgttcctgaccatgctcaacacgctgggtaacgccaacaccttctgggtgtatgcggctctgaacgtactgtttatcctgctgacattgtggctggtaccggaaaccaaacacgtttcgctggaacatattgaacgtaatctgatgaaaggtcgtaaactgcgcgaaatcggcgctcacgattaatctcctcaggcttcctcccatcgcggaggaagccacctcttgcagtcatcttttcttcgctctatcctctgccgctatgaaaacatcccgtctccctatcgccatccagcaggccgttatgcgccgcctgcgggaaaaactcgcccaggccaacctgaagctagggcgtaactacccggagccaaaactctcttacacccagcgcggaacctccgccggaacagcctggctggaaagctatgaaatccgcctcaatcccgttttgctgttggaaaacagtgaagcttttattgaagaagtggtaccgcacgaactggcacatttgctggtatggaaacatttcggccgcgtagcgccacatggcaaagagtggaagtggatgatggaaagcgtgctgggcgttcccgcccgtcgtacgcatcagttcgaactgcaatccgtgcgtcgcaacaccttcccctaccgctgcaagtgccaggagcatcagcttaccgtacgccgccataatcgcgtagttcgtggcgaggccgtctatcgctgtgttcactgcggtgaacagctggttgcgaaataaccatctgaactatcaggaactttcctgatctggctgattgcataccaaaacaactttcgctacgttgctggctcgttttaacacggagtaagtgatgtaccgttatttgtctattgctgcggtggtactgagcgcagcattttccggcccggcgttggccgaaggtatcaatagtttttctcaggcgaaagccgcggcggtaaaagtccacgctgacgcgcccggtacgttttattgcggatgtaaaattaactggcagggcaaaaaaggcgttgttgatctgcaatcgtgcggctatcaggtgcgcaaaaatgaaaaccgagccagccgcgtagagtgggaacacgtcgttcccgcctggcagttcggtcaccagcgccagtgctggcaggacggtggacgtaaaaactgcgctaaagatccggtctatcgcaagatggaaagcgatatgcataacctgcagccgtcagtcggtgaggtgaatggcgatcgcggcaactttatgtacagccagtggaatggcggcgaaggccagtacggtcaatgcgccatgaaggtcgatttcaaagaaaaagctgccgaaccaccagcgcgtgcacgcggtgccattgcgcgcacctacttctatatgcgcgaccaatacaacctgacactctctcgccagcaaacgcagctgttcaacgcatggaacaagatgtatccggttaccgactgggagtgcgagcgcgatgaacgcatcgcgaaggtgcaaggcaatcataacccgtatgtgcaacgcgcttgccaggcgcgaaagagctaacctacactagcgggactctttttgttaacccctaccccacgcgtacaaccgcgtggggagacgacgcggatttttaactatgcgtatcccccgcatttatcatcctgaaccactgaccagccattctcacatcgcgctttgcgaagatgccgccaaccatatcgggcgcgtactgcgcatggggccggggcaggcgttgcaattgtttgacggtagcaaccaggtctttgacgccgaaattaccagcgccagcaaaaaaagcgtggaagtgaaggtgctggaaggcaagatcgacgatcgcgaatctccgctgcatattcacctcggtcaggtgatgtcgcgtggtgaaaaaatggaatttacgatccagaaatcgatcgaactcggtgtaagcctcattacgccacttttttctgagcgctgcggcgttaaactggatagtgaacgtctgaacaagaagctccagcagtggcagaagattgcaattgctgcctgtgagcagtgtggtcgtaaccgggtgccggaaatccgcccagcgatggatctggaagcctggtgtgcagagcaggatgaaggactgaaactgaatcttcacccgcgcgccagtaacagcatcaatacgttgccgttaccggttgaacgcgtccgcctgctgattggcccggaaggcggtttatcggcagatgaaattgccatgactgcccgctatcaatttactgatatcctgttgggacctcgcgttttgcgtacagagacaactgcgctcaccgccattaccgcgctacaagtacgatttggcgatttgggctaacggagaagaataatgatcaagctcggcatcgtgatggaccccatcgcaaacatcaacatcaagaaagattccagtttcgctatgttgctggaagcacagcgtcgtggttacgaacttcactatatggagatgggcgatctgtatctgatcaatggcgaagcccgcgcccatacccgcacgctgaacgtgaagcagaactacgaagagtggttttcattcgtcggtgaacaggatctgccgctggccgatctcgatgtgatcctgatgcgtaaagacccgccgtttgataccgagtttatctacgcgacctatattctggaacgtgccgaagagaaagggacgctgatcgttaacaagccgcagagcctgcgcgactgtaacgagaaactgtttaccgcctggttctctgacttaacgccagaaacgctggttacgcgcaataaagcgcagctaaaagcgttctgggagaaacacagcgacatcattcttaagccgctggacggtatgggcggcgcgtcgattttccgcgtgaaagaaggcgatccaaacctcggcgtgattgccgaaaccctgactgagcatggcactcgctactgcatggcgcaaaattacctgccagccattaaagatggcgacaaacgcgtgctggtggtggatggcgagccggtaccgtactgcctggcgcgtattccgcaggggggcgaaacccgtggcaatctggctgccggtggacgcggtgaacctcgtccgctgacggaaagtgactggaaaatcgcccgtcagatcgggccgacgctgaaagaaaaagggctgatttttgttggtctggatatcatcggcgaccgtctgactgaaattaacgtcaccagcccaacctgtattcgtgagattgaagcagagtttccggtgtcgatcaccggaatgttaatggatgccatcgaagcacgtttacagcagcagtaacccaccttagcgagaaggatctcgttgagactctgagtgacagcgcccttctttccacgcatactgggcgctgttgcttttttgaaccaggaaacagaacctctgacaatgaatttacagcatcactttcttattgccatgcctgctctccaggatccgattttccgtcgttccgtggtctacatttgcgaacataataccaatggtgcaatggggatcatcgtcaacaagccgctggaaaatctcaaaattgaagggattctggaaaagctgaagatcacgccggagccgcgtgatgaatcaatccgtctggataaaccggttatgctcggcggtccgctggctgaagatcgcgggtttattttgcatactccgccctccaattttgcttccagcattcgcatttcagacaacacagtgatgaccacttcccgcgatgtgctggaaacgctcggcaccgataaacaaccgtctgacgtattggtggctctgggttatgcctcctgggaaaaaggtcaactggaacaagaaattctcgataacgcgtggctaacggccccggcggatctgaatattctgttcaaaacgccgattgccgaccgctggcgcgaggcggcaaaactgattggtgtggatattctcaccatgcctggtgtggcagggcacgcctgatgagtggaaccttactcgccttcgacttcggcaccaaaagcattggcgtagcggtcggccaacgcattaccggcactgctcgccctttgcctgcaattaaagcacaggacggtacgccggactggaacctcatcgaacgtttactgaaagagtggcagccggacgaaatcatcgtcggtttgccgctgaatatggacggcaccgagcaaccattgactgccagagcgcgtaaatttgccaaccgtattcatggtcgtttcggtgttgaagtaaagctccatgacgaacgtcttagcaccgtggaagcccgttccggtctgtttgaacagggcggctatcgggcgctcaacaaaggcaaagtcgactctgcctctgcggttattattctcgaaagctatttcgagcagggatattaaggcgatctaaaagcctggcggatagtcgttaccgccatcttgccggatgcggcgtgaacgccttatccagcacacatctggcagcggctgtaggtctgataagacgcgttagcgtcgcatcagacatttattgcctttataggccctataaacttgcgcatcgggcatggcaacgtcacaaacgcccttcccccacccgctgctgataactctgctgaaacgttaacatccccacctgctgcccggtttgaataacatgcggtaactggtgggttttcccttcgcgaatcaaattccccaccgcgggagtgttaatcaataattcaaacagcgccacgcgtccttcctgtttatccacttccagcttttgtgacaacacggcccgtaaactacctgccagttgattacgtacgggatctttttcctgcgccggaaatgaatccaccagtcgctcaactgcctgcgcggcaccacgcgtatgtaatgttgccagcaccaaatgcccggtttctgccgccgtcagtgccagacggattgtctcgctgtcacgcagctctccgagcaaaatcacatcaggatcttcccgcaatgcggcccgcaatcccgatgcgaacgtcatacagtgcaaaccaatttcccgctgctggatcaaacatcgctggctggcatagatatattcaacaggatcttccagcgtcagaatatgcgcatcggcatgttgattgagatagccaaccatcgccgccagcgtggtagatttgccgctccccgtcgcccccgtcaccagaatcaggccattctcgctcttgagtaattccggcaataccgttggtgcgccaagctgttcgagctgtggacagtgcgaaggtaacaaccgtaatgccagagaaataccttgccgttgcgcgaacgcactgccacgcaaccgctggttttccgccagcgacacggcaaaatccagctggccattttccagcaatattgcccgctgatcgtcatccagccactcccgcagtagctcttcgacgtccggcgcatcaaacggcgcagcttccattagcccgcgaatgcgccatcgtgcgggccaggcgctgcacaggtgtagatccgagacgttatgctttacactaagggccacaatttcttccatattcatactaagatcctcggaaaatgaacgatattgcgcataacctggcacaggtccgggacaaaatctcagcggctgcaacgcgttgcggccgttctccagaagaaattacgctgcttgcagtcagtaaaacaaaacctgcgagcgccatcgcagaagccattgatgccgggcagcgtcaatttggtgaaaactacgttcaggaaggggtagataaaattcgccactttcaggaactgggcgtaacaggattagaatggcattttattggcccgttgcagtctaataaaagccgcctggtggcagagcatttcgactggtgtcataccatcgaccgtttgcgcattgctacccgcctcaacgatcagcgcccggcagaacttccccctcttaacgtactgattcaaattaatattagtgatgaaaacagtaagtccgggattcaactggcagaactggacgagctggcagcggcggtcgctgaactaccgcgtttacgtctgcgcgggctgatggcaatccctgcgcctgagtcagaatatgtaaggcagtttgaagttgcacgccaaatggctgtagcatttgccggactgaaaacgcgctacccgcatatcgacacgctctctctgggaatgtcggacgatatggaagccgccattgcggcaggtagcacgatggttcgtatcggcactgcaatttttggtgcgcgtgattactctaaaaaataaggaattaaaggaacgccatgaatacgttgactttcctgctttcaacggtcattgagctgtataccatggtgctgttattacgcatctggatgcagtgggctcattgtgatttttacaaccccttctcacagtttgtagtgaaggtaacgcagccaattatcgggccactgcgccgcgttattccggcaatgggtcccattgatagcgcctcgctgctggttgcgtacattctcagttttatcaaagccatcgtgctgtttaaagtggtgaccttcctgccaatcatctggattgccggtttactgattctgctgaaaaccatcggcctgctgattttctgggtcctgctggtgatggcgattatgagctgggtaagccagggtcgtagtccgattgaatacgtgctgattcagctggccgatccgctgctgcgcccgattcgccgcctgctaccggcaatgggtgggattgatttctcgccgatgatcctcgttctgctgctgtatgtcatcaatatgggtgtcgcagaagtattacaggcaaccggaaacatgctgctgccggggctgtggatggcgttatgagtgccgtaacagttaatgatgacggtctggttttacggctctatattcagccgaaagccagccgtgattctattgtcggtttacatggcgacgaagttaaagtcgccattaccgcgccgccggttgacggccaggccaacagccatctggtgaagtttctcggtaagcaattccgggtagccaaaagccaggtggtaattgaaaaaggcgaacttggccgccacaaacaaattaaaatcattaatccgcaacaaatcccgccagaaatcgcggcgttaattaattaggtatcctatgcaaaaagttgtcctcgcaaccggcaatgccggtaaagtgcgtgagctggcgtcgctgcttagcgacttcggtcttgatatcgtggcccaaacagacctcggcgtagattccgctgaagaaaccggcctgacctttatcgaaaacgcgattctgaaagcgcgccatgcggcaaaagtgaccggtttaccggcaattgccgacgactctggtctggcggtagatgcgctgggtggcgcgccgggtatttactccgcgcgttattccggtgaagacgcgaccgatcaaaagaatctgcaaaaactgttggaaacactgaaagacgtaccggacgaccaacgtcaggcgcgtttccactgcgtgctggtatatctgcgtcacgcggaagatccgactccgctggtgtgccacggtagctggccgggcgtgattactcgtgaaccagcgggcactggtggctttggttatgatccaatcttcttcgtaccttccgaagggaaaaccgctgccgaactgacccgcgaagaaaagagcgccatttcccaccgtggtcaggcattgaaactgctgttggacgctttacgtaatggttaaattaccgccgctgagtctctacattcacatcccgtggtgcgtgcagaaatgcccgtactgcgatttcaactctcacgcgttgaaaggagaagtgccgcacgacgattacgttcagcatctgctttgcgatctggacaacgatgtggcttacgctcagggccgtgaagtaaagacaatctttattggcggtggtacgccgagcctgctttccggcccggcgatgcaaacgctgctggacggcgtgcgtgcgcgtttgccgctggcagcggatgcagaaattactatggaagcgaaccctggtacggtagaagccgatcgctttgtcgattatcagcgtgctggtgtgaaccgcatctctattggtgtgcagagttttagcgaagacaagctgaaacgacttgggcgtattcatggcccgcaagaagcgaaacgcgcggcaaagctggcgagcgggctggggctgcgtagctttaacctcgatttgatgcatggattaccggatcaatcactggaagaggcgcttggcgatctacgccaggccattgaactgaatccgccgcatctttcctggtatcaactgaccatcgaacctaatacgctgtttggttcacgcccgccggtactgccggacgacgacgcgctgtgggatatattcgaacaggggcatcagttattaaccgcagcgggttatcagcaatatgaaacttccgcttacgccaaacccagttatcagtgccagcacaatctcaactactggcgctttggcgactacatcggtattggctgcggcgcgcacggcaaagtgaccttcccggatgggcgcattctgcgtaccaccaaaacgcgtcatccgcgtggttttatgcagggaaggtatctggaaagccagcgtgatgtcgaagctgcagataagccgtttgagttctttatgaaccgctttcgcttgctggaggccgcgccacgcgcagagtttagtgcgtataccgggctttgcgaagatgtgattcgcccacagttagacgaggcaattgcccagggttatctcaccgaatgtgcggattactggcagattacggaacatgggaagctgtttttaaattcgctgctggagctttttctggctgagtaaacttgtattaccggatgcggcgtgaacgccttatccagcctacatgtggcaacggttgtaggtctgataagacgcgcaagcgtcgcatcagacgttgattgccggatgcggggtcaacgccgcatcctgctacaaatcgtgcactatatcaaacttacttaatcaccccattgcgccgcagttgttcggtatcttttttccagcgttcattagcttggttgatatcgtcaattttcatcaaaatcgcgacttttttactgtttatttctgaaactttcatcgttaacggatattgccctttttcgagcgttacccagtcatcctgcaatttacggctgagtttttgtgattgcagaaaagtctgtcgccgttgttcgttgatatcgaaatctcgtttctgctgaatcggcacttcataacactcttcactctgtttatgacatgccgcaatcgccggttgataaacctctttgtcatatttaaccgcgaacgcctcgctatcgttctgtttattaaactcatcacgctgttggtgaatttttttaaaggcgtcttcgcgggtcatttgcttaccgtttgcatcttttccccaatatgcatccgctgctttctgcgccgccaccatttgcttatcaagcgctttcacttccttttccagcgcaggaatcgagttcttctgggtattcaacgcagattcaagctgactaaagcgataattgaaatcttcgctattcacgatcagatatttattattcgttttgatatcgtcgaccacccgcccacgatcgctggctgccgcctgaaaagagtaaaagttcaccgaccagccagacgcgggcgttcctttactggttaacatcgccgagaattttaccggtttatctttcgtccaggtctgttcgagcagttcgtaatctgccaactgaccgacccaggtatagagatcgtcactggaagagacatcgccttccgctgaccaggtggcctgattacccttagcatcaagattttttaaggtgatagcatcaagcttgagaatgccgtgatactgctttttgaattgatcttttaagatattttcagttggtggttcgccatctgcccagacattacctgtcatcaacataagcagcgccgtgccaacaatccattgctttttcacccgaaaaccctcgcgcggaataatttattccggtgattatcattagggtaattaaaattggcaatggacgtgagtctgaagtgaaaaagccccggcacgataccggggcgaggcgattagtactgattgaagatctgctggatctgctgcggatctttggtttgcgtcagagccagttgcagcagaacgcgcgctttttgcgggttcagcgtgccagaggcgacgaagccgtatttcgcatcatccacttcagcatcctgagtggtagcacccgtcggtacgcgggaagaacgcactactgcagtgccgtttttcgcggcggttgccagggtgtcgaacacggatttatacaggttaccattacccacaccagcgctaacgatgccatcatagcccgcatctaccagtgctttagccggaagatcggatgcgttagcgtagttataaacgatgccgactttcggcagctcattcagcttagagacatcgaatggcgtatcgctggtgtgcttacgtgccggggtacgttggtagtcaatcttaccgttgtgaatgtatcccagaggaccgtagttaacagacttgaaggtcgctacgtcggtggtgttggttttggtgacatcgcgaccgtccagtacggtgtcgttcatcaccaccagcacgccacgattagcggaggctttatcagctgcggtcactaccgcgttatacaggttgaatggaccgtctgcgctcatagacgtggacggacgcattgcgccgaccatcaccaccggtttgtcgcatttcaccgtcaggtcgaggaagtaagcagtttcttccatcgtgtcggtaccgtgggtaatgacgaagccgtcggtcttatcgcagtcggtgttaatttttttcgccagtgtcagccagacattatcgttcatgtcctgggagccgatattcactacctgctcgcctttaacgttcgcaatgtccttcagttgcggcaccgcattaaccagattttctacgccaactttacccgctgtgtagttagatttggttgcggagtcaccaccaccggcaatggtcccgccggttgctaaaatggtgatattgggtaatgccaatgctgcaccactaaaacccataaccagtgcggcaagtgccgtctttttgaaaaactccatttcattcctccagttacgtgaacgctacgcattatcccttagctttgtatgggaaatttgacgttaaacaatttacaacgtgaatatattttggagatctacaaagttagaggcaggtaacaaaacgaagaattaaacggcataaaaaagtattatgccgtcttaaaatagaggattattttaaattcccgaccagggctttgcggctatcttccagagtcacaacacggctacaaacatctttgccaaactgctggaaatctttttcctgctttttccactcggtttggattgaggattgcagcccccccaggcttcccagcacattctgtaatgggttaccgccgcttttcagcaccgctttcgcgcccatttcattaatgctgtcctgtaaaattccgcccattgcctgattcactaattgctggccttcggcgcgaacctgatcaatggctttatagtgaaacgtcaggccatcgctgcgcgtttcgataatgcggttcatctgctctttcagctgcgcatcaagtttggtcagacggctgcgcattttgctgctttcgcccatctcctgaacgataattttatccagagcaatacgggctttctcgacgcggcttttcgcgccttcatcaatccacggcagcgtgctacgtagttcagcctgataatccttcgcctgctcgcgctgggcggcattcagggaatattgcttaccgttatacatcacgttgccgtctggcgtgatcaccagattgccgttttcgcccttcacctgcacggtttgcgggctgacaatcacatcgtcacgcggcgtgacgctgcactggtagtcggcgtgagcggtcattgccgtcactgaaagtgctgccgccagcagcattttgcgcatcatagtcttccctcaagaacaaatcaggccagcatttgctggccccagattgataacaaagtacgcgttttccatgccggatgcggcgtaaacgccttatccggcctactcgatcgtgcatctttccaggcatgataagcgtagcgcatcaggcagttttgcatttgtcatcgcccgtatgctttcttagtcccaccaaacgtcgaaaagttcgctggtgcgtacctcatccagtttgcgctcttccagccacttacgcacaattgcctgatgttcttcggtgcatttgccgatttcctgcatgcagatcagaccttcccaggccagataaccgctgccgtcaaaggccagtttgttcggttcgataacctcgttaataaaatcatcaacggttttatcaatctgttcttccgatgtaccttccgggaatcgccatgccaccgaaaatcctaattcctggaattcgtcgatgtgcatttttttacgcagacgacggctacggttctttgccattatttcaccctctcgaacattaagtcccatactccgtgaccaagacgatgaccacgttgttcaaatttcgtcactggacgtgatgccggacgcggtacgtaatcattgctctctgacaggtttttataaccgtcaatagaagacatcacttcaagcatatgttccgcataaggttcccagtcggtcgccatatggaatacgccccccagctgcagtttgctttttaccagttcggcaaacggcacctgaacgatacggcgtttattatggcgcgctttgtgccacgggtcagggaaaaagagctgcaccatgcgcaatgaattgtcaggaatcattttatgcagcacttcaaccgcatcgtgacacatcacgcgcaggttgcttaagccctcttcatgcgcagaagccaggcacgcaccaacgcccggtgaatgcacttcaatgccgaggaagtcctgctcggggcgatctttagccattgccaccagcgacgcccccatgccaaaaccaatctcaagcgtcaccggcgcttcacggccaaaaagcgcggggaaatccagcatatcttcgctgaactcaacgcccatcaccggccagtagttttccagcgcatgttcctggcctttggtcagtcgcccctggcggcgcacaaaactacggatacggcgcagtgggcggccgttttcatcaaattccggtgaaatgacgtcgtttttcataaagatttagtcgcttgtgaaagtgttctgaaaacgggcattatccaaagttagttgccggatgcaagcatgataaggccgtggctgcggaaagttccggtttacaccctgccgtcgctgtgctgcaatcttgcccccaacaacagtgaattcggtgaccatgcaagcgtcgcaattttcagcccaggttctggactggtacgataaatacgggcgaaaaactctgccctggcaaattgacaagacgccctacaaagtatggctctcagaagtgatgttgcaacaaactcaggttgcgaccgttatcccctattttgaacgctttatggcgcgcttcccgacggtgaccgatctcgccaatgcgccgctcgacgaagttctccacttgtggaccgggcttggctattacgcccgcgcgcgcaacctgcataaagcggcacaacaagtggcgaccttacacggcggtaaattcccggaaacctttgaagaagtcgcggcgttaccgggcgtcgggcgttccaccgcaggtgcgattctctcgctttctctgggtaagcactttccgattctcgacggtaacgtcaaacgggtgctggcgcgctgctatgctgtaagcggctggccagggaaaaaagaggtcgagaataaattatggagtttgagcgagcaggtgacgcccgcggttggcgtggaacggtttaatcaggcgatgatggatttgggtgcgatgatttgtacgcgctcgaaaccgaaatgttcgctctgtccgctacaaaacggatgtattgccgccgccaacaatagctggtcgctttatccgggcaaaaaaccgaaacagacgctgccggagcgcaccggctactttctcctgttacagcacgaagatgaagtattgctggcgcagcgtccgccgagcggattgtggggcggtttatactgtttcccgcagtttgccgacgaagaaagtttgcggcagtggctggcgcaacggcagattgctgccgataacctgacgcagctgaccgcgtttcggcataccttcagccatttccacttagatattgtgcctatgtggcttcccgtgtcgtcattcaccggctgcatggatgaaggcaatgcgctctggtataacttagcgcaaccgccgtcagttggcctggcggctcccgtggagcgtttgttacagcagttacgcactggcgcgccggtttagcgcgtgagtcgataaagaggatgatttatgagcagaacgattttttgtactttcctgcaacgtgaagcagaaggtcaggattttcagctgtaccccggcgagctgggaaaacgcatctataacgagatctccaaagaagcctgggcgcagtggcagcacaaacaaaccatgctgattaatgaaaagaaactcaacatgatgaatgccgagcaccgcaagctgctggagcaggagatggtcaacttcctgttcgagggtaaagaggtgcatatcgagggctatacgccggaagataaaaaataaaaacagtgccggagcacgcctccggcaacttgcataaaaacaaacacaacacgcacccggaatgatgaaaaaatatctcgcgctggctttgattgcgccgttgctcatctcctgttcgacgaccaaaaaaggcgatacctataacgaagcctgggtcaaagataccaacggttttgatattctgatggggcaatttgcccacaatattgagaacatctggggattcaaagaggtggtgatcgccggtcctaaggactacgtgaaatacaccgatcaatatcagacccgcagccacatcaacttcgatgacggtacgattactatcgaaactatcgccgggacagaacctgccgcgcatttgcgccgggcaattatcaaaacgttgctgatgggtgacgatccgagttcggtcgatctctattccgacgttgatgatattacgatttcgaaagaacctttcctttacggtcaggtggtggacaacaccgggcagccgattcgctgggaaggtcgcgcgagcaacttcgcggattatctgctgaaaaaccgtctgaagagccgcagcaacgggctgcgtatcatctacagcgttaccattaacatggtgccgaaccaccttgataaacgtgcgcacaaatatctcggcatggtccgccaggcgtcacggaaatatggcgttgatgagtcgctgattctggcgattatgcagaccgaatcttcctttaacccatatgcggtcagccgttccgatgcgctgggattaatgcaggtggtacaacatactgccgggaaagatgtgttccgctcgcaggggaaatccggcacgccgagccgcagtttcttgtttgatcctgccagcaatattgataccggcaccgcgtatctggcgatgctgaacaatgtttatctcggcggaattgataacccaacatcgcggcgttatgccgtcatcaccgcctataacggcggcgcaggcagcgtgctgcgagtcttttcgaatgataagattcaggctgccaatattattaacaccatgacgccgggcgatgtttatcagacgctgacgacccgccatccctctgcggaatctcgccgttatctttataaagtgaataccgcgcaaaaatcctaccgccgccgataattccattaaccgcccctgacgatgctcaggggcaaaaatgttatccacatcacaatttcgttttgcaaattgggaatgtttgcaattatttgccacaggtaacaaaaaaccagtccgcgaagttgatagaatcccatcatctcgcacggtcaaatgtgctttttcaaacactcatccgcatcacgatgtgaggaaattaacatgaatcttaagctgcagctgaaaatcctctcttttctgcagttctgtctgtggggaagttggctgacgaccctcggctcctatatgtttgttaccctgaagtttgacggtgcttctattggcgcagtttatagctcactgggtatcgccgcggtctttatgcctgcgctgctggggattgtggccgacaaatggttaagtgcgaaatgggtatatgccatttgccacaccattggcgctatcacgctgttcatggcggcacaggtcacgacaccggaggcgatgttccttgtgatattgattaactcgtttgcttatatgccaacgcttgggttaatcaacaccatctcttactatcgcctgcaaaatgccgggatggatatcgttactgacttcccgccaatccgtatctggggcaccatcggctttatcatggcaatgtgggtggtgagcctgtctggcttcgaattaagccacatgcagctgtatattggcgcagcactttccgccattctggttctgtttaccctgactctgccgcatattccggttgctaaacagcaagcgaatcagagctggacaaccctgctgggcctcgatgcattcgcgctgtttaaaaacaagcgtatggcaatcttctttatcttctcaatgctgctgggcgcggaactgcagattaccaacatgttcggtaataccttcctgcacagcttcgacaaagatccgatgtttgccagcagctttattgtgcagcatgcgtcaatcatcatgtcgatttcgcagatctctgaaaccctgttcattctgaccatcccgttcttcttaagccgctacggtattaagaacgtaatgatgatcagtattgtggcgtggatcctgcgttttgcgctgtttgcttacggcgacccgactccgttcggtactgtactgctggtactgtcgatgatcgtttacggttgcgcattcgacttcttcaacatctctggttcggtgtttgtcgaaaaagaagttagcccggcaattcgcgccagtgcacaagggatgttcctgatgatgactaacggcttcggctgtatcctcggcggcatcgtgagcggtaaagttgttgagatgtacacccaaaacggcattaccgactggcagaccgtatggttgattttcgctggttactccgtggttctggccttcgcgttcatggcgatgttcaaatataaacacgttcgtgtcccgacaggcacacagacggttagccactaattacgcaaagaaaaacgggtcgccagaaggtgacccgttttttttattcttacttcaacacataaccgtacaaccgtttcatgccatccgcatcggtttcgctataaacaccttgcagctccggcgaaaatcccggcaacaaattcaccccttcttccagtgcaaggaaataacgttgaaccgccccaccccagacttccccgggtaccacgcaaagcacgccaggtggataaggcaacgccccttctgccgcaattcgcccttcggcatcacgaatccgcaccaactccacttcaccgcgaatataagcgctatgcgcatcctgggggttcatcaccactgacgggaaactctgctggcggaacatcgctttttgtaggtctttgacgtcgaaactgacatacagatcgtgcatctcctgacacaactggcgcagggtgtagtcgcgatagcgcaccggatatttgttataaacgctcggcaacacctcagccagcggcgagtcatcctcaatatgctgttcaaactgcgccaacatctctaccagttgtgccagcttctcgtggctttccgccggagttaataagaacagaatggagttgagatcgcacttctccggcacaatgccgttctcacgcagatagtgcgccagaatcgtcgccggaacgccaaagtcgctatattcgccggtttcggcattgatacctggtgtagtgagtaacagcttgcacggatcaacaaaatactgatccgcggcatatccttcaaagccgtgccacttcgcccccggctcaaaactgaaaaaacggcggtcgctggctaacacagacgtcggataatcctgccacaatttgccatcaacaacgggcgggataaacgggcggaacagcttacagcgcgcaagaatagccttgcgcgactcaatacccaactcaacgcactcagcccacagccgacgcccactctccccttcatgaattttggcgttaacatccagtgcagcaaacagcggatagaaagggctggtagaagcatggagcataaaggcgttattcaaccgcttatgcgggcaaaaacgcgcctgtccgcggatatggttatcttttttatggatctgcgacgtctgtgagaatcccgcctgctgtttgtgcaccgactgagtcacaaagatccccggatcgttttcgttaagttctaatagcagcggcgagctatccgccatcatcgggataaattgttcataaccgacccacgcggaatcaaacagaatgtaatcacacagatgcccaacggtatcgatcacctgacgggcgttgtagacagtgccgtcataggttcccagctggataatcgccaggcaaaacgggcgcggcaactcagctttttctggcgcaacgtcgcgaatttgctggcgcagatactcttcattaaaacagtgcgcatcaataccgccaatgaaaccaaacgggttgcgtgaagcttccagatagaccggcgtcgcccccgcctgaatcagcgcgccgtgatgattcgacttatggttgttacggtcgaagagcaccagatcgccacgcgttaacagcgcattcgtcaccactttattcgctgccgatgtgccgttcagcacaaaataggttttatcggcatgaaagactttggctgcgaatttctgcgcatctttcgccgatccttcatgaataagcagatcgcccaattttacgtcagcgttacacatatcggcgcgaaagacgttctcaccaaagaaatcgtaaaaatggcgtccggcaggatgctttttaaaaaacgcaccatgttgatgtccagggcaagcaaaggtgctgttgcccatctcaacgtactgcgtcagcgtgtcataaaacggtggcagcaaattctcttcatactgacaggctgcggattccagctccagccactgctgctcgttgccgttgattaccgccgtaacgcccgcaggtaattcaacagcatgttcggaatacaaaaacaccggtagatgaaaaccggtgcgcttaagcaacgcaagaatgccactgcgactatccgcagcggtaatgacgactgccgcgacgtccgtaaaatcagtatctcccaacgccaccacgcgacgatgagaagaaagtcgggataccagttcactactggcggcaatattcattgatttcataagcgcaaacccgtttcggggaagtaagaataccggacaaggtggaaaaccctgccccatgagatatgggtcaaactggtcaccagctccgaccgccagacatcagtaaaagcagaaacgctctgattttactgttgtcctgcagtgagcgtgcgttaacttcaccgcatgagcagtaacatagaaagggaaacgtttcgcgcgaaacggcgataagcgagagaatgtaaggagatggcgtgcatcgggcaaactccgtacagagaggagaaaattcgcgcaatcatggcacctttcgctaaagcgtgcaagccaggactttgcgaccagacaagccatcaacaaggcaaaaagttcataataagaaaatcaaacaatacagctaacaggaactcttgtggtcatcggcccttttatcaacgctagtgcagtcttactgggtggcgttctcggcgcactgctcagccaacgcttaccggaacgtatccgcgtctccatgacatctatttttggtctggcatcgctggggattggtattttactggttgtgaaatgcgccaaccttccagcgatggttttagctacgctacttggcgctctaattggcgaaatttgtttgctggagaaaggtgtcaatacagcagtcgccaaagcacaaaatctgtttcgtcactcacgtaagaagccagcgcatgaatcttttattcagaattatgtcgcgattattgtcctgttttgcgccagcggcaccgggatcttcggggcgatgaacgaagggatgaccggcgatccgagtattttaatcgccaagtcatttcttgatttctttacggcgatgatcttcgcctgctcgctgggtattgcggtgtcggtaattagtatcccattactgatcatccagttaacgctggcgtgggctgccgcgctgatattaccgctgaccacaccgtcgatgatggcagacttcagcgccgtaggcggtttattgctgctggcaaccggattacgcatctgtggcattaaaatgttcccggtggtcaacatgcttccagcactccttctggcaatgccgctttccgccgcctggaccgcctggtttgcctgacaatgcgtgcaatagcggcaaagtgatgatagattgtgcagtctgcagtaaattgaagaaatttgattgacgagacgaggcgaatcaggtttaatgcgccccgttgcccggatagctcagtcggtagagcaggggattgaaaatccccgtgtccttggttcgattccgagtccgggcaccactaattcttaagaacccgcccacaaggcgggtttttgcttttggatctgacaataaccttcacgaaaaaagtttgcttataaagtctgggggaattactctcgccacgttaacgagagtaattttattgatactaatctcctgatactttacccccgtccaaactccagccgctgcacattcaccatcccagtcttctcagcagcactggcatcaatttgtgtcacccgcagcgcatacttttcatccagcgcgtttaaccagttcagcaggtcattaaacaccaccggatctatccagacctgaatattctccccacgctcggctatccgcttgatgactaccgagtgcgcggaagcgctgtcactgataacccgcgatacctgcgcaggcgttgttgtggcggattttcgcgccgccataatatccggcgcggcgctcctcagtctggtgttcatcgccaccagttgctgcaacattgtctcctgttgttctatccgttcgctcaacggctgccagatgaggacgtaatatccgacgctaaacaggaacaccaccgctgccagtaacatgcccttttcacgcggagaacgccccgccaggtgttgtgccagccagtgttcgccacggcttaactggcgttcacgccattgctgaaaatagtgaataaatttatcgcgtaacatgttatttcctccgcaacgttacgccgccggaaaccgcatcaccctctttctgtaatgcgtcctgttgcacaacataatcggttgccagtgcactacgcagtttgtcgaaactggcaaagttagcagcccgcaactggaggtgaagcgtctggcgtttttgatcaaaggtgaaaccacgcatttcgatgtcggaaagtgacgctgatttcagggtgctggctatcgctgacaactcggcgagcagccgggtatcgtcggcctgtgggcgatattttttcagcgccatcgtcacctgagagcgtaaattcacaatccgcttctgctccgggaacaacgttaagaactgttcctccgcctgggtgcggctttgcgccacctgttcgctgacgctccataacgtcacgccccgctccactgccagcgcaaccagaatcagcaatatcggcagaatcatcacccgccagcgcgcccactgttttcggtagctgacgcgaggctgccacggccctgtcagcaggttcccttccggttcgccataagtggtaatggcgggcagagctgtaacggtcaggcgttcagcgtctgcgccagcccatgctgatagcttttccggtgcaatgccgactacggttagcgaaagcggtaaattctgctcattgagctgggcgcggaacatgaccggagccagcgcccgcccggcgctccatccccggcattcatcgatgcggcagataacccgttgtgcatcgccagccataaacccacaaggaatggacatccagtccggcgcgacggtagcgcgggtgatgccgttttcctgcaaccactgcgcaatgttgcgcatatgctgttggtgaatcacggctacggttgccagttgctgattgattttcaacggggcgaaatgcagttcatcgatatcctggttcagttcttcttccagtaaggcgggcagaatagtcggtatctgcttgcgggcgacaacaggcagttcaacctgccagacgctgatccattcgccgggaatgtagagtcgaatcgcatcagtttgcagccattgctggagctgttcgttagcaacgtcagaccagataccgtgctccacatcgggtgtacggcgctgccaatggatgggatcagcggcgcaaagcgggaaaaaaatctcaaggatggaactcactcactttctcctgtctgatgccagagaaccgaaaagtgttgtgggcccatgcggacaattaacgagttcatcgtcagttcaatctcattcacggtgatatctgaacgcagccagaagtaattgctgtccacgctcaggacggtttttagctgttttttagtacgctcatcgacgtcagcaagtagcggctgtgcaagaaactgatcgacatcttcccagcccttcgccggacgttgttgtaataacgcccgcgcctgaacagggcttaaccacgggtcaaacagcgcctcaagaatcacactttgcgtgacgtctaaagtattgatgttgatttgctggcgggtcatcggcagcgcacagaccagcggtttcagtttttgataaagcccggcgtccattccctgcaccacgcgcatctcgctgatatcggccagcggttgattggcggcgtagaacggcaccgagcgggcgagatattcgctgtcttcacggcccagacgcgtctgcacgctgcggtcttcatcaataaactcccacaggctttcggctatcagttcggcccgataagcaggcacatccaggcgcgtgatcagggcaatcagttgttgtaccgcgagcggacgcgacgccgttgtgggctgagcgagggcattcaggttaaagcaggcctgtgcgtcacgcagagtgacggcgatttgcccctgcggcagtgggaaaaaacgagggccggaagcccacggctgttccagatgcacgcgcttttcatttttcaggctcagactgagcgcgctcagcgccaggctttctgcactggcgctgtaccacagcgcctgctggtactcctgctggctgcgcgttcttcccagttgctgctgcatccgcccggaaagcgtgatggttaccagcatcataactgccagcaataccagcaccacgaccagtgccattccgcgttttggtggtgaggtgatcatgattattgcggcccgcgtaacaaccagatgcgttcaatctcgccccattgcggcgaatgcagggtcatgcgtaccgccacagggatcgcctgtactgacgaccagctctcctgccagcgcgtgccgtcgtagaactgcaaacggagcgaatcggccggaatcaacttttgcattgtcggcttcacgctgcctgcggcatcggtcagcggccaggctaaccgttcgagataaccgtcatgaatgcggtaaccgacggtgagcagattactgcgcggcagacgcatcaacgggttaaccacaccgccgcgcacaaaacgcattccttcactctcagacgccagcacgccagcgccagccagtaacgctggttcacgctggccctgatcgcctcttaccggacgcggcatcatttgggtcagatcgtgggtcagaaaactcatcgtttgctgcatgaggtttagtttttgatcgtgtccggcgacggtgctattcacgcgcgtgacgccgttagtcacctgctgcgccatcagtgccagcgaggcaaaaatggcaattgccaccagcatttccagtaacgtgaaaccagcgcgagcccttctcactgttggcctcccacggcgctaaaccaggcgcgtcgtgactgaatcaccgacgaaaagtcttcgtgaaggctgacttcaatatccaccgcctggagcagcgcgttgcctgtattcaatgggattgttcgccagtaccagcggcttcctgccatatcgctctcgccctgatgcctgaccgcccgctgctcacgggtcatcaggtagagcagcgcagtctggttttcagctacccagcccgctaccgttttttcctcaagaacgtgctgattactcagcgcaccgctggcaatctgtaacaccgccgtggcagccagcgcaaaaatcgccagcgcgagcatcacttccagcaaggtaaatccgcgcttcatggcatcctctcatcacattgattgagggataacgcgccatcgtgtgccagctttaccgcccaacatgcgttttgcgccgccgagtagaagcgcagcgtaaacggcgtggcgggttcaaaaggcgaaaaacggatctgcggcgtcttctttttcgcctctttttgcagctccagttcaatatcgtgcagcgtcaggcgacgacgttgcagctccagcgcatactccttctgccagatatcacttccgggttgtaacagcatctgcaccagttttggcaccgtaacctgtgccgataaccgggtcgcggaaacgggcaaccactgcccctgacgacgctgcataaactgatagccaggcgcgtcgattagcacaccgagtgttttcccttcgatcactgccctgtccttaaactgcgcaaagcgagtcagaaaatcctgcgccgcttttttcgcgggcgattcagaatcggtcgcaaaagtctgtaccacgcccgcactggcaaggccgataagaaaaatcaccagcatgatttccagaagtgtgaatccgcgttcaggcactgcttactgaaactcctgcaaattccagttaccgatatctgcgccagcgccttccccgttttcctgaccatccgcccccagggtataaacatcaaacagccctttttcacccggactgagatactgataatcattgccccacggatcctttggcagtcgtttaatgtatccaccagtacggtagttgcgggagtccgccatattggctggctgctggatcagcgcctcaagcccctgttctgtggtcggataacgcccgttatccagtcggtacatatccagtgcgttttccagcgccacgatatcgctgatggctttttgccgatcggctttctctttgttgcccaacaggttaggcaccaccagacttgccaggacgccaagaataacaatcaccaccatcacttccagcagggtaaaacctgcccgtggtttttgtgtgcgggataacgaattcatgtgataactccgtaaattacattccaaccatattattcagttgcagcatcggctcgaggatggcgatgacaataaacagcaccacgcccgccatcatcaccaccagcgccggttcaaacagccctaacgccagccccacctgggtatcaaattcccgttcctggttgactgcggcctgctcaagcatggtttccagttcgccgctctgttcgccggaggcgatcatgtacagcatcatcggcgggaacaggcgcaactccgccagcgcggcgcgcagactgcttccttcgcggacgcgatctgccgccagcagtagttgttgttcgacatagcgatttgccgacacggcggcagcagtctgaataccttccagtagcggaacactgctggcggtgaggatgcttaaggtgcgggaaaaacgcgccgtattcagcccgcgcgcaacacgccccgtcacaggcaggcgcagcacggtttgatcccagcgcaggcgcatagcaggatttttaagtagccgttgccccagcaccagaagccccagcaaacccgccagccagtaaacgccgctggcctgtaacgcgtcgctcatggcaataagcgtgcgggttgaggcgggtagcgcgtgtccgagatgatcaaactgttcgatgattttcggcaccactgccgtcagcaaaatagtgactacgcccgttgccaccaccagcagaaccagcggatagagcatggcctgcaatagacgtgatttcaggcgctgtcgctgttcggtgtaatctgccaggcgattaagcaccacgtcgagatgcccggatttttctccggcagcaaccatcgaacaaaacagagaatcaaagacgcggggatgttcgcgcaggctgtccgacagggtgtaaccttcctgaatccggctgcgcagcgccattccgaggctttttacatgcagtttttcactttgctcactgaccgcctgtaagcaggtttccagcggcattgctgcctgtaccagcgttgccagttggcgcgtgaacagcgcaagatctgccgccgccacgcgacgatgtgcgtgccgccgacgctgcaacatcccccctgacgaagtattcatccgggcttcaatatgcacggggataagctctttaccgcgcaacaactggcgggcatgacgcgcggaatccgcctcaatcatacctttggttttgcgaccattacgctccagcgcctgatagtaaaacagtgccattacgcctccatggttacccgcagaacttcatcgagagaggtttctccggcgagcactttctcaatgccgttgctgcggatacccgcagagtgttgtcggacataacgttccagctccagctccccggcctgacggtggatcaaatcacgcaatgtggcatccaccacgatcagctcatggatggcagtccgtccgcgaaaacctttgtgattacaggcgggacagccctgtggatggtacagagtgacggtacgggcgtcggtaattcccagcaggcgtttttcttcgtcagtggctggtgcgggctggcggcagtcgggacacagcgtgcgaaccagtcgctgcgccatcacgcccgtcagactggaagagagcaggaaaggctccacgcccatatcctgcaaacgcgtgatcgcccccaccgccgtgttggtatgcagcgtggaaaggaccaggtgtccggtaagcgatgcctgaacagcgatttctgcggtttcggtatcgcggatttcaccgaccatcaccacatccgggtcctgacgcaaaatcgcgcgcaggccacgggcgaaggtcatgccgacgcgggtgttaacctgtgtctgaccgatcccttcaatcatgtattcgatggggtcttcaaccgtgagaatgttacgcgaatggttgttcagctcctgcaatccggcgtacagcgtggtgcttttgccggaacccgtcggccccgtcaccagaaagatgccgtgcggtttgtgtaacagctggcgcaactgcgcggtcagttgctggctaagccccagacgctccagcgtcaggcgggcctggtttttgtccagcagtcgcagcaccacgcgctcgccccaggcggagggcatggtggagacacgcacgtcaatcgcccggccgcccagcaacagcgcaatacgtccatcctgcggcacgcgcttttcggcaatgtccagccgcgccatcaccttgatacgcgacaccagcagcgaggccagtttgcgccccgggcgcagcatttcatgtaatgtgccgtcaacgcgaaaacggatcaccagactcttttcaaacgtctcgatgtggatatccgaagcgccttctttaatcgcctctgccagcatggcgttgatcagtttgatgatcggcgcatcgtcgtcactttccagcagatcttccgtttctggcagttcttccgcgagagtaaaaaagtcctcagcagaaccgagatcttccatcagctggcgagcctcggaagagtcccgctgccagaccgcattcagccgctgttcaaattcggccccgtcgatttgccgcagcgtaaagggcgcgttcagcccccgctgcagctcctgcaaaacagagagcgatagcggatgaacgtggaggatctccagcgacgcttcgcaccatgccaccaggctaaaccgacggctgaaactgtagggcagacgcacggtgttagcggtggtttcctgtgctacaggcaccattaacgcgttctcccggcattaaggaatgcacgaacttccggcggtagagcctgattttgcgctggcagtaccggctgcgcggtgtgcggcatcaggcttaaaccttgctcatcgcgatagatctgctcggcgcgcatgtagttatatttgcgctgcgacacgccgtctgccgccataccgtcacgcagaatggtcggacggataaacaccatcaggttacgtttttcttttttatccgccgtcgatttaaacaggttaccaatcaatgggatatcgcccagcagcggcactttcgccacgctttctcccgcctgatcgtccatcagaccaccaagcacaatcagctcaccatcgttagccagcacggtggttttcagtttgcgctcaccaaacaccacgtcgaggctggtctgtccttccaccttcgagacttcctgctcaatcaccatctgtaccgcgttaccttcgttaatctgcggcgtgactttcagcatgatgccgacttttttcctttctactgtattgaaaggattgctgttattggagccaacggtagagccggttaataccggaacgtcctggcccaccatgaagaaggcttcctggttgtccagcgtagtgatgctcggcgtggagagaacgttcgagctggagtcgtttttaaccgcctgcaccagtgccatccagtcgcctttcaccacgccaaccgccgtaccgctaaatccagaaagaagctgggcgagtgtggagagatcgccgttggtatccggattaatggtggtagcgccgttttcactgatcaccgtcgagcctttctgcggtttcgcctgagaaatggctgcccccagcgtaccgatagggatctgcgtaccattagcaaactgcattaatccggcatctttcgacgcccactgcacgccgaagttgatattgctaccttcggcaacttccacgatcaacgcctcgacgtgcacctgagcacggcgaatatccagttgttcaatcacgctttgcagcgactgcatgatgtcctgcggtgcggttacaatcagggcattactgtgtttgctggcggcgatggatacaatctcacgcccgctaccgaccgtgccttccgcctcttctttagccgccgtgagcgtgccgctgacctgcttcagcacatcgaccagatcttcggctttgctgtatttgagatagaacacctggctgttgccgctgcgttccatttctgagtccagccgacggatcaggcggcgcattttgtcccgcgtggccgggtcaccactgacaatcacactgttggtgcgttcgtcggcgacaatttgagatttcagcgtcgcaggctggttctcgccgctgtttttcgtcaggctttccagcacgcgggcgatttccgaagccgaggcgttatccagcgggatcacctcttcggtgcgattacccgcgtgatccacgcgctggatcacttctgtcaggcgctccacaacggaggcgcgtccggtgagcataatcacgttggagggatcgtaattaacaacattgcctgagcctgcgctgtcgatcatctggcgcagaatcggtgccagctcgcgtaccgacacattacgtaccggcactactttggtgaccatttcatcgcccgcgtagttgtcgctgccttcaccgaccagcggcagcggctcgactttcgcagcgctggatttcaccaccttcagcacgtcgttttccatcggtacgacggcatacccctgtgcttccagcaggttaaggaatagctggtaatactggcgttcattgagcggggtcatggtgcgaatactcactttcccctgtacgcccggccccataatgatggttttattaaggttagcgccgacggtttcgatgaacgatttcaggtcggtatctttaaaattagcggtgaaagtggcttcttccgcccagaccggtgaactgcataatgccgctgccagcaccagcggcagtaaacgcttttttgttttgaggccagttgtcttcttacgccagaccgacaacgtaatatcacgccaaaacacgatgaatgattctcctggattaaatgcggttagcgcagcgcgatggaaatgtcgtggcgcgcacccttgcgtaaaaccgtaagttgaatggaatccattgaaggtaactgccgcatcagagcaatcattgctcgtggatcagtgaaatcctgctgatttagcgcaatggcgatatcgccttccttgaaaccgctggcatcgaacagagaacgatctgcccccggcttcactgcataaccgacaatcccctccttacgcacaggcgtaagctggatatagttaaaaattttctgcggatctttcgccagtgcctgacgcacggcagtcgggatctcaactggcgcactggcagcaggctcagcaacagcttgctttgcttcgtcactgacagcttttttgttggtcacggcaacagtggaacgctcctcttcagccaggctcaggcgctctatttttccctgatagcgcagcatcacatggtcgcgattgatttcctcaatcaccgcattgtgcgagccaagcgtttcaccctgcaaatagacctgctgtttaccgccttcttcaataaccgcgccgggtctggcaccaaaggcaatcccgcgcagcaccacattaagacgcgtttctgccacaggcacaggttcgggttgttttaccggcgtggcgacgggctgatatttgccaaaccagttttgctggctgattaattgcacgtcatttttatcgaacgtttttgcatccgcacggggcggtttattcgccgatggggaaacagccgtatattccgcagaaaaggagaaatagcgccagagtgaatgcgccacttttgcagaaataataagcagcatcagccagaacatcccgcgtacaatttttcgcagatgctctttgtctgtattaaaagattgtctctggttaagagtgtgacgaatttttgtcagccattgaatgagataaattcgtgcgtcacgaaaaacaacccgcgccaatttatatctacccgacgttatgctttgactattccacaggtggtacgatccagtttccgctgatactggttacctgtacgtgtatcattaatcgttatgctgtaattaattccctcggtaatcattaatttcaccgttgggtcagcgcacatttgtcgttgatagctggttaaaaaggcgtcaggcgtctgcgtggtctgagtccccgcttcgctgataatggtcatttttaccgtcgtgccgctactttgtgccagcactaaggtatatcccgcagatttaatcggcaggttttggctgatattttgcgcctgttttttcgccagtaaactggcattttcattatggctggcacagccacttaataatcctgtaacgctcaacaatagcgatattaataccctccctggcatttgttttatcgacatggtaaataatctctaaggttattaataagagttaaaatgtcactttgataatgacgttgttatcattaaaacaatgcctgtagataaattgttgctataccgcccagacttaaacacggtccaaaaggcagtgtggttgatcctctttttgtaataacggcatatatcaggccgcagcatgatgcgattaaagcaacattgggtagcgacaacggccccacccaactacctaacgcagcgaacaataatacatcgcccatgcctaatgcttctttacgcagaactactccggctatccagcgcagggagtaaaaagcgataaaccccaccaggacgccggtaactgcatcttgtagcgtgagcgggctctgctgcgcccatgccgcaatcagtcccgtccacaatacgccctgagtaaaaacatcgggcagccattggtgatcgaggtcaatgacgctcgcggcaatcagccaggcggataatatcatcaccgccagcgcccatccactttccggccagaccagactcgccagcaaaaaagcgagtgccgtcaataactccaccagcggataacgcttgctgattttcgcctgacaatcacggcagcgccctttgagcatcagccaggagagcagcggaatattgtcacgtatccggatggtctgctgacaatgtgggcagtgggaacgcggtagcgcaaggcttatttttgactgcgcactcggcatttcaccatgaaactccgccatttgttggcgcagcatgatggggtaacgccaaatcaccacattcaaaaaactgccgatgatcaatcctccgacggttgccagtatgggcatcgccgcggggtattgctgaaaaacatcaaaaagcatggttaaaggttgtttgttgtaacttgccggatgcgggcctgcaagtgtatgccatacggctttcctccaggcccgataagctggcgcaacccggtgcgccttatttcatgccggatgcggcgtgaacgccttatccggcatacaggattactcgacagacatcttatgctcggtaaccttgttaatggtttccggtccctgttccggtttcggcagcttgagtgacgccagcgtgttgtacgccgactggctcacaccgccctcgaagctcatctcgctcgcccccggcagctggtaagcattcgcacccggattccatttcttaaagaactccgaaagatccgtctgggcgacccaggaggcacacagcatcagcgtgtccgcagcgttaccgttggattcagcacagtaattcttgccaccaaaggtcttgtcaccaacgtcatcgccgcgcgctttacggtgcatcaactggaacaggttccagcctttcatcccttcacgatcgctgaagaacttcggcaattcaccttctggataccatttcttgatatcaaagtttttctctgcccattccttcagctgcgcgtacatcagcagacggtcacccgcaccgccgcgcgcccatgcctgaccgttgctctcctccagatattccggtgcgacggtaatatcgtcagcgacacggttcatcttgccgagataacgatcctgcatgtacagcgccagcacgttgttcgccacttcggtcgcgcctggaacagtcagcggcgtttctgcggcgttgtgccctacttcgtgccagatcagccagtcgttcagcggcgtcgtcggcagcgtggtgctgttcgtcgagaagctgctgttcattaccggataacccgaatgcgcatcaccgatggagatctgcacatcgttggcgaaacgatgcttgtggcccgtcaagtttttataggtaaacatccggtgcttaccgtcttcctcattacgaccgtagaaatcattcatcgagctggcaaaggtatccagatcgttagcgaattgcttcagtccgccagtgtaattgctggcattcaggttcttcttcggtgcggtataaacgaaagcgtctgattccagctcacccagcggagccggtgagttcagatcgtttttccatgcgccgtctttatagaacggtgcttttaccacaccagtaaaggtgaagctggcagattcattgtctttgctgtcgcctttgatataaatcagaccaccgtaaggcaccttgaatttcaccgtaccactagcgtccagagagtacgttttggttactcttggcggacggttcagcgcgacttcatgcttctctcttccggtcaggtcgtcagccagcgccacggtgacggtcacaggaacgttcgcattggacttaatggtgacctctttctgagccggtgcccacaggccagttgactgcatgttacctgcaaaccatttggtcggattcgagtacaggctgatggtttcagtaacgttctgtccctcttccgatactgctcccggatacttctcgacatcaactttgatgttcagatcccaccaggaacggcccagcatcaggcgtgtcagcggtttttccatatagttgagcgggtagctcgggttcatcatgcccgctttgctgctttcttcaccgtaaatcatcttgttatcgatcagcgattttttcagctcagcggaacactgcgtgccaacgtatgcattgttggtgtagcagttcagaaactcagtgaacgttttaaagcccagctcgtcttctttaccctcttcataacgatatttcgtctcgttccacagccagacggacatgttttggtataaacgttccagatcgacgctgttgagacgctcaccctggaggccattggtacggaaataaagctcatgctgatacaggcgctgaatattggtgcctaaatccgcagcctgcagcatcgctttcgcagtgtcagctccaagatccagctgcgtatactgcggaacatacatgccaccggttaccggcacacccgtgcctgggcggtattccagacagttgacctcatagtgatagtcagaatccttacacacttccagccctgggaacgcgtccagaattctctgttttgccgcagccagtgactcaggcgttttgtggtcggcttcatcaataaaggcgaattgggttacctgtttaccctcaacttcttcctgccagctggcaacttccagcttcggtttgtcatcaggtttgttttcttgctgatatttccagataacttctttcgtggtgtcatcaatggtatacggtggtttaccatcgacagccggataacgctcatagacccaaattggcgttgaacgtcgttgacgaacacggtcagggtagccttgcggatcgttatttactaccgacttgttaagcgccatcgacaaacctgcggcatcaagcagacgtacaaagccagatgcgctctcttccttaagattgctcatcacgttttccatgatcagcaccgatccacctttgttcatataggcgatcaaatcggtcacatcctgctgggtcagcttcggtttgctggtatctgcgcgcagaggaatggagtaaggatcgctaccccattgtgtgacgtattcaaagccattgaggatcaacagaggaacttcatctggattcagattgccatagctggtcattggtttgaccgtgatgccagtgaaatccttgtggaacgcaaacggtgcgctatttcccagcacctgaccatgttttttgaaatataccgtgtccaggttagtacccacggtcatactggattttgcatccggcaaccagcgatcatttgacagatagcgcagcacgttctccatgaagttcttcatgtcatccgggtcgctgttgagcgtacactgtccgtctttattaacgcccccgttccagctgtagccgttcgggcaacgcaggatgctgttgtagtgtgggttaccgataaccatcagcttgccatcgcccacttgccccagcgagataaacggcaggttgaaggtggcggtttcgcgtgtcacgttctctggtcgcacaatggaaggcgcttcagtaatgtacgccagctcatttttatcccaggcgcgtttttcgccaaacgccagccagtagtttttatcattacgcgccatcagaatcgggaaggccgcgttggagatattcaccaccgcctgaccgcgcgcattacccgtgctgccatagaagttggtagagtcatggaatacatggaacttactgacagatttgtagttcgtatccacgccccacagcttgttgataacgccctgaatctggccgtcattaacattgcgcgttgtcagcgagaaccagcgagcctcgttacaaccatcggttttcgcacaaatcgcggtatcgatctctttggcctgacccgtcttaaactgctcgataaattcgttaggcagattaacgacttgctcaccttcccccagcgtcgcaccattggataacgagagattgataatctcgttaatcacgttgggatattcagcaaaaaccttgcgcacttcatccggaactacacgcgtgtgattttgtccagccttcgaatagcggtgaatcaactgatcgatatttgccccgcgaacttcatcacccagttcagtcaatgcaatagtcgacttgttaccacgcacagaaccaagctcaaaagtgtcgatgccaaaggagatggtttccccccaactaaaggaaaattccccgttttctccggttacaccacggccggaattggtgtaatagttgacaccaacaacaccatccccctgactatcgaccagtcgaccttcagagagaattatttcagtgggttgatactgataaaactgttccgcgttagccgacacgaaggaagcgtttagatccggttttgttcccggagtggtggcgggcacgaccggtgaagtatgagtggatggcgctttatcggtcgcggcattgttttccacctcttcattgaccagctttttgaattcttccggtgccagatcgatttgcttatacagcgagtcgaaacgtttactctcgatcaccgaggagaactccaggcacacctgttctgtattcgccgggcaactgttcatggaggtgaccagcgagagcgcattgcttttcttgttgtcggaacccgccagttcttgcgcgtcctcaagactaaacgacactttttcaaccgcacgcaggctacgcgcagcttctgactgggtgtcgaaggtagcaattgtcgtgttgttccctgccacacaggtgactttgtcgcctggtgtaaaggtaaagccatcgctggattcatcattacaggtgatatcaccagttacccgcaggcttccgcccagggtcagataacccgttttcgtaggaacaggttctggctccggttctggtgttggctcaggatcaggtgtcggttccggcgtaggttctgggtccggcgttggctcaggcgtcggctccgggtttggtgttggatcaggtttcacttccggcaaagaccctgttccagaatctacaggcggcgtatcggaggaagatccggagccaccgccatcacaaccggctaacagggttgcactcaaaatagccgctaaaagcgatttcttatatttaaatttcttattcattaataacgcaagtgacaaaacaatgttaaaaaattcgtaactgggagaaatagttttatgctttatcttctttaataatttcctccattcttaagaaaacgacatcattgatagaaaacaggtgaaatttataagaataacccctatttgatgtctggctggctatttttacgaaatttcaataaacaaaaaattaacaacatttcacaacgcaactatataaattcgttggtagttttaacgattaagattgcaaaagcaacagatagaacggtgtttgctcatcaagtgaacataattaatacagacttgttttgcgtgataaaaaaaatagatgttctcacgctcggtaatgactccaacttattgatagtgttttatgttcagataatgcccgatgactttgtcatgcagctccaccgattttgagaacgacagcgacttccgtcccagccgtgccaggtgctgcctcaga
